United States Patent Application Publication US 2006/0150283 A1 - sequence listing, part 2

SEQ ID NO: 3646 - DNA, 1987 bp, Zea mays subsp. mays
  misc_feature (1)..(1987): Ceres Seq. ID no. 12358799
  misc_feature (1)..(1987): Ortholog of  Ceres SEQ ID NO 15178236 as cited in SEQ ID NO 67053
ctcgagtcgagcgaaccgaagccgaacatacccacccatcgtctcgtcgtctcgtcgcgcgtgggcgtggctctctctccccccacctcctcttttaagacgacgccatcgccagccggccctccctcgccgtccggcgccgtcctccttcgtccttccctctcatcacagtttccacctcgcgaggggctcgcgcgcgcgcccatcccggccgatcgactcacgaattcgcgcgcgatcatattcgtgcaagggcatccccgcacggccggaagcacggaatcacttccccgccccccaattcccgggctcctcggcgccgatccctcgccggtgttcgctttccggcggtttccgcggcgtgtcgcgggcaggcgcaggcggctcggctcggttgtttcctcctcgtgccatcatccatggaggcgaagcagcgcccgcggcacggcggggagaggaggccgccgccggcgacggacggcggcgaggagtacgacccgtggacggcgtggctctacaagccgcgcaccatctcggtgctcctcgtcggcgcctgccttctcatctgggcaagtggagcacttgatcctgaaggtactgccgctcacagtagcgtgacatcaatcaagaggggtgtctgggctatgattgcagtcttccttgcctactgcacgcttcaggcaccttcaacgatacttattaggccccatcctgctgtctggcgcctggtacatggactggctgtcgtttacctcgttgctcttacctttcttcttttccagaaccgtgacgatgctcgccagttcatgaaacaccttcacccagatcttggagttgaattgccggagagatcttatggagcagattgccgcttgtatgttccagaaaaccctaaaaacaagttcataaatatttatgagacattgtttgatgaatttgttgttgcccatatccttgggtggtggggcaaagctgtaatgatacgaaatcaacttctactttgggtcttgtcgattggctttgagctaatggagctaacgttcagacatatgctgccaaactttaatgagtgctggtgggatagcattatcttggacatattgatctgcaattggtttggtatttgggcaggaatgcacacagtccgtcactttgatggcaaaacttatgaatgggttggattgagccgccaacgaagtatcatgggtaaggtgaaaagatcgttgagccagttcactcctgctcaatgggacaaggatcagtggcatcctttcatggggccactgcggttcatccaagtgctgttcctctgcgttgtcttcatgaccgtggagcttaacacattcttccttaagttttgcctttggatccctccaaggaaccccttggtcgtgtacagattgatcctctggtggctgatcgccatcccaaccatccgcgagtacaactcctacctgcaagacaggaaaccggtgaagaaggttggagccttctgttggctctctctagctatatgcatagtggagctgcttatctgcatgaagtttgggcatgggctgtttcatgacccgatgcctacctggctgatcatcttttggagctcggtcgggactgcactcgtgattttcttgctttcgtggtcatggaggagtcaccaaaggttcaggagaaagcagctctgattgtttcagtttgctacttttctttttcgaattttatataggcgttgtacatatttgatatggtttgtgatgtaacttacgttttaggggtggccatttttctgctgcccctggcaggaacttggtttgtcacgatagatcatgcattgttgacaacatgagattgattaataaattgaaataaccgcgacatcataaccagttgtaattaattattaaagcaaggtcactgcatattttggttccaaactaattctgggccaacaatgcacagttctgtaatacgaatgaccaatcattatctt

SEQ ID NO: 3647 - protein, 420 aa, Zea mays subsp. mays
  peptide (1)..(420): Ceres Seq. ID no. 12358800
MEAKQRPRHGGERRPPPATDGGEEYDPWTAWLYKPRTISVLLVGACLLIWASGALDPEGTAAHSSVTSIKRGVWAMIAVFLAYCTLQAPSTILIRPHPAVWRLVHGLAVVYLVALTFLLFQNRDDARQFMKHLHPDLGVELPERSYGADCRLYVPENPKNKFINIYETLFDEFVVAHILGWWGKAVMIRNQLLLWVLSIGFELMELTFRHMLPNFNECWWDSIILDILICNWFGIWAGMHTVRHFDGKTYEWVGLSRQRSIMGKVKRSLSQFTPAQWDKDQWHPFMGPLRFIQVLFLCVVFMTVELNTFFLKFCLWIPPRNPLVVYRLILWWLIAIPTIREYNSYLQDRKPVKKVGAFCWLSLAICIVELLICMKFGHGLFHDPMPTWLIIFWSSVGTALVIFLLSWSWRSHQRFRRKQL

SEQ ID NO: 3648 - protein, 345 aa, Zea mays subsp. mays
  peptide (1)..(345): Ceres Seq. ID no. 12358801
MIAVFLAYCTLQAPSTILIRPHPAVWRLVHGLAVVYLVALTFLLFQNRDDARQFMKHLHPDLGVELPERSYGADCRLYVPENPKNKFINIYETLFDEFVVAHILGWWGKAVMIRNQLLLWVLSIGFELMELTFRHMLPNFNECWWDSIILDILICNWFGIWAGMHTVRHFDGKTYEWVGLSRQRSIMGKVKRSLSQFTPAQWDKDQWHPFMGPLRFIQVLFLCVVFMTVELNTFFLKFCLWIPPRNPLVVYRLILWWLIAIPTIREYNSYLQDRKPVKKVGAFCWLSLAICIVELLICMKFGHGLFHDPMPTWLIIFWSSVGTALVIFLLSWSWRSHQRFRRKQL

SEQ ID NO: 3649 - protein, 291 aa, Zea mays subsp. mays
  peptide (1)..(291): Ceres Seq. ID no. 12358802
MKHLHPDLGVELPERSYGADCRLYVPENPKNKFINIYETLFDEFVVAHILGWWGKAVMIRNQLLLWVLSIGFELMELTFRHMLPNFNECWWDSIILDILICNWFGIWAGMHTVRHFDGKTYEWVGLSRQRSIMGKVKRSLSQFTPAQWDKDQWHPFMGPLRFIQVLFLCVVFMTVELNTFFLKFCLWIPPRNPLVVYRLILWWLIAIPTIREYNSYLQDRKPVKKVGAFCWLSLAICIVELLICMKFGHGLFHDPMPTWLIIFWSSVGTALVIFLLSWSWRSHQRFRRKQL

SEQ ID NO: 3650 - DNA, 1637 bp, Zea mays subsp. mays
  misc_feature (1)..(1637): Ceres Seq. ID no. 12407796
  misc_feature (1)..(1637): Ortholog of  Ceres SEQ ID NO 14308813 as cited in SEQ ID NO 55485
  misc_feature (1)..(1637): Ortholog of  Ceres SEQ ID NO 13655744 as cited in SEQ ID NO 64032
  misc_feature (1)..(1637): Ortholog of  Ceres SEQ ID NO 13590394 as cited in SEQ ID NO 66581
tcgctcgcgtctcccttatccattcccaaataatccccacctcccgctgctgctccgccgcccgccatggcttccctcacctcggcgtccacttcactcctcttcccgcaggcctcctcatccatgagccgcatccgtctctccacccccctgggcttctccgcgcagcctgcgcggctgcggagccagggggcggcagtgggcgcgcggcggcgcgggcgcctgctggtggtgcgcgcagcgaggggcaagttcgagcgcaccaaaccacacgtcaacataggcaccatcggccatgtcgaccacggaaagaccactctcaccgccgcgctcaccatggtgctcgcctccgtcggcggcagcgcgcctaagaagtacgacgagatcgacgccgcccccgaggagcgcgcccgcggtatcaccatcaacaccgccaccgtcgagtacgagaccgagacccgccactacgcacacgtcgactgccccggccacgccgactatgtcaagaatatgatcaccggcgctgcgcagatggacggtgccatcctcgtcgtatccggtgccgacgggcccatgccgcagaccaaagagcacatcctcctcgccaagcaagtcggtgttcccaagatcgttgtcttcctcaacaaaaaggacatggtcgacgacgaggagctgctcgagctcgtcgagctcgaggtccgcgagctgctcagcaactacgagtacgacggcgacgacgtaccaatcgtcgctggctccgccctcaaggcgctcgaggctctcatggtcaaccctgccctgaagcgcggcgacgatgagtgggtcgactacatcttctcgttggttgataaagtggattcctatattccagtcccgcagaggcagactgacctcccgttcttgctcgctgttgaagatgtcttctccatcaccggtcgtggtacagttgccactggccgtatagagcgtggcaccgtcaagattggtgacacagtcgatatcgtcggaatccgggacacccggaactgcacggtcactggtgttgagatgttccagaagaccatggatgatgccatggccggagacaatgttgggctgctgctccgtggtatgcagaaggatgacattgaaagaggcatggtgctggcaaagcctggctctatcacaccgcacaccaagtttgaggctgttgtgtatgtgcttaagaaggaagagggtggccgacactcacctttcttccctggttaccgcccacagttctacatgcggacaactgatgtgacagggagtgtgactacgattatgaatgacaaggatgaggaggcgaagatgtgcatgcctggtgaccgtatcaaaatgattgttcagctcatccagcctgttgcttgtgagcagggtatgaggtttgctatccgtgagggtggtaagaccgttggtgccggtgtcatcaacaaaatcattgagtaaactggatataacatatccaccatgagaattttccttgtttactcaaagcgacatgctccgtagttgttattatgtggtgagttttaggggttgctcatgtgcaattgtagtatgacacttttttttgtcaagtgaatttgcataatttatgacattcacgacaaagattc

SEQ ID NO: 3651 - protein, 466 aa, Zea mays subsp. mays
  peptide (1)..(466): Ceres Seq. ID no. 12407797
MASLTSASTSLLFPQASSSMSRIRLSTPLGFSAQPARLRSQGAAVGARRRGRLLVVRAARGKFERTKPHVNIGTIGHVDHGKTTLTAALTMVLASVGGSAPKKYDEIDAAPEERARGITINTATVEYETETRHYAHVDCPGHADYVKNMITGAAQMDGAILVVSGADGPMPQTKEHILLAKQVGVPKIVVFLNKKDMVDDEELLELVELEVRELLSNYEYDGDDVPIVAGSALKALEALMVNPALKRGDDEWVDYIFSLVDKVDSYIPVPQRQTDLPFLLAVEDVFSITGRGTVATGRIERGTVKIGDTVDIVGIRDTRNCTVTGVEMFQKTMDDAMAGDNVGLLLRGMQKDDIERGMVLAKPGSITPHTKFEAVVYVLKKEEGGRHSPFFPGYRPQFYMRTTDVTGSVTTIMNDKDEEAKMCMPGDRIKMIVQLIQPVACEQGMRFAIREGGKTVGAGVINKIIE

SEQ ID NO: 3652 - protein, 447 aa, Zea mays subsp. mays
  peptide (1)..(447): Ceres Seq. ID no. 12407798
MSRIRLSTPLGFSAQPARLRSQGAAVGARRRGRLLVVRAARGKFERTKPHVNIGTIGHVDHGKTTLTAALTMVLASVGGSAPKKYDEIDAAPEERARGITINTATVEYETETRHYAHVDCPGHADYVKNMITGAAQMDGAILVVSGADGPMPQTKEHILLAKQVGVPKIVVFLNKKDMVDDEELLELVELEVRELLSNYEYDGDDVPIVAGSALKALEALMVNPALKRGDDEWVDYIFSLVDKVDSYIPVPQRQTDLPFLLAVEDVFSITGRGTVATGRIERGTVKIGDTVDIVGIRDTRNCTVTGVEMFQKTMDDAMAGDNVGLLLRGMQKDDIERGMVLAKPGSITPHTKFEAVVYVLKKEEGGRHSPFFPGYRPQFYMRTTDVTGSVTTIMNDKDEEAKMCMPGDRIKMIVQLIQPVACEQGMRFAIREGGKTVGAGVINKIIE

SEQ ID NO: 3653 - protein, 376 aa, Zea mays subsp. mays
  peptide (1)..(376): Ceres Seq. ID no. 12407799
MVLASVGGSAPKKYDEIDAAPEERARGITINTATVEYETETRHYAHVDCPGHADYVKNMITGAAQMDGAILVVSGADGPMPQTKEHILLAKQVGVPKIVVFLNKKDMVDDEELLELVELEVRELLSNYEYDGDDVPIVAGSALKALEALMVNPALKRGDDEWVDYIFSLVDKVDSYIPVPQRQTDLPFLLAVEDVFSITGRGTVATGRIERGTVKIGDTVDIVGIRDTRNCTVTGVEMFQKTMDDAMAGDNVGLLLRGMQKDDIERGMVLAKPGSITPHTKFEAVVYVLKKEEGGRHSPFFPGYRPQFYMRTTDVTGSVTTIMNDKDEEAKMCMPGDRIKMIVQLIQPVACEQGMRFAIREGGKTVGAGVINKIIE

SEQ ID NO: 3654 - DNA, 839 bp, Zea mays subsp. mays
  misc_feature (1)..(839): Ceres Seq. ID no. 12368805
  misc_feature (1)..(839): Ortholog of  Ceres SEQ ID NO 13598935 as cited in SEQ ID NO 1239
  misc_feature (1)..(839): Ortholog of  Ceres SEQ ID NO 13598171 as cited in SEQ ID NO 61357
  misc_feature (1)..(839): Ortholog of  Ceres SEQ ID NO 13664149 as cited in SEQ ID NO 61490
accacacgtacgcccacaccagataatacactacagcacagcaccgacaacacctctcaagtaacccagcaggcaccatggccgccgccgtgcccctcctcctcctcctgctactgccaacgaccctgatggccgcgtcggcggcgtccggcggcgagaagagcacgcacatcaagctgtactggcacgacgtggtgagcgggccgagcccgacggcggtgccggtggcgcaggcggcggtgaccaacacctccaagaccgccttcggcatggtggtggtgatcgacgacccgctgaccgagggccccgacctcaagtcctccaagccgctcggccgcgcgcagggcacctacgtcggcgcgggcaaggacgagctctccctgatgatgaacatgaatttcgtgttccaggccggcgagtacaacggcagcaccgtcgccatcatgggccggaacgccgtgttcgacgccgtccgcgagatggccgtcgtgggcggcaccggcgcgttcaggatggcgcgcgggtacgcgcaggcccgcacgcacaccttcgacctcaacaccggcgacgccaccgtcgagtacaacctctacatcaagcactagctagctagcccatcggctttgtgtttctgattgttggtgctcatatatgaacacgatcgaactccataattgtcttgtgagctcaatttgtgccactggcttttgcagttttggtgaaaaagaagagggtaattaaaggacgatagcttcggtcgttgtaagctgacttcgatttaacttgcacaatgattgaggacttaaagaataaagatagtaatagactttgtttatctg

SEQ ID NO: 3655 - protein, 175 aa, Zea mays subsp. mays
  peptide (1)..(175): Ceres Seq. ID no. 12368806
MAAAVPLLLLLLLPTTLMAASAASGGEKSTHIKLYWHDVVSGPSPTAVPVAQAAVTNTSKTAFGMVVVIDDPLTEGPDLKSSKPLGRAQGTYVGAGKDELSLMMNMNFVFQAGEYNGSTVAIMGRNAVFDAVREMAVVGGTGAFRMARGYAQARTHTFDLNTGDATVEYNLYIKH

SEQ ID NO: 3656 - protein, 158 aa, Zea mays subsp. mays
  peptide (1)..(158): Ceres Seq. ID no. 12368807
MAASAASGGEKSTHIKLYWHDVVSGPSPTAVPVAQAAVTNTSKTAFGMVVVIDDPLTEGPDLKSSKPLGRAQGTYVGAGKDELSLMMNMNFVFQAGEYNGSTVAIMGRNAVFDAVREMAVVGGTGAFRMARGYAQARTHTFDLNTGDATVEYNLYIKH

SEQ ID NO: 3657 - protein, 111 aa, Zea mays subsp. mays
  peptide (1)..(111): Ceres Seq. ID no. 12368808
MVVVIDDPLTEGPDLKSSKPLGRAQGTYVGAGKDELSLMMNMNFVFQAGEYNGSTVAIMGRNAVFDAVREMAVVGGTGAFRMARGYAQARTHTFDLNTGDATVEYNLYIKH

SEQ ID NO: 3658 - DNA, 1101 bp, Zea mays subsp. mays
  misc_feature (1)..(1101): Ceres Seq. ID no. 12376272
  misc_feature (1)..(1101): Ortholog of  Ceres SEQ ID NO 15176922 as cited in SEQ ID NO 55251
aagacaccgttatacgctactgtggttggcgacgcggcgaacatcatactggacccgattttgatgtttgtttgccatatgggcgtcactggtgcggctattgctcatgttgtttctcagtacatgataacgttgatactgctgtgccggctcgtccagcgagttcacgttatcccacccagcattaaatctctgaaatttgggaggtttcttggatgtggattcctgctgctcgcaagggttgtcgcggtgacgttctgcgtcacgctggcggcgtccctggccgctcgccatggacccaccgtcatggcaggcttccagatctgctgccagctctggctggcccacgtctcttctcgccgatggattggccgtggcaggacaggcggtgcttgcaagcgcgttcgccaagaacgacagtaagaaggtcgctgccgcgacatcccgtgtgttgcagctgagcattgtcctgggcatgggtctcaccgtcgtgctgggacttgctatgaggttcggggctggcattttcacaagcgacgtgcccgtgatccaagtcattcacagaggcatcccgtttgtcgccgggacgcagaccatcaattccctggccttcgtgtttgatggcatcaactttggaacgtcagactacagatactctgcttactccatggttgctgttgcgtctgtgtcgataccatgcctgctgtacctttctgcgcataacggattcatcggtatatggatcgcattgacgatctacatgagtctgaggaccatagctagcacctggaggatgggggcagcgaggggaccatggacgtttctccggaactgatgatggattggcttggaactgatgatctgcggcacactgctgacagataaggctgcgccgcgctgcgcatgcgcctctcatgtagcatcagcgaagtatagtacgtgttctgctggtgtttaaagcttcggatatcggaggtagatgtagctatgggactatcccctcctgatcgtctgacttgtggccttgcgtggagagtttacgttgctccgttgatttatgttgtatcatgccaggatgtcagtttaataccatacatcggt

SEQ ID NO: 3659 - protein, 180 aa, Zea mays subsp. mays
  peptide (1)..(180): Ceres Seq. ID no. 12376273
MDPPSWQASRSAASSGWPTSLLADGLAVAGQAVLASAFAKNDSKKVAAATSRVLQLSIVLGMGLTVVLGLAMRFGAGIFTSDVPVIQVIHRGIPFVAGTQTINSLAFVFDGINFGTSDYRYSAYSMVAVASVSIPCLLYLSAHNGFIGIWIALTIYMSLRTIASTWRMGAARGPWTFLRN

SEQ ID NO: 3660 - protein, 140 aa, Zea mays subsp. mays
  peptide (1)..(140): Ceres Seq. ID no. 12376274
KTPLYATVVGDAANIILDPILMFVCHMGVTGAAIAHVVSQYMITLILLCRLVQRVHVIPPSIKSLKFGRFLGCGFLLLARVVAVTFCVTLAASLAARHGPTVMAGFQICCQLWLAHVSSRRWIGRGRTGGACKRVRQERQ

SEQ ID NO: 3661 - protein, 119 aa, Zea mays subsp. mays
  peptide (1)..(119): Ceres Seq. ID no. 12376275
MFVCHMGVTGAAIAHVVSQYMITLILLCRLVQRVHVIPPSIKSLKFGRFLGCGFLLLARVVAVTFCVTLAASLAARHGPTVMAGFQICCQLWLAHVSSRRWIGRGRTGGACKRVRQERQ

SEQ ID NO: 3662 - DNA, 1079 bp, Zea mays subsp. mays
  misc_feature (1)..(1079): Ceres Seq. ID no. 12402285
  misc_feature (1)..(1079): Ortholog of  Ceres SEQ ID NO 12781940 as cited in SEQ ID NO 56324
  misc_feature (1)..(1079): Ortholog of  Ceres SEQ ID NO 15174247 as cited in SEQ ID NO 61869
agctctcacccatccacgtcttctcattcctcgacaatggagatccaggcacgacagctactggtgtctgtttttggcattctgatagcgataggtttcgccaatgccgcgctgggagagacagcaccgccggttgttgtcggcttggccaagtgctcggactgcgccaggaggaacatgaacgccgaggcagctttcagaggtcttcaggtggccatcaagtgcaagaacagcaagggggcctacgagagcgcagccgtgggacaggtgaacaagtccggggccttcagcgtcccgctggccgccgacgccgtcggcgaggacggggagctcaagtcggaatgcttcgcgcagctcatccacagcgcgtcgagtgcgccgtgccccgggcaggagccctccaggatcgtcgccgcgccacccggccacacggcccacaccaacggcaacgggaagacgttcctcgcgctcggcggcagggtctaccaaccgtcgcccgaatgcgcctcggcgttcctctgccaccctttcttccacagcatgcaccaccatcacgtaggagtccacacgcctgtggttatcccgcacctgcccgttcacggccactccgtgccgcctgtcaccaagccgccgccggtagacgttcctgagcacaaaccggcgccggtgcccgtgccggaccacaagcctccgtcgacgccgccggtagacgctcctgagcacaaaccggcgccggtgcccgagccggagcacaagcctccgtcgacgccggcgaacgctgcaccgtcgacgcccacggagccgtcagcgccggttaattcgccgccgaagccagcccccatctaccacccaccggcaaggcacgacgctgccactggcccgtagctcttcaagaggctgctcccgttcttcaagaagttgcccttctttcctccttctgcgatggagagtcagcactagaatgtttggacagtgtttcttggcttttgcaggttatgcagtttcctcggaataatttgtgacgttgattagttcagcatgaacgttgggtcagtttaagagtgtgtgttctacttccg

SEQ ID NO: 3663 - protein, 294 aa, Zea mays subsp. mays
  peptide (1)..(294): Ceres Seq. ID no. 12402286
SSHPSTSSHSSTMEIQARQLLVSVFGILIAIGFANAALGETAPPVVVGLAKCSDCARRNMNAEAAFRGLQVAIKCKNSKGAYESAAVGQVNKSGAFSVPLAADAVGEDGELKSECFAQLIHSASSAPCPGQEPSRIVAAPPGHTAHTNGNGKTFLALGGRVYQPSPECASAFLCHPFFHSMHHHHVGVHTPVVIPHLPVHGHSVPPVTKPPPVDVPEHKPAPVPVPDHKPPSTPPVDAPEHKPAPVPEPEHKPPSTPANAAPSTPTEPSAPVNSPPKPAPIYHPPARHDAATGP

SEQ ID NO: 3664 - protein, 282 aa, Zea mays subsp. mays
  peptide (1)..(282): Ceres Seq. ID no. 12402287
MEIQARQLLVSVFGILIAIGFANAALGETAPPVVVGLAKCSDCARRNMNAEAAFRGLQVAIKCKNSKGAYESAAVGQVNKSGAFSVPLAADAVGEDGELKSECFAQLIHSASSAPCPGQEPSRIVAAPPGHTAHTNGNGKTFLALGGRVYQPSPECASAFLCHPFFHSMHHHHVGVHTPVVIPHLPVHGHSVPPVTKPPPVDVPEHKPAPVPVPDHKPPSTPPVDAPEHKPAPVPEPEHKPPSTPANAAPSTPTEPSAPVNSPPKPAPIYHPPARHDAATGP

SEQ ID NO: 3665 - protein, 235 aa, Zea mays subsp. mays
  peptide (1)..(235): Ceres Seq. ID no. 12402288
MNAEAAFRGLQVAIKCKNSKGAYESAAVGQVNKSGAFSVPLAADAVGEDGELKSECFAQLIHSASSAPCPGQEPSRIVAAPPGHTAHTNGNGKTFLALGGRVYQPSPECASAFLCHPFFHSMHHHHVGVHTPVVIPHLPVHGHSVPPVTKPPPVDVPEHKPAPVPVPDHKPPSTPPVDAPEHKPAPVPEPEHKPPSTPANAAPSTPTEPSAPVNSPPKPAPIYHPPARHDAATGP

SEQ ID NO: 3666 - DNA, 1297 bp, Zea mays subsp. mays
  misc_feature (1)..(1297): Ceres Seq. ID no. 12401906
  misc_feature (1)..(1297): Ortholog of  Ceres SEQ ID NO 13597033 as cited in SEQ ID NO 63479
gcacgagaccattacctagaacatcctaatcgaaaaactcgcatcgcagcgcactcgcgccacagtcggcatcacagaccagatccctgcgggtgcggcggccatggccgagaacttccagctgcagggccggcacggcaagtcccgcgtccgcgtctcccgcgtctggcgccgcccggccgcggcggggggcgacgtcatcgttgagtggaacgtcgccgtcagtatcgtctccgactgcctcccctcctacacctccagcgacaactccgccatcgtcgccacagattccatcaagaacaccgtgtatgtcaaggcgaaagagtgcacggaagtggttgtccatggaggaattcgccgtgattcttggaaggcatttcacctcgctgtaccctcaggttacagaggccacggtgactatcgtggagcgcccatgggagcgtgtgactgtcgacggaaagcctcattcgcatgggttcaaagttggtgttgagaagcacagcacagaggtcattgtaaaaaaatctggaagcctgcttataaattctggaattcaaggatactcgctgctaaagacaactcagtctgggtttgaagggttcgtgacggatcgctataggcttcttcctgatacaagggaaaggatagtagcaacagaagtaactgcttggtggaggtatccctttgaacatgtttcgcagctcccatcgaagccattctgcttcacgcagagataccaggacgtaaagaaagtccttgcagagacgttctttggtcctccggatgttggtgtgtatagtccatccgtacaaaatacgctatacctcatggccaaggaagtccttacaaggttcccagatatatcgtcagtccagcttagaatgccgaaccttcactttctgcctgtcaacttggggaccaaagaagctccgctggtgaagtttgctgatgatgtgtacctgccgacggacgaaccacacgggaccattgaagcaaccttgagccgtcccatgtcaaagctgtaaaaaaatttgtagtcgtcaggctgatattagactcctgcttcgtctccccagcattcccaggctaaaatggacagtaagctgtaagggaaagataaactatcataaatcgtagcccctatgctttacgtggtggtggtaataagtgcacaaacttgtattggatgttgtcagctgtagcctgtaggcgtccagcttgtgacgtttcgccactgtaatcgtgtacattgctcgtcttgtgtggaaaccagttaatatctttggaagctttgctc

SEQ ID NO: 3667 - protein, 238 aa, Zea mays subsp. mays
  peptide (1)..(238): Ceres Seq. ID no. 12401907
MSRRKSARKWLSMEEFAVILGRHFTSLYPQVTEATVTIVERPWERVTVDGKPHSHGFKVGVEKHSTEVIVKKSGSLLINSGIQGYSLLKTTQSGFEGFVTDRYRLLPDTRERIVATEVTAWWRYPFEHVSQLPSKPFCFTQRYQDVKKVLAETFFGPPDVGVYSPSVQNTLYLMAKEVLTRFPDISSVQLRMPNLHFLPVNLGTKEAPLVKFADDVYLPTDEPHGTIEATLSRPMSKL

SEQ ID NO: 3668 - protein, 226 aa, Zea mays subsp. mays
  peptide (1)..(226): Ceres Seq. ID no. 12401908
MEEFAVILGRHFTSLYPQVTEATVTIVERPWERVTVDGKPHSHGFKVGVEKHSTEVIVKKSGSLLINSGIQGYSLLKTTQSGFEGFVTDRYRLLPDTRERIVATEVTAWWRYPFEHVSQLPSKPFCFTQRYQDVKKVLAETFFGPPDVGVYSPSVQNTLYLMAKEVLTRFPDISSVQLRMPNLHFLPVNLGTKEAPLVKFADDVYLPTDEPHGTIEATLSRPMSKL

SEQ ID NO: 3669 - protein, 129 aa, Zea mays subsp. mays
  peptide (1)..(129): Ceres Seq. ID no. 12401909
MAENFQLQGRHGKSRVRVSRVWRRPAAAGGDVIVEWNVAVSIVSDCLPSYTSSDNSAIVATDSIKNTVYVKAKECTEVVVHGGIRRDSWKAFHLAVPSGYRGHGDYRGAPMGACDCRRKASFAWVQSWC

SEQ ID NO: 3670 - DNA, 943 bp, Zea mays subsp. mays
  misc_feature (1)..(943): Ceres Seq. ID no. 13498278
  misc_feature (1)..(943): Ortholog of  Ceres SEQ ID NO 15172729 as cited in SEQ ID NO 56037
  misc_feature (1)..(943): Ortholog of  Ceres SEQ ID NO 13584899 as cited in SEQ ID NO 64830
  misc_feature (1)..(943): Ortholog of  Ceres SEQ ID NO 13654441 as cited in SEQ ID NO 67814
  misc_feature (1)..(943): Ortholog of  Ceres SEQ ID NO 13596128 as cited in SEQ ID NO 67831
  misc_feature (1)..(943): Ortholog of  Ceres SEQ ID NO 12585194 as cited in SEQ ID NO 68878
  misc_feature (1)..(943): Ortholog of  Ceres SEQ ID NO 12589186 as cited in SEQ ID NO 0
gtgactgtgatctatactataaggtgaacaagatctctttgtctactgtagttgcagcaccagcagcagcagcagaagagcagcgcctgagctccagcaataatggccgagaagggcgtgaaggtgttggggatgtgggcgagccccatggtgatcagggtggagtgggcgctgcggctgaagggcgtcgagtacgagtacgtcgacgaggacctcgccaacaagagcgccgacctgctccgccacaacccggtgaccaagaaggtgcccgtgctcgtccacgacggcaagccggtcgcggagtccaccatcatcgtggagtacatcgacgaggtctggaagggcggctaccccatcatgccgggcgacccctacgagcgcgcccaggcgaggttctgggccaggttcgcggaagacaagtgcaacgctgctctgtacccgatcttcaccgcgaccggcgaggcgcagcgcaaggcggtgcacgaggcccagcagtgcctcaagaccctggagacggccttggaggggaagaagttcttcggcggcgacgccgtgggctacctcgacatcgtcgtcgggtggttcgcgcactggctccccgtcatcgaggaggtgaccggcgccagcgtcgtcacccacgaggagctgccgctgatgaaggcctggttcggtcggttcctcgcccttgacgtggtgaaggcggccctgcccgacagggacaggctcctcgccgccaacaaggcccgccgtgagcagctcctctccgcgtagatatggctagtaattctggagcagctagtttcaccgccgacgctcatatattgctgaataaggactggttgcacttttgcacgttgtgcagtgcagcccgaggtttggatgacctctgcccctctgttccatttcagaatggtagtcccataataatgcatatacatcatgc

SEQ ID NO: 3671 - protein, 228 aa, Zea mays subsp. mays
  peptide (1)..(228): Ceres Seq. ID no. 13498279
DCDLYYKVNKISLSTVVAAPAAAAEEQRLSSSNNGREGREGVGDVGEPHGDQGGVGAAAEGRRVRVRRRGPRQQERRPAPPQPGDQEGARARPRRQAGRGVHHHRGVHRRGLEGRLPHHAGRPLRARPGEVLGQVRGRQVQRCSVPDLHRDRRGAAQGGARGPAVPQDPGDGLGGEEVLRRRRRGLPRHRRRVVRALAPRHRGGDRRQRRHPRGAAADEGLVRSVPRP

SEQ ID NO: 3672 - protein, 222 aa, Zea mays subsp. mays
  peptide (1)..(222): Ceres Seq. ID no. 13498280
MAEKGVKVLGMWASPMVIRVEWALRLKGVEYEYVDEDLANKSADLLRHNPVTKKVPVLVHDGKPVAESTIIVEYIDEVWKGGYPIMPGDPYERAQARFWARFAEDKCNAALYPIFTATGEAQRKAVHEAQQCLKTLETALEGKKFFGGDAVGYLDIVVGWFAHWLPVIEEVTGASVVTHEELPLMKAWFGRFLALDVVKAALPDRDRLLAANKARREQLLSA

SEQ ID NO: 3673 - protein, 212 aa, Zea mays subsp. mays
  peptide (1)..(212): Ceres Seq. ID no. 13498281
MWASPMVIRVEWALRLKGVEYEYVDEDLANKSADLLRHNPVTKKVPVLVHDGKPVAESTIIVEYIDEVWKGGYPIMPGDPYERAQARFWARFAEDKCNAALYPIFTATGEAQRKAVHEAQQCLKTLETALEGKKFFGGDAVGYLDIVVGWFAHWLPVIEEVTGASVVTHEELPLMKAWFGRFLALDVVKAALPDRDRLLAANKARREQLLSA

SEQ ID NO: 3674 - DNA, 642 bp, Zea mays subsp. mays
  misc_feature (1)..(642): Ceres Seq. ID no. 12403812
  misc_feature (1)..(642): Ortholog of  Ceres SEQ ID NO 14301738 as cited in SEQ ID NO 61201
aacacctcatcagcctatcaccagcgacctaaaaagcacagcacctagtagctgaacagcaccatatacaatccgaatctctgaatattcagttgagccaaaaaggcaggaagaaggaggaaccatgatcagttccaagaggcttgttcagatggcgaagaagtggcaggcaacggctgccatggctaggaggcggctcacggcgacgctggcgaaagaggccgacggttcgtgcggcacgtcgatgccggtggccgtcaggggccactgcgtcgtgtactcctccgacgggacgaggttcgaggtcccgctggcgtacctcggcacggcggtgttcggcgagctcctgagcatgtcgcgggaggagttcggatttaccggcgacgatggcggcaggatcacgctgccctgcgatgccgcggtgatggagtacgcgatgtgtttgctcaggcgagacgcctccgaagaggttgtgagggcgttcttgagctccatggtcagaccctgccaccacagcgtcggtggctcggtgccaccgatgggactcgggcgccaaccagccatctgtgtatagctagctatatgattagctccatgatgtacaatattattaggtgtgtatgtatgtagccggatggaatc

SEQ ID NO: 3675 - protein, 149 aa, Zea mays subsp. mays
  peptide (1)..(149): Ceres Seq. ID no. 12403813
MISSKRLVQMAKKWQATAAMARRRLTATLAKEADGSCGTSMPVAVRGHCVVYSSDGTRFEVPLAYLGTAVFGELLSMSREEFGFTGDDGGRITLPCDAAVMEYAMCLLRRDASEEVVRAFLSSMVRPCHHSVGGSVPPMGLGRQPAICV

SEQ ID NO: 3676 - protein, 140 aa, Zea mays subsp. mays
  peptide (1)..(140): Ceres Seq. ID no. 12403814
MAKKWQATAAMARRRLTATLAKEADGSCGTSMPVAVRGHCVVYSSDGTRFEVPLAYLGTAVFGELLSMSREEFGFTGDDGGRITLPCDAAVMEYAMCLLRRDASEEVVRAFLSSMVRPCHHSVGGSVPPMGLGRQPAICV

SEQ ID NO: 3677 - protein, 130 aa, Zea mays subsp. mays
  peptide (1)..(130): Ceres Seq. ID no. 12403815
MARRRLTATLAKEADGSCGTSMPVAVRGHCVVYSSDGTRFEVPLAYLGTAVFGELLSMSREEFGFTGDDGGRITLPCDAAVMEYAMCLLRRDASEEVVRAFLSSMVRPCHHSVGGSVPPMGLGRQPAICV

SEQ ID NO: 3678 - DNA, 1057 bp, Zea mays subsp. mays
  misc_feature (1)..(1057): Ceres Seq. ID no. 12401795
  misc_feature (1)..(1057): Ortholog of  Ceres SEQ ID NO 15174082 as cited in SEQ ID NO 61896
  misc_feature (1)..(1057): Ortholog of  Ceres SEQ ID NO 13655598 as cited in SEQ ID NO 64077
  misc_feature (1)..(1057): Ortholog of  Ceres SEQ ID NO 15179351 as cited in SEQ ID NO 0
atatatgcgttataacagcagagcagaggtcaacaagacgagacaagagaatgcctgtgagcaggatcgccgtgggtgctccgggcgagctgtcccaccccgacaccgccaaggccgccgtcgccgagttcatctccacgctcatcttcgtcttcgccggctcaggatcggggatggccttcagtaagctcacggacggtggcgccgccactcctgccggcctcatcgccgcgtctctggcgcacgccctcgccctcttcgtggccgtctccgtgggtgccaacatctccggcggccacgtgaaccctgccgtgaccttcggcgcctttgtgggcggcaacatcagcctcctcaaggccctggtctactgggtggcccagctcctgggctccgtcgtcgcctgcctcctcctcaagatcgccacgggcggcgcggcccttggcgccttctcgctgtcggcgggcgtcggcgccatgaacgccgtggtgctggagatggtcatgaccttcggcctcgtgtacacggtgtacgccacggccgtggaccccaagaagggcgacctcggcgtcatcgcgcccatcgccatcggcttcatcgtcggcgccaacatcctggcggggggcgccttcgacggcgcctccatgaaccccgccgtctccttcggcccggccgtcgtcaccggcgtctgggagaaccactgggtgtactgggtcggcccactcgcgggcgcggccatcgcggcgctcgtctacgacatcatcttcatcgggcagcgcccacaccagcagctgccaaccacggcagcagactactgatgaccatcatcatcatgcactgaataattaagaccagaccactcaatatatatacatatgaagaataacatgccaaatctcatctcctagagctagcaacttgattctccatatatttcttaaatacaaactaaactcgattgagtatagcttggtatgaaaccacatgtgtgtgatgttattttgtccttgtggtaatttgtacatctctatctctaccatattaaagcatcaatttcgac

SEQ ID NO: 3679 - protein, 270 aa, Zea mays subsp. mays
  peptide (1)..(270): Ceres Seq. ID no. 12401796
ICVITAEQRSTRRDKRMPVSRIAVGAPGELSHPDTAKAAVAEFISTLIFVFAGSGSGMAFSKLTDGGAATPAGLIAASLAHALALFVAVSVGANISGGHVNPAVTFGAFVGGNISLLKALVYWVAQLLGSVVACLLLKIATGGAALGAFSLSAGVGAMNAVVLEMVMTFGLVYTVYATAVDPKKGDLGVIAPIAIGFIVGANILAGGAFDGASMNPAVSFGPAVVTGVWENHWVYWVGPLAGAAIAALVYDIIFIGQRPHQQLPTTAADY

SEQ ID NO: 3680 - protein, 254 aa, Zea mays subsp. mays
  peptide (1)..(254): Ceres Seq. ID no. 12401797
MPVSRIAVGAPGELSHPDTAKAAVAEFISTLIFVFAGSGSGMAFSKLTDGGAATPAGLIAASLAHALALFVAVSVGANISGGHVNPAVTFGAFVGGNISLLKALVYWVAQLLGSVVACLLLKIATGGAALGAFSLSAGVGAMNAVVLEMVMTFGLVYTVYATAVDPKKGDLGVIAPIAIGFIVGANILAGGAFDGASMNPAVSFGPAVVTGVWENHWVYWVGPLAGAAIAALVYDIIFIGQRPHQQLPTTAADY

SEQ ID NO: 3681 - protein, 213 aa, Zea mays subsp. mays
  peptide (1)..(213): Ceres Seq. ID no. 12401798
MAFSKLTDGGAATPAGLIAASLAHALALFVAVSVGANISGGHVNPAVTFGAFVGGNISLLKALVYWVAQLLGSVVACLLLKIATGGAALGAFSLSAGVGAMNAVVLEMVMTFGLVYTVYATAVDPKKGDLGVIAPIAIGFIVGANILAGGAFDGASMNPAVSFGPAVVTGVWENHWVYWVGPLAGAAIAALVYDIIFIGQRPHQQLPTTAADY

SEQ ID NO: 3682 - DNA, 1041 bp, Zea mays subsp. mays
  misc_feature (1)..(1041): Ceres Seq. ID no. 12402831
  misc_feature (1)..(1041): Ortholog of  Ceres SEQ ID NO 15170578 as cited in SEQ ID NO 52951
aattcctatcgatacttccacacggcacaactatcggcggcggcaacgagccaggaccctgttgtgatgctaccgtcgccgccggtgctactacgcccttgcgctgcccgggcctccccgcttccgccccctagacctagagctgcaaatcctaacaccgagtcggcgacgacgacaaccgtcgccacttcagcggacagagcggccaccatgggcgcggcagcgtggtggcggcgcgccctggggcagcggttcaacccagccggtgtggccgcggtggcggccgtcgcggcgtccaagccgcgcctggcgctgccgcacgtgtcggtgcaagacatcaggtgtctcgactgggctgagctccgccgcgccgggttccgcggcgtcgttttcgacaaggacaacacgctcacggccccctacgcgcncgcgctctggccgccgctcgctgcagcattcgaccagtgccgcgcgacgttcccgcccggtgcgctcgccatctacagcaactccgcagggttgacggagtatgatccggacggggtggatgcgagggcgatcgaagcggtcatcgagggggttcatgtgatcaggcatgatataaagaaaccaggtggactagctactgaaatagagagttactttggttgttcagcctcaaatcttgtgttggttggtgaccgttacttcactgatgtggtttatggaaacaagaatggctttcttacagtactgacagagcctttaaacatcactgatgaatcatacattgtcaaaagggttaggaaactggaggcgtacatcatcagttattggtacaagaaagggcacaaaccaatagagcatcctttgctcccagatgcaagaagaatagtgaagtttgactcatatgacgactcagtttcaaccagaatataatgtaatgatgtatcttgcacctgctcatcagagagtgagatctactgtttgtagcttagggtgtgtttgtttccttctaaattatataaactggattatggtggaatggtaagaccgtaagag

SEQ ID NO: 3683 - protein, 305 aa, Zea mays subsp. mays
  peptide (1)..(305): Ceres Seq. ID no. 12402832
  misc_feature (143)..(143): Xaa is any aa, unknown or other
NSYRYFHTAQLSAAATSQDPVVMLPSPPVLLRPCAARASPLPPPRPRAANPNTESATTTTVATSADRAATMGAAAWWRRALGQRFNPAGVAAVAAVAASKPRLALPHVSVQDIRCLDWAELRRAGFRGVVFDKDNTLTAPYAXALWPPLAAAFDQCRATFPPGALAIYSNSAGLTEYDPDGVDARAIEAVIEGVHVIRHDIKKPGGLATEIESYFGCSASNLVLVGDRYFTDVVYGNKNGFLTVLTEPLNITDESYIVKRVRKLEAYIISYWYKKGHKPIEHPLLPDARRIVKFDSYDDSVSTRI

SEQ ID NO: 3684 - protein, 283 aa, Zea mays subsp. mays
  peptide (1)..(283): Ceres Seq. ID no. 12402833
  misc_feature (121)..(121): Xaa is any aa, unknown or other
MLPSPPVLLRPCAARASPLPPPRPRAANPNTESATTTTVATSADRAATMGAAAWWRRALGQRFNPAGVAAVAAVAASKPRLALPHVSVQDIRCLDWAELRRAGFRGVVFDKDNTLTAPYAXALWPPLAAAFDQCRATFPPGALAIYSNSAGLTEYDPDGVDARAIEAVIEGVHVIRHDIKKPGGLATEIESYFGCSASNLVLVGDRYFTDVVYGNKNGFLTVLTEPLNITDESYIVKRVRKLEAYIISYWYKKGHKPIEHPLLPDARRIVKFDSYDDSVSTRI

SEQ ID NO: 3685 - protein, 235 aa, Zea mays subsp. mays
  peptide (1)..(235): Ceres Seq. ID no. 12402834
  misc_feature (73)..(73): Xaa is any aa, unknown or other
MGAAAWWRRALGQRFNPAGVAAVAAVAASKPRLALPHVSVQDIRCLDWAELRRAGFRGVVFDKDNTLTAPYAXALWPPLAAAFDQCRATFPPGALAIYSNSAGLTEYDPDGVDARAIEAVIEGVHVIRHDIKKPGGLATEIESYFGCSASNLVLVGDRYFTDVVYGNKNGFLTVLTEPLNITDESYIVKRVRKLEAYIISYWYKKGHKPIEHPLLPDARRIVKFDSYDDSVSTRI

SEQ ID NO: 3686 - DNA, 909 bp, Zea mays subsp. mays
  misc_feature (1)..(909): Ceres Seq. ID no. 12356120
  misc_feature (1)..(909): Ortholog of  Ceres SEQ ID NO 12609656 as cited in SEQ ID NO 51891
  misc_feature (1)..(909): Ortholog of  Ceres SEQ ID NO 13664337 as cited in SEQ ID NO 61267
  misc_feature (1)..(909): Ortholog of  Ceres SEQ ID NO 15224278 as cited in SEQ ID NO 63590
  misc_feature (1)..(909): Ortholog of  Ceres SEQ ID NO 12635152 as cited in SEQ ID NO 0
accaaagcaaaccgaagccgcactctaccgcgctcctcccgaaccacagctatgctcgcccaccgcctcctcctcctcctcgccgtcgccgcggcgagcggcaccgccttcgctaagccgacggcgtacgaagccctcgctgactacgacttcccgccggggatcctccccaagggcgtggtcgcctacacgctcgacaacgccacgggcgccttcacggccacgctcgacgcctccgcgtccggcagcgggtcctccgtctgcgagttctccatccagggctcctactcgctccgctaccagaccaagatcaccggaaagatcgcccccgaccacctcaccgacctcgagggcgtctccgtcaaggtcctcttcttctggctcaacatcgtcgaggtcacccggcgcggcgacaacctcgagttctccgtcggcatcgtctccgcggacttcgggattgaaaacttcctcgagtgccccacctgtggctgcgggttcgactgcaacaacctgctcatgctgcagaagcccggcgccgccaccgccaagctgcgcctgcggggtgccttctagaactccacttctgcagatttggtgactgctgctgtaagctgcctcgactagtagtgctgtatgtctagtagatgtgggttaataaagagggcaaacttgaaagatcccagcttttagatgtgggatggggtaaccaagttcaggactcgatgtcatgtttcaccaattgtttcagacagttctaggaacagtcagagaagcaattaagacctttcaaatattttaatttatacgtctctatggaaattgtcttatttccattgagatgtttgcccctcatgtgaattagtttgtgaagtggtgatagttgaatcccatggatatggatggttgcct

SEQ ID NO: 3687 - protein, 198 aa, Zea mays subsp. mays
  peptide (1)..(198): Ceres Seq. ID no. 12356121
PKQTEAALYRAPPEPQLCSPTASSSSSPSPRRAAPPSLSRRRTKPSLTTTSRRGSSPRAWSPTRSTTPRAPSRPRSTPPRPAAGPPSASSPSRAPTRSATRPRSPERSPPTTSPTSRASPSRSSSSGSTSSRSPGAATTSSSPSASSPRTSGLKTSSSAPPVAAGSTATTCSCCRSPAPPPPSCACGVPSRTPLLQIW

SEQ ID NO: 3688 - protein, 190 aa, Zea mays subsp. mays
  peptide (1)..(190): Ceres Seq. ID no. 12356122
TKANRSRTLPRSSRTTAMLAHRLLLLLAVAAASGTAFAKPTAYEALADYDFPPGILPKGVVAYTLDNATGAFTATLDASASGSGSSVCEFSIQGSYSLRYQTKITGKIAPDHLTDLEGVSVKVLFFWLNIVEVTRRGDNLEFSVGIVSADFGIENFLECPTCGCGFDCNNLLMLQKPGAATAKLRLRGAF

SEQ ID NO: 3689 - protein, 173 aa, Zea mays subsp. mays
  peptide (1)..(173): Ceres Seq. ID no. 12356123
MLAHRLLLLLAVAAASGTAFAKPTAYEALADYDFPPGILPKGVVAYTLDNATGAFTATLDASASGSGSSVCEFSIQGSYSLRYQTKITGKIAPDHLTDLEGVSVKVLFFWLNIVEVTRRGDNLEFSVGIVSADFGIENFLECPTCGCGFDCNNLLMLQKPGAATAKLRLRGAF

SEQ ID NO: 3690 - DNA, 998 bp, Zea mays subsp. mays
  misc_feature (1)..(998): Ceres Seq. ID no. 13494376
  misc_feature (1)..(998): Ortholog of  Ceres SEQ ID NO 14306110 as cited in SEQ ID NO 1363
  misc_feature (1)..(998): Ortholog of  Ceres SEQ ID NO 12609333 as cited in SEQ ID NO 51833
  misc_feature (1)..(998): Ortholog of  Ceres SEQ ID NO 12584903 as cited in SEQ ID NO 62712
ataaaggggcattggcttgggatcacctctgcatcttacctgggatctgctagcttgatctctcctagtcctagcccattcgcttctcctgttcgtcgctcttaatttgcttgctcgatccctggcagtggcagctgctgcaatggcttccggtggcgcgtcgtcactggccttggccttggccgcgctgctcctcgtgagctgcgcctcggcggcggtggcgaccaagtacaccgtcggggacgcgtccggctggacgaccaccggcgactacgccacctgggccagcggcaagaagttcaaagtcggcgacagtctcgagttcaaatacgccggcggggcgcacacggtggacgaggtgagcgcggcggactacgccgcctgctcctccagcaacgcgctcagcaccgacagcgccggcgccacgaccgtgaccctcaagacggccggcaagcactacttcatctgcggcgtggcgggccattgcagcagcggcatgaagctcgtggtggacgtggccaaggcggtgaccgccccggngccggccccagccgcggccccggccccggccgcggacaccgcnccagacgcccccgacaccacgccgtcgaccccgacgtccccctcgagctccggcggccgcacgcccaagagcccagacacgacggtcctctcgccgccggacaagaagtccacctcctctggcgccaccgggctcagcgccgcagtgtgggccggcttgggccttgccgggctcgtggccgtgcacctcggcgcgttctaggccagcccgctggcctggccagggaggagacagtgccgtgtgttgttgttaggctgcacgtcatgaattggattggtgtattggttgagggacttgactgcttaccagagagagatctctttttggttcagggaacttattgacgatgctttggctgtgctgtagacatgtagttggataccttggatgttatgctatcagttttgctgttgct

SEQ ID NO: 3691 - protein, 213 aa, Zea mays subsp. mays
  peptide (1)..(213): Ceres Seq. ID no. 13494377
  misc_feature (133)..(133): Xaa is any aa, unknown or other
  misc_feature (147)..(147): Xaa is any aa, unknown or other
MASGGASSLALALAALLLVSCASAAVATKYTVGDASGWTTTGDYATWASGKKFKVGDSLEFKYAGGAHTVDEVSAADYAACSSSNALSTDSAGATTVTLKTAGKHYFICGVAGHCSSGMKLVVDVAKAVTAPXPAPAAAPAPAADTXPDAPDTTPSTPTSPSSSGGRTPKSPDTTVLSPPDKKSTSSGATGLSAAVWAGLGLAGLVAVHLGAF

SEQ ID NO: 3692 - DNA, 1272 bp, Zea mays subsp. mays
  misc_feature (1)..(1272): Ceres Seq. ID no. 12402634
  misc_feature (1)..(1272): Ortholog of  Ceres SEQ ID NO 12612361 as cited in SEQ ID NO 51594
actccaatctccacagtccacaccctccgggcgccggcctccactcctccattcttgtcccggaaccatgtcgatgcttctctcgcgaaggttctcctgcgccctcgcccgcgccccgtcgctcgtacggggccggccccttcctccctgcgccgcccgcaccacccctccggctcccagctctccgccccgccgcctcatgtcgtcctcctctgccgggtggcagcactcctcgcaccgtcccccgccgccgccgccgcctcctcctcatcccggtgctgacaaggaccagctgttcagggggctggaggcggcgctgggcaccgcgttcagctccgagccgctggcgccgccaccgcagcctatgatcctcgtcatcagcgggcccagcggtgtcggcaaggacgccgtcatcaagaggctgcaggaggagagggaagggatccatttcgttgtcaccgcgacaagcagggcgatgaggccaggtgaagttgaagggaaagactattactttgtcagtaaggaggaatttctgacgatgattgagagggaggagttgctcgagtatgctcttgtttatggggagtacaaggggatccccaaacagcagattcgtgactacatggctaaaggctgtgacattgttctgagagtggacattcaaggagcagcgacgttaagacagatacttggtgaatctgcggttttcatatttttagttgctgagagtgaagaggcacttgttaaaaggctaatccaccgtaaaacagaaacatcagatatgcttcttgtcagagttgcaacagccagggaggaggtgaaacacatgaagaatttcgactatgtggttgtaaacgctcaagggaaacttgaggaggctgttaaacaagtggaatctatcattgatgctgagaagtctaaaattcacaagcggcatgtcaatatctaagctaaggatcatgtgatttatgcctagtgtcttcatctctataaaggaaaattatctgtccaagtctactgaagcgtgatgaaatgactcaggtttcagtagccagaaagttcaatggattgctgagttacaagaatatggcatgttctgtttaagaaatttccctcaccacaaccggggcagcacaatctctgggatatatacacgactctcttgttatttgtctctttttttccctttgattttttagctctgcctggaggaatctggaaggctgtaccaaactagttctgggtgaatcttaagtgatgttctatccttcg

SEQ ID NO: 3693 - protein, 315 aa, Zea mays subsp. mays
  peptide (1)..(315): Ceres Seq. ID no. 12402635
LQSPQSTPSGRRPPLLHSCPGTMSMLLSRRFSCALARAPSLVRGRPLPPCAARTTPPAPSSPPRRLMSSSSAGWQHSSHRPPPPPPPPPHPGADKDQLFRGLEAALGTAFSSEPLAPPPQPMILVISGPSGVGKDAVIKRLQEEREGIHFVVTATSRAMRPGEVEGKDYYFVSKEEFLTMIEREELLEYALVYGEYKGIPKQQIRDYMAKGCDIVLRVDIQGAATLRQILGESAVFIFLVAESEEALVKRLIHRKTETSDMLLVRVATAREEVKHMKNFDYVVVNAQGKLEEAVKQVESIIDAEKSKIHKRHVNI

SEQ ID NO: 3694 - protein, 293 aa, Zea mays subsp. mays
  peptide (1)..(293): Ceres Seq. ID no. 12402636
MSMLLSRRFSCALARAPSLVRGRPLPPCAARTTPPAPSSPPRRLMSSSSAGWQHSSHRPPPPPPPPPHPGADKDQLFRGLEAALGTAFSSEPLAPPPQPMILVISGPSGVGKDAVIKRLQEEREGIHFVVTATSRAMRPGEVEGKDYYFVSKEEFLTMIEREELLEYALVYGEYKGIPKQQIRDYMAKGCDIVLRVDIQGAATLRQILGESAVFIFLVAESEEALVKRLIHRKTETSDMLLVRVATAREEVKHMKNFDYVVVNAQGKLEEAVKQVESIIDAEKSKIHKRHVNI

SEQ ID NO: 3695 - protein, 291 aa, Zea mays subsp. mays
  peptide (1)..(291): Ceres Seq. ID no. 12402637
MLLSRRFSCALARAPSLVRGRPLPPCAARTTPPAPSSPPRRLMSSSSAGWQHSSHRPPPPPPPPPHPGADKDQLFRGLEAALGTAFSSEPLAPPPQPMILVISGPSGVGKDAVIKRLQEEREGIHFVVTATSRAMRPGEVEGKDYYFVSKEEFLTMIEREELLEYALVYGEYKGIPKQQIRDYMAKGCDIVLRVDIQGAATLRQILGESAVFIFLVAESEEALVKRLIHRKTETSDMLLVRVATAREEVKHMKNFDYVVVNAQGKLEEAVKQVESIIDAEKSKIHKRHVNI

SEQ ID NO: 3696 - DNA, 1168 bp, Zea mays subsp. mays
  misc_feature (1)..(1168): Ceres Seq. ID no. 12356054
  misc_feature (1)..(1168): Ortholog of  Ceres SEQ ID NO 13598570 as cited in SEQ ID NO 65434
  misc_feature (1)..(1168): Ortholog of  Ceres SEQ ID NO 13596238 as cited in SEQ ID NO 68834
  misc_feature (1)..(1168): Ortholog of  Ceres SEQ ID NO 15174329 as cited in SEQ ID NO 0
agcactcagaccaccaccagcagttctgagctagctatggcgatgatgatgagagcattggcagcagcggccatcctggccacggcgtttgccgtgtcggcacgagccgagcccccgcagtgcggcgccaactccaccacggcgctctgcccctactgcctgtgctgcagcaaatggggcttctgcggcagcaccgaagcctactgcggcaacggctgccagagccagtgcgaccgctgcaacgccaccgtcgcgtccatcgtcacgcgggagctcttcgacgagctgctgctgcaccgcaacgacctcaggtgccccgcccagggcttctacacctacgactcgttcatcgccgcggcgggcgccgacgcttccgacggcttcggcaccacgggcgccgtcgacatccggaagcgcgaggtcgccgcgttcctggcggagccggcgcaccggacctcgggcggctgggacggcgcgcccaacggcacctacgcctggggcttctgctacaagccggccggcgcccagaacgtcacggaccccgtcgccttcttcgagacggccatcgcgagctggatgacggcgtcggcgcgcccgcccaagccgtcgtgccacgacgtcgtcaccgagcagtggaccccctcggacgccgacaaggccgcggggaggctgcggggcttcggcgtcatcgccaacatcatcaacggcgacgccgagtgcggccgcggccccgacgccggtggccaggaccggatcggcttctacaagcgcttctgcgacatccttggcgtcagctacggcgacaacttggactgcttcgaccagaagcccttcggcgctgcccaccgccgccgccttagctgaaactaccagcggcccgcgtcacgctgacgcgtaaaagaataatgcatgcatgggcaccgcacagggcacaaatcaataacagctctcttttaaataatctgcatgcttattcgcttgcataagcatgcacacgtagtagatcgtgcatgtgtagggcgagcatgtttactttcatcccgggcggccggggttgtgtcgtcgtgcgagttgccgtgaagatgtactatgcctcatgcatgttttctatgccatatattatataaataaatgcataaaaaaactgagctgcaacgatggcagcgcc

SEQ ID NO: 3697 - protein, 287 aa, Zea mays subsp. mays
  peptide (1)..(287): Ceres Seq. ID no. 12356055
STQTTTSSSELAMAMMMRALAAAAILATAFAVSARAEPPQCGANSTTALCPYCLCCSKWGFCGSTEAYCGNGCQSQCDRCNATVASIVTRELFDELLLHRNDLRCPAQGFYTYDSFIAAAGADASDGFGTTGAVDIRKREVAAFLAEPAHRTSGGWDGAPNGTYAWGFCYKPAGAQNVTDPVAFFETAIASWMTASARPPKPSCHDVVTEQWTPSDADKAAGRLRGFGVIANIINGDAECGRGPDAGGQDRIGFYKRFCDILGVSYGDNLDCFDQKPFGAAHRRRLS

SEQ ID NO: 3698 - protein, 275 aa, Zea mays subsp. mays
  peptide (1)..(275): Ceres Seq. ID no. 12356056
MAMMMRALAAAAILATAFAVSARAEPPQCGANSTTALCPYCLCCSKWGFCGSTEAYCGNGCQSQCDRCNATVASIVTRELFDELLLHRNDLRCPAQGFYTYDSFIAAAGADASDGFGTTGAVDIRKREVAAFLAEPAHRTSGGWDGAPNGTYAWGFCYKPAGAQNVTDPVAFFETAIASWMTASARPPKPSCHDVVTEQWTPSDADKAAGRLRGFGVIANIINGDAECGRGPDAGGQDRIGFYKRFCDILGVSYGDNLDCFDQKPFGAAHRRRLS

SEQ ID NO: 3699 - protein, 273 aa, Zea mays subsp. mays
  peptide (1)..(273): Ceres Seq. ID no. 12356057
MMMRALAAAAILATAFAVSARAEPPQCGANSTTALCPYCLCCSKWGFCGSTEAYCGNGCQSQCDRCNATVASIVTRELFDELLLHRNDLRCPAQGFYTYDSFIAAAGADASDGFGTTGAVDIRKREVAAFLAEPAHRTSGGWDGAPNGTYAWGFCYKPAGAQNVTDPVAFFETAIASWMTASARPPKPSCHDVVTEQWTPSDADKAAGRLRGFGVIANIINGDAECGRGPDAGGQDRIGFYKRFCDILGVSYGDNLDCFDQKPFGAAHRRRLS

SEQ ID NO: 3700 - DNA, 1071 bp, Zea mays subsp. mays
  misc_feature (1)..(1071): Ceres Seq. ID no. 13624136
  misc_feature (1)..(1071): Ortholog of  Ceres SEQ ID NO 15173516 as cited in SEQ ID NO 61801
agtcaactaccaattttctcgctcagacatacagaattacagagtcgaagtgcgctgtggcctgtggactctcccctccccaactccggcgaagggagcagaaacgttggcgtgttggttgggtggcgtcggcatggacgaggcaacgaagaagaatgtggaggctacggtgctggagatcctccggggctccgatatggagtccgtgacggagtacaaggtccgcgccgctgccagcgaccgcctcggcatcgacctctccatacccgaccgcaagctcttcgtccgcggcgtcgttgaggaatacctactttcactctcctccaaggaggaggcgaaggcggaggaggagggcgtcactggcagggagagcaagggcaaggaacacgaagaggaggacgaagaggatgacgatgaggaggaggatgaaggtaagggtggcgggaagagagagtacgatgaccaaggtgaccttatcctgtgccgcctttcgagcaagaggagggtgactttatcggagtttaagggcaggtcgttggtgtccatccgcgagttctacgtgaaggacggcaaggagatgccctccgccaaaggtatcagtatgactttggagcagtgggaagcattttgcaatgctgtacctgcaatagaggatgccatcaaaaagcttgaagattcagactgaactggttttaagagcctcttcttatgcccgtgtcaaatgaaaaagcctgggaagcatttcgcaatgctgtatctgcaatagatgatgcatgaaaaagcttgaagattcagacagaactggtttaggagcctcttattttgcctgtatcaaataaaaaagcctatttctgacccttaacgagggccatatatgtgtcttgcaagagctaagttctgtaaaagatttctacatgtaccatgtgtaggagttaggatagagtgatagacgtactgctgcatacagttcggaatatttgctagtaacaagtaatctaccattaggtggcctggagttcacatgctatgctatggatgatcggggatgtgtcctagcaatagcaagctcag

SEQ ID NO: 3701 - protein, 227 aa, Zea mays subsp. mays
  peptide (1)..(227): Ceres Seq. ID no. 13624137
VNYQFSRSDIQNYRVEVRCGLWTLPSPTPAKGAETLACWLGGVGMDEATKKNVEATVLEILRGSDMESVTEYKVRAAASDRLGIDLSIPDRKLFVRGVVEEYLLSLSSKEEAKAEEEGVTGRESKGKEHEEEDEEDDDEEEDEGKGGGKREYDDQGDLILCRLSSKRRVTLSEFKGRSLVSIREFYVKDGKEMPSAKGISMTLEQWEAFCNAVPAIEDAIKKLEDSD

SEQ ID NO: 3702 - protein, 183 aa, Zea mays subsp. mays
  peptide (1)..(183): Ceres Seq. ID no. 13624138
MDEATKKNVEATVLEILRGSDMESVTEYKVRAAASDRLGIDLSIPDRKLFVRGVVEEYLLSLSSKEEAKAEEEGVTGRESKGKEHEEEDEEDDDEEEDEGKGGGKREYDDQGDLILCRLSSKRRVTLSEFKGRSLVSIREFYVKDGKEMPSAKGISMTLEQWEAFCNAVPAIEDAIKKLEDSD

SEQ ID NO: 3703 - protein, 162 aa, Zea mays subsp. mays
  peptide (1)..(162): Ceres Seq. ID no. 13624139
MESVTEYKVRAAASDRLGIDLSIPDRKLFVRGVVEEYLLSLSSKEEAKAEEEGVTGRESKGKEHEEEDEEDDDEEEDEGKGGGKREYDDQGDLILCRLSSKRRVTLSEFKGRSLVSIREFYVKDGKEMPSAKGISMTLEQWEAFCNAVPAIEDAIKKLEDSD

SEQ ID NO: 3704 - DNA, 1125 bp, Zea mays subsp. mays
  misc_feature (1)..(1125): Ceres Seq. ID no. 12353686
  misc_feature (1)..(1125): Ortholog of  Ceres SEQ ID NO 12557497 as cited in SEQ ID NO 43
  misc_feature (1)..(1125): Ortholog of  Ceres SEQ ID NO 15177850 as cited in SEQ ID NO 51765
  misc_feature (1)..(1125): Ortholog of  Ceres SEQ ID NO 14303417 as cited in SEQ ID NO 54923
  misc_feature (1)..(1125): Ortholog of  Ceres SEQ ID NO 15169084 as cited in SEQ ID NO 59115
  misc_feature (1)..(1125): Ortholog of  Ceres SEQ ID NO 12635513 as cited in SEQ ID NO 0
  misc_feature (1)..(1125): Ortholog of  Ceres SEQ ID NO 12635723 as cited in SEQ ID NO 0
actcagacgccacctgttcttccttcctctcctctctgcaacgcgtcgggaagcagctgccagccatggcaatggcgtcgtcgtcgagcgggctgaggagctgcagcgcattgggcgtgcccagcctgctggcgccgtcgacgtcgtcgtcgtcccggtccggccgcctgccgttctgcgcccacgccaccacctccggccgcgtcaccatgtccgcggagtggatgcccgggcagccccgccccgcccacctcgacggctcctcgccaggtgacttcggcttcgaccccctgggcctggccacggtgccggagaacttcgagcggttcaaggagtcggaggtgtaccactgccggtgggccatgctggccgtgccgggggtgctggtgccggaggcgctggggctgggcaactgggtgaaggcgcaggagtgggcggccgtccccggcgggcaggccacgtacctgggcgccccggtgccgtggggcacgctgccgaccatcctggcggtcgagttcgtggccatcgccttcgccgagcaccagcgcaccatggagaaggaccccgagaagaagaagtaccccggcggcgccttcgacccgctcggcttctccagggaccccgccaagctcgaggagtacaagctcaaggagatcaagaacggccgcctcgccatgctggccttcgtcggcttctgcgtccagcagtcggcgtacccgggcaccggtccgctcgagaaccttgccgcccacctcgccgacccctggcacaacaacatcggagacatcatcatccctagatcgatctccccttgacaattatattggttgattattacgactaggcactaggcactgcctgcctgcgtgcaggagcagtacaacgacgacgacggcgagtcggcgacttccctcccgcccggaaagctctcgtaatctaaaggaaaaggaaattggtaccatgttgtgcacttctagcatgcatgacagcaatcgcaagcttcttcctcagccactaacctctatgtacattttcagcgcaagatcattgtcgacagtagtatacataaaagtgtacacaatatactgaacaaacaaccaagacacaagtgaatgtaatttggcg

SEQ ID NO: 3705 - protein, 270 aa, Zea mays subsp. mays
  peptide (1)..(270): Ceres Seq. ID no. 12353687
SDATCSSFLSSLQRVGKQLPAMAMASSSSGLRSCSALGVPSLLAPSTSSSSRSGRLPFCAHATTSGRVTMSAEWMPGQPRPAHLDGSSPGDFGFDPLGLATVPENFERFKESEVYHCRWAMLAVPGVLVPEALGLGNWVKAQEWAAVPGGQATYLGAPVPWGTLPTILAVEFVAIAFAEHQRTMEKDPEKKKYPGGAFDPLGFSRDPAKLEEYKLKEIKNGRLAMLAFVGFCVQQSAYPGTGPLENLAAHLADPWHNNIGDIIIPRSISP

SEQ ID NO: 3706 - protein, 249 aa, Zea mays subsp. mays
  peptide (1)..(249): Ceres Seq. ID no. 12353688
MAMASSSSGLRSCSALGVPSLLAPSTSSSSRSGRLPFCAHATTSGRVTMSAEWMPGQPRPAHLDGSSPGDFGFDPLGLATVPENFERFKESEVYHCRWAMLAVPGVLVPEALGLGNWVKAQEWAAVPGGQATYLGAPVPWGTLPTILAVEFVAIAFAEHQRTMEKDPEKKKYPGGAFDPLGFSRDPAKLEEYKLKEIKNGRLAMLAFVGFCVQQSAYPGTGPLENLAAHLADPWHNNIGDIIIPRSISP

SEQ ID NO: 3707 - protein, 247 aa, Zea mays subsp. mays
  peptide (1)..(247): Ceres Seq. ID no. 12353689
MASSSSGLRSCSALGVPSLLAPSTSSSSRSGRLPFCAHATTSGRVTMSAEWMPGQPRPAHLDGSSPGDFGFDPLGLATVPENFERFKESEVYHCRWAMLAVPGVLVPEALGLGNWVKAQEWAAVPGGQATYLGAPVPWGTLPTILAVEFVAIAFAEHQRTMEKDPEKKKYPGGAFDPLGFSRDPAKLEEYKLKEIKNGRLAMLAFVGFCVQQSAYPGTGPLENLAAHLADPWHNNIGDIIIPRSISP

SEQ ID NO: 3708 - DNA, 997 bp, Zea mays subsp. mays
  misc_feature (1)..(997): Ceres Seq. ID no. 12403223
  misc_feature (1)..(997): Ortholog of  Ceres SEQ ID NO 13638917 as cited in SEQ ID NO 56018
  misc_feature (1)..(997): Ortholog of  Ceres SEQ ID NO 13663116 as cited in SEQ ID NO 60731
  misc_feature (1)..(997): Ortholog of  Ceres SEQ ID NO 14316029 as cited in SEQ ID NO 67234
  misc_feature (1)..(997): Ortholog of  Ceres SEQ ID NO 15175556 as cited in SEQ ID NO 0
aaaaatagaaagaaaaaggaaaaaaagaaaaaccagacagccgccctaacggccaaacctccttggacacgactcgccgcacccatcccaatccgccgccgctgccatggccgacgagattgacacgaggccggctcccgcgggctcccgcggccgtcctgcgcacgctaccgaggacgacgacagggaggagggcgagatcgccaccgacgccccctcgcccgccctccccgccgcgcacccgctcgagcactcgtggaccttctggttcgacaacccgcacggcaagaacaagatggccgcctgggggagctccatacgacccatccacaccttctccaccgtagaggacttctggggcctctacaataatatccatcaccctagcaagttgatcggcggagctgacttccattgcttcaagaacaagattgagccaaaatgggaagatcctatttgtgctaatggcggtaaatggaccatcagctgtggaagaggaaaatctgacacgctttggctgcacaccctgttggctatgatcggcgaacaattcgactatggtgatgaaatttgtggagcagtggtcagcgtgcgtagcaagcaggaaagaatagctatctggacaaaaaatgctgctaatgaagctgctcagataagcatcgggaagcagtggaaggaatttctggattacaaggactccattggattcattgttcatgacgatgcaaagaagatggacaagggactgaagaaccgttacacggtttgatcccagagagtagtagcatgtagggtggttctttccgattctgtagcaccttgcagagtgtgttgaaggttctctatttgctgaggagttgcttaagcataatctaacatgatgtcgaatgtattcctgtatgttccataggtcagtcacctaggtgttgtttttgtctcagctttgtgtatttggagccctggtttctaataactaaataactagataaggcatgtc

SEQ ID NO: 3709 - protein, 220 aa, Zea mays subsp. mays
  peptide (1)..(220): Ceres Seq. ID no. 12403224
MADEIDTRPAPAGSRGRPAHATEDDDREEGEIATDAPSPALPAAHPLEHSWTFWFDNPHGKNKMAAWGSSIRPIHTFSTVEDFWGLYNNIHHPSKLIGGADFHCFKNKIEPKWEDPICANGGKWTISCGRGKSDTLWLHTLLAMIGEQFDYGDEICGAVVSVRSKQERIAIWTKNAANEAAQISIGKQWKEFLDYKDSIGFIVHDDAKKMDKGLKNRYTV

SEQ ID NO: 3710 - protein, 157 aa, Zea mays subsp. mays
  peptide (1)..(157): Ceres Seq. ID no. 12403225
MAAWGSSIRPIHTFSTVEDFWGLYNNIHHPSKLIGGADFHCFKNKIEPKWEDPICANGGKWTISCGRGKSDTLWLHTLLAMIGEQFDYGDEICGAVVSVRSKQERIAIWTKNAANEAAQISIGKQWKEFLDYKDSIGFIVHDDAKKMDKGLKNRYTV

SEQ ID NO: 3711 - DNA, 1047 bp, Zea mays subsp. mays
  misc_feature (1)..(1047): Ceres Seq. ID no. 12633518
  misc_feature (1)..(1047): Ortholog of  Ceres SEQ ID NO 13595704 as cited in SEQ ID NO 51001
  misc_feature (1)..(1047): Ortholog of  Ceres SEQ ID NO 13638279 as cited in SEQ ID NO 57674
  misc_feature (1)..(1047): Ortholog of  Ceres SEQ ID NO 15177534 as cited in SEQ ID NO 0
attaacgcccctttccttccccagcggcaatcaaagagacggggagattcagatccacacacatccgcatccctctctcctcggtttcctctcccaccaccaacccccagatcgcagcgatctccgccgccgccctctctgggattccgcgcgacaaagtcaggcgtagaggctccaggaggaggagggaggcgcagcagggcgggtgggggagatgttcctctgggactggttctacggggtgctggcctccctcggcctgtggcagaaggaggccaagatcctcttccttggcctcgacaacgccggcaagaccacgctgctccacatgctcaaggacgagcggttggtgcagcaccagccgacgcagcacccgacgtcggaggagctcagcatcggcaagatcaagttcaaggcgttcgacctcggcggccaccagatcgcgcgccgcgtgtggaaggattactacgcaaaggttgatgctgtagtatacctggtagatgcatatgataaggagcgatttgctgaatcaaagaaggagctcgatgctctcctgtctgatgattctttggccaatgttccatttctcatccttggcaacaagattgatatcccatatgctgcctctgaagaggagctacggtatcacctaggccttagcaacttcacaaccgggaagggcaaggtcaaccttggcgactccaatgtccgtccacttgaggtcttcatgtgcagtgttgttcgcaagatgggctacggtgatggtttcaagtgggtctcccagtacatcaagtagggccctcgccgaggcgcatgctcagcccggcgaatttttttgccttgttcgttccggttggttcgtgacgagaacgaacgatggtcgctaggaaagtatcatggagggtatgaagaggaaaaacagtgcttaacattgttgaacatgttgagtctttagcgtcaaaacaatttatgtcgaactctattctttcgcttttccatacaacgtttactaagtacttgcgatgcattataaaattattactcttt

SEQ ID NO: 3712 - protein, 193 aa, Zea mays subsp. mays
  peptide (1)..(193): Ceres Seq. ID no. 12633519
MFLWDWFYGVLASLGLWQKEAKILFLGLDNAGKTTLLHMLKDERLVQHQPTQHPTSEELSIGKIKFKAFDLGGHQIARRVWKDYYAKVDAVVYLVDAYDKERFAESKKELDALLSDDSLANVPFLILGNKIDIPYAASEEELRYHLGLSNFTTGKGKVNLGDSNVRPLEVFMCSVVRKMGYGDGFKWVSQYIK

SEQ ID NO: 3713 - protein, 159 aa, Zea mays subsp. mays
  peptide (1)..(159): Ceres Seq. ID no. 12633520
INAPFLPQRQSKRRGDSDPHTSASLSPRFPLPPPTPRSQRSPPPPSLGFRATKSGVEAPGGGGRRSRAGGGDVPLGLVLRGAGLPRPVAEGGQDPLPWPRQRRQDHAAPHAQGRAVGAAPADAAPDVGGAQHRQDQVQGVRPRRPPDRAPRVEGLLRKG

SEQ ID NO: 3714 - protein, 155 aa, Zea mays subsp. mays
  peptide (1)..(155): Ceres Seq. ID no. 12633521
MLKDERLVQHQPTQHPTSEELSIGKIKFKAFDLGGHQIARRVWKDYYAKVDAVVYLVDAYDKERFAESKKELDALLSDDSLANVPFLILGNKIDIPYAASEEELRYHLGLSNFTTGKGKVNLGDSNVRPLEVFMCSVVRKMGYGDGFKWVSQYIK

SEQ ID NO: 3715 - DNA, 811 bp, Zea mays subsp. mays
  misc_feature (1)..(811): Ceres Seq. ID no. 12402622
  misc_feature (1)..(811): Ortholog of  Ceres SEQ ID NO 12618916 as cited in SEQ ID NO 65818
aacaccgtccagtccatcactgccctttgttctcctccacagtcgcagacaaagctggttcgtctcgcggagaggggaagccgggaaggtggataggcggcacccacccatcacccatggctgggttgcaaagatcggcgaccacgttcagacggtccggctcgtcgggcctggtctgggacgagcgtttcctgaccgaggccgacgccgaggcgaaggccggcgccgcggaggatgccgagcagccggagctccggcactcgaggagcgtcggcatgctgcgccgtgcgggcggcggtggagacagccgcagcaagaagggcaaggagagtaggcagaagcaggcggagtcggcgcggcgcagcaaccagcaggtgttccggaccaaggacgtggccccggacatggatcccccctcgccgagggtgtccggctgcgccttctgcgccgtcttccgcgggggctctggcggtactggccgcagggcacaggcacgccgccggtccaagcccaggaagaagtgacggcgtagcaacacgtacgtacgtgcggtacgttgttgtttgtgccatctgtaaagtccgggccatggttgttcgtgcgtgtacatgtttactatactaaatactagggtcatatatagatgagcttgctactcggtaatcggtatacgtacgccattatttagttcaggatagttcctccttttttgggtcggtcggttggtttcttgatccagatccatgcttttgaggtttgggcgacggttagatgttacttgtctactatatatgcagcagctatttatgag

SEQ ID NO: 3716 - protein, 173 aa, Zea mays subsp. mays
  peptide (1)..(173): Ceres Seq. ID no. 12402623
HRPVHHCPLFSSTVADKAGSSRGEGKPGRWIGGTHPSPMAGLQRSATTFRRSGSSGLVWDERFLTEADAEAKAGAAEDAEQPELRHSRSVGMLRRAGGGGDSRSKKGKESRQKQAESARRSNQQVFRTKDVAPDMDPPSPRVSGCAFCAVFRGGSGGTGRRAQARRRSKPRKK

SEQ ID NO: 3717 - protein, 135 aa, Zea mays subsp. mays
  peptide (1)..(135): Ceres Seq. ID no. 12402624
MAGLQRSATTFRRSGSSGLVWDERFLTEADAEAKAGAAEDAEQPELRHSRSVGMLRRAGGGGDSRSKKGKESRQKQAESARRSNQQVFRTKDVAPDMDPPSPRVSGCAFCAVFRGGSGGTGRRAQARRRSKPRKK

SEQ ID NO: 3718 - protein, 129 aa, Zea mays subsp. mays
  peptide (1)..(129): Ceres Seq. ID no. 12402625
MPSSRSSGTRGASACCAVRAAVETAAARRARRVGRSRRSRRGAATSRCSGPRTWPRTWIPPRRGCPAAPSAPSSAGALAVLAAGHRHAAGPSPGRSDGVATRTYVRYVVVCAICKVRAMVVRACTCLLY

SEQ ID NO: 3719 - DNA, 1116 bp, Zea mays subsp. mays
  misc_feature (1)..(1116): Ceres Seq. ID no. 12381029
  misc_feature (1)..(1116): Ortholog of  Ceres SEQ ID NO 12557497 as cited in SEQ ID NO 43
  misc_feature (1)..(1116): Ortholog of  Ceres SEQ ID NO 14303417 as cited in SEQ ID NO 54923
  misc_feature (1)..(1116): Ortholog of  Ceres SEQ ID NO 15169084 as cited in SEQ ID NO 59115
  misc_feature (1)..(1116): Ortholog of  Ceres SEQ ID NO 12635513 as cited in SEQ ID NO 0
  misc_feature (1)..(1116): Ortholog of  Ceres SEQ ID NO 15179044 as cited in SEQ ID NO 0
aatacaaaccaggcttgctcgtggcggcaaaaaccaacgtgctcgatctccctccgccactccatccatctcctcgctcccagtccccgggaagctacgaagcatggcgtccgtcaccgcccgcgccccggtcgcggcccttcgcccgtcgtcggcatcgctcaagtcgtcgtcggccttccttggccactctagccgcctcggccgcaccgcgtcgcccacgaggcgcagcctcaaggcggaggccaagggcgagtggctccccggccttccctccccctcctacctcgacggcagcctggcgggtgacaatggcttcgacccgttgggcctggcggaggaccccgagaacctgcggtggttcgtgcaggcggagctggtgaacggccggtgggccatgcttggcgtggccgggatgctcatcccggaggtgctgaccaaagccgggctgatcaacgcgccgcagtggtacgacgccggcaagtcggagtacttcgcgtcgtcgtccacgctgttcgtggtcgagttcatcctgttccactacgtggagatccggcggtggcaggacatcaagaaccccggcagcgtcaaccaggaccccatcttcaagagctacagcctgccgccgcacgagtgcggctacccgggcagcgtcttcaacccgctcaacttcgcgcccacgctcgaggccaaggagaaggagctcgccaacgggaggctggcgatgctggcgttcctgggcttcctgatccagcacaacgtcaccggcaaggggcccttcgacaacctgctgcagcacctgtctgacccatggcacaacaccatcatccagaccttctccggttgagtcgaggtcgaggagggatacgatccatcgctggtgagctgatatggactggaaggcaaacattgaaaccttaaattcctttctggatcagtttgtgtgtgttaatctatctggagggtacagattcgggccgtgttgcaatgcatgcatggtctgaagggagcgagggctgaggagtgactggtatgtacattagctgaaggggaggttaagggtagagatcgtttgatcagtatcatctgtatatccccatgcatggggtttcgttt

SEQ ID NO: 3720 - protein, 281 aa, Zea mays subsp. mays
  peptide (1)..(281): Ceres Seq. ID no. 12381030
IQTRLARGGKNQRARSPSATPSISSLPVPGKLRSMASVTARAPVAALRPSSASLKSSSAFLGHSSRLGRTASPTRRSLKAEAKGEWLPGLPSPSYLDGSLAGDNGFDPLGLAEDPENLRWFVQAELVNGRWAMLGVAGMLIPEVLTKAGLINAPQWYDAGKSEYFASSSTLFVVEFILFHYVEIRRWQDIKNPGSVNQDPIFKSYSLPPHECGYPGSVFNPLNFAPTLEAKEKELANGRLAMLAFLGFLIQHNVTGKGPFDNLLQHLSDPWHNTIIQTFSG

SEQ ID NO: 3721 - protein, 247 aa, Zea mays subsp. mays
  peptide (1)..(247): Ceres Seq. ID no. 12381031
MASVTARAPVAALRPSSASLKSSSAFLGHSSRLGRTASPTRRSLKAEAKGEWLPGLPSPSYLDGSLAGDNGFDPLGLAEDPENLRWFVQAELVNGRWAMLGVAGMLIPEVLTKAGLINAPQWYDAGKSEYFASSSTLFVVEFILFHYVEIRRWQDIKNPGSVNQDPIFKSYSLPPHECGYPGSVFNPLNFAPTLEAKEKELANGRLAMLAFLGFLIQHNVTGKGPFDNLLQHLSDPWHNTIIQTFSG

SEQ ID NO: 3722 - protein, 149 aa, Zea mays subsp. mays
  peptide (1)..(149): Ceres Seq. ID no. 12381032
MLGVAGMLIPEVLTKAGLINAPQWYDAGKSEYFASSSTLFVVEFILFHYVEIRRWQDIKNPGSVNQDPIFKSYSLPPHECGYPGSVFNPLNFAPTLEAKEKELANGRLAMLAFLGFLIQHNVTGKGPFDNLLQHLSDPWHNTIIQTFSG

SEQ ID NO: 3723 - DNA, 823 bp, Zea mays subsp. mays
  misc_feature (1)..(823): Ceres Seq. ID no. 12579071
  misc_feature (1)..(823): Ortholog of  Ceres SEQ ID NO 13600184 as cited in SEQ ID NO 0
acaagtccacaaccgtaccagcaccaccgcgccatggcgtcctccgccgatcccgatgccgccacgccaccatccgcgccgcagccggagcccgcacgaaaggcagtccgcgtggtggtgaaggggcgcgtcacgggggtggggttccgcgactggactgcgtccacggccgagtcgctcggcctccgccggctgggtccgcaaccgccgtgacggcagtgtggaggccctcctctccggagaccccgcgaagatcgaagacatgataacccgccgcctcccggtcggccccccagccgccaccgtcaccgccgtcgtcccgtccacggccgagcccgtggatccgtccaccgggttcgagatcaagttcaccgtctgatcccccgtcccccccgtcccgcgacaggttcgcgtctcgccgcgcgttcttggacggtctattcgtgcactactactgcgaatctgcgattaaagatcagaggcgacatctaatgtaccggagtctgtttacctgaaaagctctgctatctgctttgggggggaattcatgccagattgtgggtgcaaacctatttccttactacctagtgtccaagtcggaatattaataagctatgccaggattcagatcgaaatatttctgtcactgagaaatgtgttgcgtgacaactttcgaagactgttgcctctctgtgtttatccctagatcctaatgtacaaacagagtcttatacagtactatgcattaacgtcaagtttcagagttcagacatgtgcctcgtgcctgctttctaattacaaatatagtcgagttgtgttttgc

SEQ ID NO: 3724 - protein, 87 aa, Zea mays subsp. mays
  peptide (1)..(87): Ceres Seq. ID no. 12579072
KSTTVPAPPRHGVLRRSRCRHATIRAAAGARTKGSPRGGEGARHGGGVPRLDCVHGRVARPPPAGSATAVTAVWRPSSPETPRRSKT

SEQ ID NO: 3725 - protein, 70 aa, Zea mays subsp. mays
  peptide (1)..(70): Ceres Seq. ID no. 12579073
TSPQPYQHHRAMASSADPDAATPPSAPQPEPARKAVRVVVKGRVTGVGFRDWTASTAESLGLRRLGPQPP

SEQ ID NO: 3726 - protein, 59 aa, Zea mays subsp. mays
  peptide (1)..(59): Ceres Seq. ID no. 12579074
MASSADPDAATPPSAPQPEPARKAVRVVVKGRVTGVGFRDWTASTAESLGLRRLGPQPP

SEQ ID NO: 3727 - DNA, 887 bp, Zea mays subsp. mays
  misc_feature (1)..(887): Ceres Seq. ID no. 12381033
  misc_feature (1)..(887): Ortholog of  Ceres SEQ ID NO 13584026 as cited in SEQ ID NO 63527
gaccattacctagaacatcctaatcgaaaaccctagttctctcgtgaccgccttccctcttctcctgcgtcccaactgggcaattccccaaacctaactaacctttgccaccgcgggagccaccatgggtggccagatgccggacgccgatgggaaggcccgctcggcggactcctcgtcctcttacgggtacccgccgtcggcgccgccgcagcaccagtacggcacctttggccccccatccggagcctccggggagtttccgcagccggcgggtcgggttcccccagccggcgccgccgcctgggatgcagcactacccgcagcctcctccggcgtcgtatgccgtctacccacccccgcagcaaccctactcggccgccgcgccgtactacgcccaaggctaccagatcgctcaaggttatattcctgttgttgaaggaaggcctgttagaatgcgtcctcttccatgttgtggccttggcatggggtggtttctgtttataattgggttcttctttgctgccattccatggtatcttggagcttttgtgctgatttgtgtccgagtacgtgatttacagggagaaaccaggatatgttgcttgcactattgctgcttcgcttgctgcaattgctgtgctgcttggcgccacaaaaggagcggaggtgtggtgagcattatgccttcaattaccagcagtctggttaatgtaaatgtccgttgctcggctactttgttacccgtgttgtacatgtgttgtgcgtacaaaggatagggtgtaacgaaaatgatgtatgctcctatttgtagttggacatatacatttgtcaaacggagtagcatgaatgcaccctcattaatcatttgatgtaaaattgcctgg

SEQ ID NO: 3728 - protein, 209 aa, Zea mays subsp. mays
  peptide (1)..(209): Ceres Seq. ID no. 12381034
MGRPARRTPRPLTGTRRRRRRSTSTAPLAPHPEPPGSFRSRRVGFPQPAPPPGMQHYPQPPPASYAVYPPPQQPYSAAAPYYAQGYQIAQGYIPVVEGRPVRMRPLPCCGLGMGWFLFIIGFFFAAIPWYLGAFVLICVRVRDLQGETRICCLHYCCFACCNCCAAWRHKRSGGVVSIMPSITSSLVNVNVRCSATLLPVLYMCCAYKG

SEQ ID NO: 3729 - protein, 156 aa, Zea mays subsp. mays
  peptide (1)..(156): Ceres Seq. ID no. 12381035
MQHYPQPPPASYAVYPPPQQPYSAAAPYYAQGYQIAQGYIPVVEGRPVRMRPLPCCGLGMGWFLFIIGFFFAAIPWYLGAFVLICVRVRDLQGETRICCLHYCCFACCNCCAAWRHKRSGGVVSIMPSITSSLVNVNVRCSATLLPVLYMCCAYKG

SEQ ID NO: 3730 - protein, 107 aa, Zea mays subsp. mays
  peptide (1)..(107): Ceres Seq. ID no. 12381036
MRPLPCCGLGMGWFLFIIGFFFAAIPWYLGAFVLICVRVRDLQGETRICCLHYCCFACCNCCAAWRHKRSGGVVSIMPSITSSLVNVNVRCSATLLPVLYMCCAYKG

SEQ ID NO: 3731 - DNA, 874 bp, Zea mays subsp. mays
  misc_feature (1)..(874): Ceres Seq. ID no. 12342813
  misc_feature (1)..(874): Ortholog of  Ceres SEQ ID NO 14316436 as cited in SEQ ID NO 59213
tccaactctgcgccgcaatccactcaagaaggttagccctcgtggtctcggatttggataatcctccgccgaggtatgaaacaggaggcggccaccagcatagtggtgacccaggaggacgtcctgcaccactacaaggagcctccaccccgccgcgaggacgatccgccagcactggctgcgtcgctgtcgttgccgtcgtcactgtcggaggacaatggcgacgccatgccgcagccatcttcatacgcggtcttgccgcgccgggatggcgagctggtgtctgcggaggagctgctgctggtgccgccgctcaacttcgccatggtggaccacggcgtgtaccgctccggattcccggacgcctccaacttgccgtttcttgagacgctccgactccgctccgtcctgtgcctgtgcccggagccatacccggaggctaatctggagttcctccgtgcccacgggatcaagctcttccagttcggaatcgacggctccaaggaaccatttgtgaacataccagaagatagaatccgtgaagctctagaagtcatcctagatgcaagcaaccatccggttcttattcactgcaagcgaggaaagcatcgaaccggctgtgtggttggatgctttaggaaattgcaacgctggtgtctaacttcaatatttgacgaataccagcgttttgctgctgccaaaacaagagtttctgacctacggttcatggagctatttgatgtatcgagcataaagcatttagcatttgagtcgtctgtatgatagtaacattggtgcatgataacaactcaatactggttccattacggtgtcatctttttcatttaagaaaaaaaatcatttctaaaaatgc

SEQ ID NO: 3732 - protein, 235 aa, Zea mays subsp. mays
  peptide (1)..(235): Ceres Seq. ID no. 12342814
MKQEAATSIVVTQEDVLHHYKEPPPRREDDPPALAASLSLPSSLSEDNGDAMPQPSSYAVLPRRDGELVSAEELLLVPPLNFAMVDHGVYRSGFPDASNLPFLETLRLRSVLCLCPEPYPEANLEFLRAHGIKLFQFGIDGSKEPFVNIPEDRIREALEVILDASNHPVLIHCKRGKHRTGCVVGCFRKLQRWCLTSIFDEYQRFAAAKTRVSDLRFMELFDVSSIKHLAFESSV

SEQ ID NO: 3733 - protein, 184 aa, Zea mays subsp. mays
  peptide (1)..(184): Ceres Seq. ID no. 12342815
MPQPSSYAVLPRRDGELVSAEELLLVPPLNFAMVDHGVYRSGFPDASNLPFLETLRLRSVLCLCPEPYPEANLEFLRAHGIKLFQFGIDGSKEPFVNIPEDRIREALEVILDASNHPVLIHCKRGKHRTGCVVGCFRKLQRWCLTSIFDEYQRFAAAKTRVSDLRFMELFDVSSIKHLAFESSV

SEQ ID NO: 3734 - protein, 152 aa, Zea mays subsp. mays
  peptide (1)..(152): Ceres Seq. ID no. 12342816
MVDHGVYRSGFPDASNLPFLETLRLRSVLCLCPEPYPEANLEFLRAHGIKLFQFGIDGSKEPFVNIPEDRIREALEVILDASNHPVLIHCKRGKHRTGCVVGCFRKLQRWCLTSIFDEYQRFAAAKTRVSDLRFMELFDVSSIKHLAFESSV

SEQ ID NO: 3735 - DNA, 1302 bp, Zea mays subsp. mays; identical to SEQ ID NO: 1696
  misc_feature (1)..(1302): Ceres Seq. ID no. 12411041
  misc_feature (1)..(1302): Ortholog of  Ceres SEQ ID NO 14309653 as cited in SEQ ID NO 0

SEQ ID NO: 3736 - protein, 139 aa, Zea mays subsp. mays; identical to SEQ ID NO: 1697
  peptide (1)..(139): Ceres Seq. ID no. 12411042

SEQ ID NO: 3737 - protein, 85 aa, Zea mays subsp. mays; identical to SEQ ID NO: 1698
  peptide (1)..(85): Ceres Seq. ID no. 12411043

SEQ ID NO: 3738 - DNA, 520 bp, Zea mays subsp. mays
  misc_feature (1)..(520): Ceres Seq. ID no. 13564877
  misc_feature (1)..(520): Ortholog of  Ceres SEQ ID NO 14316300 as cited in SEQ ID NO 59995
  misc_feature (1)..(520): Ortholog of  Ceres SEQ ID NO 13662758 as cited in SEQ ID NO 64912
cacaaccngccgccgtccaccccctcctagagcggaaccacattccacggctctaaggccatgtcgccggcgtccctcgcagctcggctcctacgccgcgccgcttccacctcttcctctcctctctccgctcttgtccgccgcggtctctgttcctcggcgcccgttcccctcctccgccgtctccctgcggccacctcatcgacggcggggaccaccgcccgccgcttcctggcgtcgcagtccccggcgtcctcctccacgtcttcggmggacgataacctgaggmgcatcgtcgagtctgagatcgagtgcgttgtccagtcggaggagagcaacaccgacaagcacattgatctaccagaggacttcccttttgagatcatagacaatcctggtgatcagtcaataaccctccaaagggagattgcaggggagacaattaaagctgttatatacaccaactttgatacagatgaacatttggatgatgaggatgacaaaagtkggcacagatgag

SEQ ID NO: 3739 - protein, 152 aa, Zea mays subsp. mays
  peptide (1)..(152): Ceres Seq. ID no. 13564878
  misc_feature (71)..(71): Xaa is any aa, unknown or other
  misc_feature (77)..(77): Xaa is any aa, unknown or other
  misc_feature (150)..(150): Xaa is any aa, unknown or other
MSPASLAARLLRRAASTSSSPLSALVRRGLCSSAPVPLLRRLPAATSSTAGTTARRFLASQSPASSSTSSXDDNLRXIVESEIECVVQSEESNTDKHIDLPEDFPFEIIDNPGDQSITLQREIAGETIKAVIYTNFDTDEHLDDEDDKSXHR

SEQ ID NO: 3740 - protein, 94 aa, Zea mays subsp. mays
  peptide (1)..(94): Ceres Seq. ID no. 13564879
  misc_feature (3)..(3): Xaa is any aa, unknown or other
  misc_feature (91)..(91): Xaa is any aa, unknown or other
TTXRRPPPPRAEPHSTALRPCRRRPSQLGSYAAPLPPLPLLSPLLSAAVSVPRRPFPSSAVSLRPPHRRRGPPPAASWRRSPRRPPPRLRXTIT

SEQ ID NO: 3741 - DNA, 698 bp, Zea mays subsp. mays
  misc_feature (1)..(698): Ceres Seq. ID no. 13492060
  misc_feature (1)..(698): Ortholog of  Ceres SEQ ID NO 12585210 as cited in SEQ ID NO 63226
accggatcaccagcctacagctcgtcacatctctctctctccgcccggccgcggcctctagactcactctaaccgccatggccacggcgcacggcagcaggctcatcttcctcttcgaggccacgctcttctcggcgctgctgctcgtcccggcacgccctgcttccgccgcagacggcagcgcgtacccggccggcgactgcccctacccgtgcctgccgccgcccgccgtcaccgccaactgcccgccgcctccgccggctgcggcgtcgtactcgtacccgccaccgccgggggcttacattccctacttccagcctgcggcgggtggcggtggtggcggcggtagtggggggtacggcggctacccggcgccgccgccgcccaaccccatcctgccgtggtacccatggtactacaagacgccgccgtcgtccgcggccgccacgtcgggcagggggagtcgcgttcttcttgggtcggccgccatggtagctgctgctgccctgctgatcatggcttagccgcagcccgcagcagtcgttctttttgcatcttcgatcttgttctcacccccaggttttttttcctcttgttaatttactgctcaggatttatattcagaggtatataacgagggagcattatatatattgcttgtactcctaatttatcagctacatgtctctagttccttg

SEQ ID NO: 3742 - protein, 173 aa, Zea mays subsp. mays
  peptide (1)..(173): Ceres Seq. ID no. 13492061
RITSLQLVTSLSLRPAAASRLTLTAMATAHGSRLIFLFEATLFSALLLVPARPASAADGSAYPAGDCPYPCLPPPAVTANCPPPPPAAASYSYPPPPGAYIPYFQPAAGGGGGGGSGGYGGYPAPPPPNPILPWYPWYYKTPPSSAAATSGRGSRVLLGSAAMVAAAALLIMA

SEQ ID NO: 3743 - protein, 148 aa, Zea mays subsp. mays
  peptide (1)..(148): Ceres Seq. ID no. 13492062
MATAHGSRLIFLFEATLFSALLLVPARPASAADGSAYPAGDCPYPCLPPPAVTANCPPPPPAAASYSYPPPPGAYIPYFQPAAGGGGGGGSGGYGGYPAPPPPNPILPWYPWYYKTPPSSAAATSGRGSRVLLGSAAMVAAAALLIMA

SEQ ID NO: 3744 - DNA, 1179 bp, Zea mays subsp. mays
  misc_feature (1)..(1179): Ceres Seq. ID no. 12341648
  misc_feature (1)..(1179): Ortholog of  Ceres SEQ ID NO 14312572 as cited in SEQ ID NO 55151
tcgagggggaataaaatcccagcggcttcccccaaacaaaacctcttctccgccagagtccgcgtcggccagatcaaacgaatcggcacgacgcatcggcatcgcctccgacgatcttgagacaaacaaaacccaccgctgcggcaactccgcctcccgctgacacggggatcgcctgacaacaggcagagaaaagaggcgcagggtttgcccgcgaagatggaggacgtggacgtctcgcggcagctgaagcagatgacgaacttcatccgccaggaggccgtcgagaaggccgccgagatcgaggccgccgccgccgaggagttccaaatagaaaagttgcagctggtggaagctgaaaagaagaagatcaggcaggaatatgaccggaaagagaagcaagttggcatcaagaagaaaattgattactcgatgcagctcaatgcttccagaattaaagtccttcaagctcaggatgatttggtaacagatatgttggagtcagcaaggaaagagctactgtgcataagtagagatcaccccacttacaagaagctcctcaagacacttattgttcagagtttgctgcgcctgaaagaaccagctgtgcttctccgctgcaggaaggaggatcttcaacttgttgatttagttttggaatctgcaaggaatgagtatgcagataaagcaaaagtatatcctcctgagatagtggtagatcgtcaaatctatctgccatctgctcccagtcattatcaggcacctggcccctcatgctccggtggagttgtgctagcttcccgagatggaaagattgtctgtgaaaacacactggatgctagattgcaggtagttttcagaaagaagctgccagagattcgtcagagccttttcgggcaggtagctgcgtagccaattcttgaaagcagaacgtggcccagtactctttggggtaccctgacgatgtccaggagaaactttggcagctctcaatagtgatttatcacacttttggacctcgattattatttgtgtatacttttttcctggttatggatacctttgaatcctgcacagagcaaataaactgtgttcatttgtgggacgatcgtttgttgcaataaggcatcgagatgtgttgcgatgccacttctgttatagcatcatgttttttcgttg

SEQ ID NO: 3745 - protein, 230 aa, Zea mays subsp. mays
  peptide (1)..(230): Ceres Seq. ID no. 12341649
MEDVDVSRQLKQMTNFIRQEAVEKAAEIEAAAAEEFQIEKLQLVEAEKKKIRQEYDRKEKQVGIKKKIDYSMQLNASRIKVLQAQDDLVTDMLESARKELLCISRDHPTYKKLLKTLIVQSLLRLKEPAVLLRCRKEDLQLVDLVLESARNEYADKAKVYPPEIVVDRQIYLPSAPSHYQAPGPSCSGGVVLASRDGKIVCENTLDARLQVVFRKKLPEIRQSLFGQVAA

SEQ ID NO: 3746 - protein, 218 aa, Zea mays subsp. mays
  peptide (1)..(218): Ceres Seq. ID no. 12341650
MTNFIRQEAVEKAAEIEAAAAEEFQIEKLQLVEAEKKKIRQEYDRKEKQVGIKKKIDYSMQLNASRIKVLQAQDDLVTDMLESARKELLCISRDHPTYKKLLKTLIVQSLLRLKEPAVLLRCRKEDLQLVDLVLESARNEYADKAKVYPPEIVVDRQIYLPSAPSHYQAPGPSCSGGVVLASRDGKIVCENTLDARLQVVFRKKLPEIRQSLFGQVAA

SEQ ID NO: 3747 - protein, 159 aa, Zea mays subsp. mays
  peptide (1)..(159): Ceres Seq. ID no. 12341651
MQLNASRIKVLQAQDDLVTDMLESARKELLCISRDHPTYKKLLKTLIVQSLLRLKEPAVLLRCRKEDLQLVDLVLESARNEYADKAKVYPPEIVVDRQIYLPSAPSHYQAPGPSCSGGVVLASRDGKIVCENTLDARLQVVFRKKLPEIRQSLFGQVAA

SEQ ID NO: 3748 - DNA, 883 bp, Zea mays subsp. mays
  misc_feature (1)..(883): Ceres Seq. ID no. 12404746
  misc_feature (1)..(883): Ortholog of  Ceres SEQ ID NO 12585335 as cited in SEQ ID NO 62940
atccgagtccacccaactaatcacgcccaatcagaacagactcggtcgcttcaccactccactcgccgcaggccgccgggcgccgccgaggggatcggagcaagatgttcttccacatcgtgctggagcggaacatgcagctgcacccacgacacttcgggccgcacctccgcgacaagctcgtttccaagctcatcaaggacgtcgagggcacctgcagcgggcggcacgggttcgttgtggcgatcacgggtgtggaggacatcggcaaggggctcatccgggaaggcacgggatacgtcaccttccccgtcaagtaccagtgcgttgtctttagacccttcaagggcgagatcctcgaagctgtcgtcaccatggtgaacaagatgggcttctttgcggaggctgggccggtgcagatcttcgtgtccaaccatttgattccagacgatatggagttccaatcaggagatgtgccgaactacacaacttctgatggatcggtgaaaattcaaaaagagagtgaggtgcggctgaagattattggtactcgtgtcgatgctacagaaattttttgcattggcacaataaaggatgattttctgggtgttatcagcgatcctggtgcggcagtgtaaatggtctaagaagcgagattgtactccattgttctgacttctgagtactatcgcagacgtgtgtaatcgctggtccgttaaaactgcaatggctgtactgactgcggaacttgttgagaatgatgtgactaggaccttgtttagggcctgtttggttctttagtatggccctgattggcacaactgctgtttattgaaaaaacagcttatctgataagctggtgaaaaatagcttctgcttgttg

SEQ ID NO: 3749 - protein, 177 aa, Zea mays subsp. mays
  peptide (1)..(177): Ceres Seq. ID no. 12404747
MFFHIVLERNMQLHPRHFGPHLRDKLVSKLIKDVEGTCSGRHGFVVAITGVEDIGKGLIREGTGYVTFPVKYQCVVFRPFKGEILEAVVTMVNKMGFFAEAGPVQIFVSNHLIPDDMEFQSGDVPNYTTSDGSVKIQKESEVRLKIIGTRVDATEIFCIGTIKDDFLGVISDPGAAV

SEQ ID NO: 3750 - protein, 167 aa, Zea mays subsp. mays
  peptide (1)..(167): Ceres Seq. ID no. 12404748
MQLHPRHFGPHLRDKLVSKLIKDVEGTCSGRHGFVVAITGVEDIGKGLIREGTGYVTFPVKYQCVVFRPFKGEILEAVVTMVNKMGFFAEAGPVQIFVSNHLIPDDMEFQSGDVPNYTTSDGSVKIQKESEVRLKIIGTRVDATEIFCIGTIKDDFLGVISDPGAAV

SEQ ID NO: 3751 - protein, 126 aa, Zea mays subsp. mays
  peptide (1)..(126): Ceres Seq. ID no. 12404749
IRVHPTNHAQSEQTRSLHHSTRRRPPGAAEGIGARCSSTSCWSGTCSCTHDTSGRTSATSSFPSSSRTSRAPAAGGTGSLWRSRVWRTSARGSSGKARDTSPSPSSTSALSLDPSRARSSKLSSPW

SEQ ID NO: 3752 - DNA, 858 bp, Zea mays subsp. mays
  misc_feature (1)..(858): Ceres Seq. ID no. 12356124
  misc_feature (1)..(858): Ortholog of  Ceres SEQ ID NO 14311693 as cited in SEQ ID NO 51239
  misc_feature (1)..(858): Ortholog of  Ceres SEQ ID NO 13661954 as cited in SEQ ID NO 61182
aacgaactccagaaataatccgccctcgtatcctcacgcccacaaaacacccgaagaaaagaagagactgaacgccgcgagttcacgtgacgatggagaacgccgcctccgccatcgctaagccgtcgctgtccaagaagccctcgccgtcgttccgcctccggaacggcagcctcaacgcactgcgcctgcgccgcgtgttcgacctcttcgaccgcaacggcgacggcgagatcagcctcgacgagatggcctcggcgctcgacgcgctcggcctcggcgccgaccgctccggcctggaggccgcggttggcgggtacatcccggccggcgccgcggggctccgcttcaacgacttcgagtccctccaccgcgcgctcggggacgcgctgttcgggccccatgccggtggctgtgaccgaggatgacgacgacgagggggacatgaaggaggcgttccgggtgttcgatgaggacggcgacggcttcatctcggccgccgagctgcaggccgtgctcaagaagctcggcctgcccgaggctcggaacctggccactgtgcaggagatgatctgcaacgtcgaccgcaactgcgacggccgcgtcgacttcggcgagttcaagaacatgatgcaggggatcaccgtgtggggcgcttagctgccgcgcacctgcgttgtcacaccccctctactgcgtggtgtcatgtatgtatccaggcaccgtaggatgcgcttttctacccggcgcttcttcctcctcttgatggcgcagtggattcttcctgttcttggctttgctatctgactctgcttgtagtcttgagaatctggcggcacacagacatagttttctttc

SEQ ID NO: 3753 - protein, 111 aa, Zea mays subsp. mays
  peptide (1)..(111): Ceres Seq. ID no. 12356125
MENAASAIAKPSLSKKPSPSFRLRNGSLNALRLRRVFDLFDRNGDGEISLDEMASALDALGLGADRSGLEAAVGGYIPAGAAGLRFNDFESLHRALGDALFGPHAGGCDRG

SEQ ID NO: 3754 - protein, 85 aa, Zea mays subsp. mays
  peptide (1)..(85): Ceres Seq. ID no. 12356126
MPVAVTEDDDDEGDMKEAFRVFDEDGDGFISAAELQAVLKKLGLPEARNLATVQEMICNVDRNCDGRVDFGEFKNMMQGITVWGA

SEQ ID NO: 3755 - protein, 71 aa, Zea mays subsp. mays
  peptide (1)..(71): Ceres Seq. ID no. 12356127
MKEAFRVFDEDGDGFISAAELQAVLKKLGLPEARNLATVQEMICNVDRNCDGRVDFGEFKNMMQGITVWGA

SEQ ID NO: 3756 - DNA, 1512 bp, Zea mays subsp. mays
  misc_feature (1)..(1512): Ceres Seq. ID no. 12405701
  misc_feature (1)..(1512): Ortholog of  Ceres SEQ ID NO 14310823 as cited in SEQ ID NO 53842
  misc_feature (1)..(1512): Ortholog of  Ceres SEQ ID NO 13586843 as cited in SEQ ID NO 0
gaaaatccttcactcgtccctctctcggtctgtccctttggagcgaaggcgaaccgcgtcgcgaacccaggatcccatcgagggcaggcgggcagatcccggcgtccgacggcgatgggcgaggaggacgcgagcgccgggggagatccgcagcggctgaagcggatcgccgctgcggcgtacgactacgagaacgatgcgcggtgggccgggtactggtccaacgtcctcgtgccgcccccacctcgcctcccgccccgacgtcgtcgaccacttcaagcgcaaagttctaccagcgatacatcgatcctggtttggttgttgaaccgatgtcctcccatgacttcaactcagtctagcagaccagcagcgaagtcttcagctacaccatctagtgagaatgtcagagctcgggactcaggctctagcacgagatcaactgggacctcccaacatccaccagcagagaggactgcaaattcattacagctagacggacggacaataaacttttctatcaatgcctgggtactggttgtagctagtctcggaatactcccagttctacccaaccatatctcgagtaaagcataccgtctttcattgctaggaacaatatgctcgtctgcatattctttatatggcacttatgggaaaccaagagcatggaatatgcctgcaattcagtcctggttgcagtctattattgtagctaaggactttgttcacttgatgttctctcttatgatgttcacatctaatgtgcactttaagattgctctacttcctgtgctttgctgggcgcttgatcatgttgctcgattcctaaggcgtaattttacacactcttctttatacaggaagtacttagaggacccttgcctatgggtagagacaaacaacactacactcagcctactttgttcgaatgctgaaatcaccctggggtttctcatgatcatctcgcttttctcgtcgagacgcaatataatccagacatttatgtactttcatcttttgaagttgatgtaccattctcctgtgacatctggttaccaccagagcgtgtgggcaagaataggccgggctgtaaacccgtacatttaccgctatgcgccattcctgaacacacctatttcggcagtccagagatggtggctgaggtaggaaagcatggaccgcagcacagtgaaaatatgcctaaacagctactctgatctcagcgcctcgatcttttagaaggcgtgcttgcacggcgtgttcttttcttgtaaaggttgtattctcagttcatgtcttactgagctactgaaggcataacactagagaatttcttacgatgagcagtagcgcttgagcaaactgtcgatttgatgggatacagttacaggcataaagtgattgcacagaattttcataaggatgcttgctgcagtcaataggatggaacatgcgagtggcactattgattcttgaagtaataaatgatgttcttgtctattttattttgcc

SEQ ID NO: 3757 - protein, 388 aa, Zea mays subsp. mays
  peptide (1)..(388): Ceres Seq. ID no. 12405702
ENPSLVPLSVCPFGAKANRVANPGSHRGQAGRSRRPTAMGEEDASAGGDPQRLKRIAAAAYDYENDARWAGYWSNVLVPPPPRLPPRRRRPLQAQSSTSDTSILVWLLNRCPPMTSTQSSRPAAKSSATPSSENVRARDSGSSTRSTGTSQHPPAERTANSLQLDGRTINFSINAWVLVVASLGILPVLPNHISSKAYRLSLLGTICSSAYSLYGTYGKPRAWNMPAIQSWLQSIIVAKDFVHLMFSLMMFTSNVHFKIALLPVLCWALDHVARFLRRNFTHSSLYRKYLEDPCLWVETNNTTLSLLCSNAEITLGFLMIISLFSSRRNIIQTFMYFHLLKLMYHSPVTSGYHQSVWARIGRAVNPYIYRYAPFLNTPISAVQRWWLR

SEQ ID NO: 3758 - protein, 350 aa, Zea mays subsp. mays
  peptide (1)..(350): Ceres Seq. ID no. 12405703
MGEEDASAGGDPQRLKRIAAAAYDYENDARWAGYWSNVLVPPPPRLPPRRRRPLQAQSSTSDTSILVWLLNRCPPMTSTQSSRPAAKSSATPSSENVRARDSGSSTRSTGTSQHPPAERTANSLQLDGRTINFSINAWVLVVASLGILPVLPNHISSKAYRLSLLGTICSSAYSLYGTYGKPRAWNMPAIQSWLQSIIVAKDFVHLMFSLMMFTSNVHFKIALLPVLCWALDHVARFLRRNFTHSSLYRKYLEDPCLWVETNNTTLSLLCSNAEITLGFLMIISLFSSRRNIIQTFMYFHLLKLMYHSPVTSGYHQSVWARIGRAVNPYIYRYAPFLNTPISAVQRWWLR

SEQ ID NO: 3759 - protein, 275 aa, Zea mays subsp. mays
  peptide (1)..(275): Ceres Seq. ID no. 12405704
MTSTQSSRPAAKSSATPSSENVRARDSGSSTRSTGTSQHPPAERTANSLQLDGRTINFSINAWVLVVASLGILPVLPNHISSKAYRLSLLGTICSSAYSLYGTYGKPRAWNMPAIQSWLQSIIVAKDFVHLMFSLMMFTSNVHFKIALLPVLCWALDHVARFLRRNFTHSSLYRKYLEDPCLWVETNNTTLSLLCSNAEITLGFLMIISLFSSRRNIIQTFMYFHLLKLMYHSPVTSGYHQSVWARIGRAVNPYIYRYAPFLNTPISAVQRWWLR

SEQ ID NO: 3760 - DNA, 1275 bp, Zea mays subsp. mays
  misc_feature (1)..(1275): Ceres Seq. ID no. 12410098
  misc_feature (1)..(1275): Ortholog of  Ceres SEQ ID NO 14309755 as cited in SEQ ID NO 20741
  misc_feature (1)..(1275): Ortholog of  Ceres SEQ ID NO 13638746 as cited in SEQ ID NO 59296
  misc_feature (1)..(1275): Ortholog of  Ceres SEQ ID NO 13596474 as cited in SEQ ID NO 62169
  misc_feature (1)..(1275): Ortholog of  Ceres SEQ ID NO 13598714 as cited in SEQ ID NO 62656
  misc_feature (1)..(1275): Ortholog of  Ceres SEQ ID NO 13596969 as cited in SEQ ID NO 63375
  misc_feature (1)..(1275): Ortholog of  Ceres SEQ ID NO 15225685 as cited in SEQ ID NO 63616
  misc_feature (1)..(1275): Ortholog of  Ceres SEQ ID NO 13597519 as cited in SEQ ID NO 64759
  misc_feature (1)..(1275): Ortholog of  Ceres SEQ ID NO 13587054 as cited in SEQ ID NO 0
gagtcacatgctagcgtgcgtgtgcgtgtgcaacggctataccacctgcgcgacccaccgcgagcgcccgcagctaagctagctctcgctcgcgcgctctgggagaggagagatcaatggcgtcccgtggcagcatgacctgtagtcttcagctcgccgtcctcgtttccgccgccatcgcgctcgggttcggcgtccgggccggcgaggcgcagctgtccagcgagtactacggccagacgtgccccgtcgtgcaccgggtcgcgcggcgggtgctgaagaaggcgcacgaggccgacgtccgcatctacgccagcctcacccgcctccatttccacgactgcttcgtgcaaggctgcgacggctccatcctgctggacaacagctcgagcatcgtgtcggagaagttcgccacgcccaacaacaactcggcgcgcgggtaccccgtggtcgacgccgtcaaggcggcgctggaggagggcttgcccaggcgttgtctcctgcgctgacatactggcccatcgcccgccaagatctcggtcgaactgtccggcgggccaaggtggcgcgtgcctctcggccggcgcgacggcaccacggccaacatcaccgccgccaacaacctcccgagccccttcgacaacctcactacgctccagcagaagttcggcgccgtcggcctcgacgacaccgacctcgtcgcgctctcaggggcgcacacgttcgggcgcgtgcagtgccagttcgtgacggcgcggctgtacaacttcagcgggacgaaccggccggacccgacgctggacagggggtaccgggcgttcctctccctgcggtgcccgagggccggcaacgcgtcggcgctcaacgacctcgacccgaccacgccggacaccttcgacaacaattactacaccaacatcgaggcgcgccgtgggacgctgcagtccgaccaggagctgctgtcgacgcccggcgcgcccacggcgccgatcgtcggacggttcgccgccagccagaaggagttcttcaggagcttcgccaggtccatggtcaacatggggaacatccaggtgctgacggggagtcagggtgagatcaggaagaactgtaggatggtcaacggaagctagacccgtcgacggcacaagttactggtgaactgaaagcagttctgctgtatgtacgatgcctcaaacatgttgatgggataatggtgcgccgatcgatttatttgtcaaggagatccaataaattggttttttgcattttttttcc

SEQ ID NO: 3761 - protein, 130 aa, Zea mays subsp. mays
  peptide (1)..(130): Ceres Seq. ID no. 12410099
MASRGSMTCSLQLAVLVSAAIALGFGVRAGEAQLSSEYYGQTCPVVHRVARRVLKKAHEADVRIYASLTRLHFHDCFVQGCDGSILLDNSSSIVSEKFATPNNNSARGYPVVDAVKAALEEGLPRRCLLR

SEQ ID NO: 3762 - protein, 124 aa, Zea mays subsp. mays
  peptide (1)..(124): Ceres Seq. ID no. 12410100
MTCSLQLAVLVSAAIALGFGVRAGEAQLSSEYYGQTCPVVHRVARRVLKKAHEADVRIYASLTRLHFHDCFVQGCDGSILLDNSSSIVSEKFATPNNNSARGYPVVDAVKAALEEGLPRRCLLR

SEQ ID NO: 3763 - DNA, 1797 bp, Zea mays subsp. mays
  misc_feature (1)..(1797): Ceres Seq. ID no. 12423918
  misc_feature (1)..(1797): Ortholog of  Ceres SEQ ID NO 14310419 as cited in SEQ ID NO 55050
  misc_feature (1)..(1797): Ortholog of  Ceres SEQ ID NO 13657789 as cited in SEQ ID NO 66154
aaagctccagcacatccaatcgcacgacactccctgctgctctctgctgagaggtgctagatctcggactcgccgttgatttgattccaagttaaagacagcgagcaatccatagattgaccggtggagagcgagagaaagcgagagagagaagggaattggttggtaggtggagaccggagggagagctcagctcaggagattgatgcttgcatggtgatgcgggcgcgggcgatggggctgagcagcatccggcgggaggtgctggtctccgccgtcttcacggcgctcctcgtggcctccatcctcctcctcccctcgctcctcctaacgggcgctgggcccatcaggtggccgtccctgtccccgtcgaaggatgccggcatcggcgaggaggaggagcagcaggcgcggtaccccgtgacgttcgcgtacctgatctcggcgtcgacgggggacgcgtcccgcgccgcgcggctgctggcggcgctgtaccacccgggcaacagctacctgctgcacctggaccgggaggcccccgcggaggagcaccggcgtctggcggagctggtgtccgggcgcggcgtgtacgcgcgcgcgggcaacgtgtggatcgtgggcaggcccaacctggtaacctaccgtggccccaccatgctgaccaccacgctgcacgccgtcgccgtgctgctccgcctccgccgccgctgggactggttcatcaacctcagcgcctccgactacccgctcgtcacccaggacggtaccctgtgatgcttgcttgcttgcttgctgttggtcgtccactggatggacagactgtttctgaattttgggggttgcagatttgatggaggcgttcgccgggctgcccagggacctcaacttcatccagcacacgagccacctgggctggaagataaagaagcgggcgctgccggtgatcctggacacggcgctgtacgaggacgggagggcggagctgatccgcccggtgaacatctccaccaacctcaggaggctgcccacggcattcaagctcttcacagggtcggcgtggacgatgctgtcgcgggcgttcgcggagtacgtgacgatggggtgggacgacaacctgccgcggacgctgctgctgtaccacgccaacatcgtctcctcgcccgagttctacttccagacggtggcctgcaactcgcgccggttccgcaacgccacggtcaaccacgacctgcacttcatccgctgggacaccccgcccaagcagcacccgctctacctcaccgccagggactaccgccggatgctgctcagcggggccgccttcgcgcgcaagttcagggacggcgaccccgtgctgggaccgcatcgacagggacatcctccgccgccgggaccccgccgcccancnttctacggcggctggtgctccgaggccggcgaccaaaacggcggcgccgcgctctgctccaacccgcaggagcccgggaggcgcggggccgtcaagcccggcgccgggtccaggcggctcaaggccatgctcaggaagacgctgtcgccgaggaatttcaggaggcagcagtgtaggtaggggaactgttctgttatgttctgatcaaacaaacaggtcgttgactcaattttgtatgtatagaaaaggcagatctgaaacgcatcaaagcggcccaaagccaattttgttcagttgattcgcacaagtctgaattgaattgtagtagggagatactcctggtggttgatcatctcatacacggaataataatggaaggggcattatgt

SEQ ID NO: 3764 - protein, 257 aa, Zea mays subsp. mays
  peptide (1)..(257): Ceres Seq. ID no. 12423919
  misc_feature (199)..(199): Xaa is any aa, unknown or other
  misc_feature (200)..(200): Xaa is any aa, unknown or other
MDRLFLNFGGCRFDGGVRRAAQGPQLHPAHEPPGLEDKEAGAAGDPGHGAVRGREGGADPPGEHLHQPQEAAHGIQALHRVGVDDAVAGVRGVRDDGVGRQPAADAAAVPRQHRLLARVLLPDGGLQLAPVPQRHGQPRPALHPLGHPAQAAPALPHRQGLPPDAAQRGRLRAQVQGRRPRAGTASTGTSSAAGTPPPXXLRRLVLRGRRPKRRRRALLQPAGAREARGRQARRRVQAAQGHAQEDAVAEEFQEAAV

SEQ ID NO: 3765 - protein, 245 aa, Zea mays subsp. mays
  peptide (1)..(245): Ceres Seq. ID no. 12423920
  misc_feature (186)..(186): Xaa is any aa, unknown or other
MEAFAGLPRDLNFIQHTSHLGWKIKKRALPVILDTALYEDGRAELIRPVNISTNLRRLPTAFKLFTGSAWTMLSRAFAEYVTMGWDDNLPRTLLLYHANIVSSPEFYFQTVACNSRRFRNATVNHDLHFIRWDTPPKQHPLYLTARDYRRMLLSGAAFARKFRDGDPVLGPHRQGHPPPPGPRRPXFYGGWCSEAGDQNGGAALCSNPQEPGRRGAVKPGAGSRRLKAMLRKTLSPRNFRRQQCR

SEQ ID NO: 3766 - protein, 186 aa, Zea mays subsp. mays
  peptide (1)..(186): Ceres Seq. ID no. 12423921
MVMRARAMGLSSIRREVLVSAVFTALLVASILLLPSLLLTGAGPIRWPSLSPSKDAGIGEEEEQQARYPVTFAYLISASTGDASRAARLLAALYHPGNSYLLHLDREAPAEEHRRLAELVSGRGVYARAGNVWIVGRPNLVTYRGPTMLTTTLHAVAVLLRLRRRWDWFINLSASDYPLVTQDGTL

SEQ ID NO: 3767 - DNA, 1191 bp, Zea mays subsp. mays
  misc_feature (1)..(1191): Ceres Seq. ID no. 12410095
  misc_feature (1)..(1191): Ortholog of  Ceres SEQ ID NO 15172958 as cited in SEQ ID NO 51206
  misc_feature (1)..(1191): Ortholog of  Ceres SEQ ID NO 15171139 as cited in SEQ ID NO 60093
acaccgcccgcacaccccaccggccggccacacaggcaccgacagcgactcggagatgacggccgggcagcttctgcgcaccgagccatcggcccagccccagcgggtgcgccacagcaccccgccggcggcactccaagcgggcatcgtgccgtcgtacccgccgcccgagtcggacggtgacgagtcgtgggtctggtcccagatcaaggcggaggcgcggcgcgacgcggacgcggagccggcgctggcctccttcctctacgcgacggtgctgtcgcacgcgtccctggaccggtccctggccttccacctggccaacaagctgtgctcctccacgctgctgtcgacgctcctctacgacctcttcgtggcgtcgctcgcggagcacccgtccgtccgcgccgcggccggtggccgacctgatcgccgcgcggtcgcgggacccggcctgcgcgggcttcgcgcactgcctcctcaactacaaggggttcctggccgtgcaggcgcaccgcgtggcgcacgtgctgtgggcgcagggccggcgcgcgctggcgctggcgctccagtcccgcgtcgccgaggtcttcgccgtggacatccacccggccgccaccgtcggcaggggcatcctgctggaccacgccacgggcgtcgtcgtcggggagacggccgtcgtgggcgacaacgtctccatactccaccacgtgacgctgggcggcaccggcaaggcggtgggcgaccggcaccccaagatcggggacggcgtgctcatcggcgccggcgcgaccgtcctgggcaacgtcaggatcggcgccggcgccaaggtcggcgccgggtccgtcgtgctcatcgacgtgccgcccaggagcaccgccgtggggaaccccgccaggctgatcggcgggaagaagggcgaggaggtgatgccgggggagtccatggaccacacctccttcatacagcagtggtcggactacatcatttgagcccgcaagctagaaaaaaaagagctcgtcttgctactgttgttatactgctgttgcgttttctgtgtatgtgcgtgcctgtgtggctgtgttagctgtatgctcttgttccagtgaggtgaaccgtggacatgctggtgtccagaaagatgtgttcaaagttcgctctgtaattttcgaagcgaatgaacagtgtttacgg

SEQ ID NO: 3768 - protein, 360 aa, Zea mays subsp. mays
  peptide (1)..(360): Ceres Seq. ID no. 12410096
HRPHTPPAGHTGTDSDSEMTAGQLLRTEPSAQPQRVRHSTPPAALQAGIVPSYPPPESDGDESWVWSQIKAEARRDADAEPALASFLYATVLSHASLDRSLAFHLANKLCSSTLLSTLLYDLFVASLAEHPSVRAAAGGRPDRRAVAGPGLRGLRALPPQLQGVPGRAGAPRGARAVGAGPARAGAGAPVPRRRGLRRGHPPGRHRRQGHPAGPRHGRRRRGDGRRGRQRLHTPPRDAGRHRQGGGRPAPQDRGRRAHRRRRDRPGQRQDRRRRQGRRRVRRAHRRAAQEHRRGEPRQADRREEGRGGDAGGVHGPHLLHTAVVGLHHLSPQARKKRARLATVVILLLRFLCMCVPVWLC

SEQ ID NO: 3769 - protein, 342 aa, Zea mays subsp. mays
  peptide (1)..(342): Ceres Seq. ID no. 12410097
MTAGQLLRTEPSAQPQRVRHSTPPAALQAGIVPSYPPPESDGDESWVWSQIKAEARRDADAEPALASFLYATVLSHASLDRSLAFHLANKLCSSTLLSTLLYDLFVASLAEHPSVRAAAGGRPDRRAVAGPGLRGLRALPPQLQGVPGRAGAPRGARAVGAGPARAGAGAPVPRRRGLRRGHPPGRHRRQGHPAGPRHGRRRRGDGRRGRQRLHTPPRDAGRHRQGGGRPAPQDRGRRAHRRRRDRPGQRQDRRRRQGRRRVRRAHRRAAQEHRRGEPRQADRREEGRGGDAGGVHGPHLLHTAVVGLHHLSPQARKKRARLATVVILLLRFLCMCVPVWLC

SEQ ID NO: 3770 - DNA, 1015 bp, Zea mays subsp. mays
  misc_feature (1)..(1015): Ceres Seq. ID no. 12595679
  misc_feature (1)..(1015): Ortholog of  Ceres SEQ ID NO 12610385 as cited in SEQ ID NO 55938
  misc_feature (1)..(1015): Ortholog of  Ceres SEQ ID NO 15178805 as cited in SEQ ID NO 0
agcttcgtcatttccggcgccctcctcctttcctttatctctctccccacgcccccacgtttcgccccccatttcgaagcccaccgaattccctgcgattcctctcccctcgcctcctcgtctccccctaggggatcgtcggagaggaatcgcaaagagggccgtctcatccgagttaaggaagccatggagcacaaggaggctgggtgccaggcccccgagggacccatcctctgcatcaataactgtggcttcttcggcagcgcggcgaccatgaacatgtgctccaagtgccacaaggagatgataacgaagcaggatcaggccaagctggctgcctcctctatcgacagcatcgtgaacggcagcgacgccgtcatggagccggttgttgctggcagcaacacgggtagtagctgttgcccaagttgagttgcaaacaatgaacgtgcagcagcccgctggatgttgccggacccagccgagggggtggcggcgatctccaaaggggggaaggtagggccgaaccggtgcagcgcctgcaggaagagggttggacttacgggattcaactgccggtgtgggaacttgtactgcgcactccaccgctactccgacaagcacgactgcaagttcgactaccggactgctgccagggacgccattgccaaggctaatccggtggtgaaggcagacaagctcgacaagatctagggggggttccctacggttgggtatcaggaagattgtaaaccgcggtaactcgtcatgcggaactgctgccttgccccccgcgcctttctcttccatgtttgctgctacaatcttgttgttgggcattgcagtgcacggtgcacacttgtgtagcccgcctcgagaattcctgcctctgcatctggtcagttctaaaatgatttgcatgttggctatgttgtgtaagctctatttatggtggtctcgctgagacgggtatttggcttcgcagttatctagctatgtgatgtactgttgtctt

SEQ ID NO: 3771 - protein, 143 aa, Zea mays subsp. mays
  peptide (1)..(143): Ceres Seq. ID no. 12595680
SFVISGALLLSFISLPTPPRFAPHFEAHRIPCDSSPLASSSPPRGSSERNRKEGRLIRVKEAMEHKEAGCQAPEGPILCINNCGFFGSAATMNMCSKCHKEMITKQDQAKLAASSIDSIVNGSDAVMEPVVAGSNTGSSCCPS

SEQ ID NO: 3772 - protein, 91 aa, Zea mays subsp. mays
  peptide (1)..(91): Ceres Seq. ID no. 12595681
ASSFPAPSSFPLSLSPRPHVSPPISKPTEFPAIPLPSPPRLPLGDRRRGIAKRAVSSELRKPWSTRRLGARPPRDPSSASITVASSAARRP

SEQ ID NO: 3773 - protein, 82 aa, Zea mays subsp. mays
  peptide (1)..(82): Ceres Seq. ID no. 12595682
MLPDPAEGVAAISKGGKVGPNRCSACRKRVGLTGFNCRCGNLYCALHRYSDKHDCKFDYRTAARDAIAKANPVVKADKLDKI

SEQ ID NO: 3774 - protein, 81 aa, Zea mays subsp. mays
  peptide (1)..(81): Ceres Seq. ID no. 12595683
MEHKEAGCQAPEGPILCINNCGFFGSAATMNMCSKCHKEMITKQDQAKLAASSIDSIVNGSDAVMEPVVAGSNTGSSCCPS

SEQ ID NO: 3775 - DNA, 770 bp, Zea mays subsp. mays
  misc_feature (1)..(770): Ceres Seq. ID no. 12403056
  misc_feature (1)..(770): Ortholog of  Ceres SEQ ID NO 14313370 as cited in SEQ ID NO 67252
cagacttgcgcgcgcctccgctgctgcgacggcgagcccaagaaaaaatttcctctacgagcgcatggaggtgtccgctgggctccggccgccgcccgtcgctgcggcagcgtcgctccttggctgtcggtccgcgtcggtgccgccgcgcgtggcggcttcccattcggtgcggtccgtgtcccgcgcggttaagatcagagcagctgcaattaacggcctccaaagaaacagaagtaatttcgaatcattattccgctacgacaaatctgtccccgagcaggacattggagaaccatctggtctaaatctggaaaagaagaatgtcggggacaagcctccctgctcaagctgtgaagctaaaggtgccttgctgtgtgcaacgtgcgctggttcaggcttgtacgtcgactcgatactagagagccagggaatcatcgtgaaagtcagatgcctaggttgcggtggaactgggaacatcatgtgctccaaatgtggaggccgtgggcatacatgaacgcaaaagcttgcaccttgcagatcaaaggagttgactctatggagaattttctgtgttacatgttacggtgtgctgagctagctgctgtagctacatcgagacatgcttttattttgttcccctcattccgtgcttaaaagcatgatgcgtcataggatttcatgtgatgttgtaatcgtaaaggtgtaatggtatgtgaaagacacacttcgttcatggaggagaatgagagattaaattcagttgtgcc

SEQ ID NO: 3776 - protein, 171 aa, Zea mays subsp. mays
  peptide (1)..(171): Ceres Seq. ID no. 12403057
RLARASAAATASPRKNFLYERMEVSAGLRPPPVAAAASLLGCRSASVPPRVAASHSVRSVSRAVKIRAAAINGLQRNRSNFESLFRYDKSVPEQDIGEPSGLNLEKKNVGDKPPCSSCEAKGALLCATCAGSGLYVDSILESQGIIVKVRCLGCGGTGNIMCSKCGGRGHT

SEQ ID NO: 3777 - protein, 150 aa, Zea mays subsp. mays
  peptide (1)..(150): Ceres Seq. ID no. 12403058
MEVSAGLRPPPVAAAASLLGCRSASVPPRVAASHSVRSVSRAVKIRAAAINGLQRNRSNFESLFRYDKSVPEQDIGEPSGLNLEKKNVGDKPPCSSCEAKGALLCATCAGSGLYVDSILESQGIIVKVRCLGCGGTGNIMCSKCGGRGHT

SEQ ID NO: 3778 - protein, 101 aa, Zea mays subsp. mays
  peptide (1)..(101): Ceres Seq. ID no. 12403059
DLRAPPLLRRRAQEKISSTSAWRCPLGSGRRPSLRQRRSLAVGPRRCRRAWRLPIRCGPCPARLRSEQLQLTASKETEVISNHYSATTNLSPSRTLENHLV

SEQ ID NO: 3779 - DNA, 733 bp, Zea mays subsp. mays
  misc_feature (1)..(733): Ceres Seq. ID no. 12345910
  misc_feature (1)..(733): Ortholog of  Ceres SEQ ID NO 12636928 as cited in SEQ ID NO 0
ataaagcagatagagcgggcaacatcgcagatatatatatatatatatatatagagagagagagagagagagagagagagagaggcaaactggagaggccgaggctgatggtttccaaggagcagaataagcgaggagctttgcatgagaagctcaagattctccgcagcgttactcactctcatgcgggggataaagtgtccataatagcggacgcgtcatcgtacatcaaggaactaaagcagaagatcgcgaagctaagccaagagatggcatcgtcgtctccgcagcacgccactactggtgtctgccaacaacaacggtcgtcgtcgtcggtgagtgtgggagtcctggacaagaagggccgtttcctcgtcagtgtgttcatggacgagagctgcggcccgccgccggccgggctactcgcttccgtcctcgaggccttcgacgacatcggactcacggtgcttgaggctagggctacctgcgctggttcctttcggctagaagctgtaggagaggaagtagtagatgggggcctcatcatcgacgcgcacgcggtggagcaagcagtagttcaggcaatcaagaattgccctgcaaattaaactaatcgacctagtcctccaattcgatcgatcgagttgacgatgcgctggtggtgtagcacaaagttcatgccaagagactccgagctatatatacatactgattcgcatcgtactttttgaag

SEQ ID NO: 3780 - protein, 201 aa, Zea mays subsp. mays
  peptide (1)..(201): Ceres Seq. ID no. 12345911
KADRAGNIADIYIYIYIERERERERERGKLERPRLMVSKEQNKRGALHEKLKILRSVTHSHAGDKVSIIADASSYIKELKQKIAKLSQEMASSSPQHATTGVCQQQRSSSSVSVGVLDKKGRFLVSVFMDESCGPPPAGLLASVLEAFDDIGLTVLEARATCAGSFRLEAVGEEVVDGGLIIDAHAVEQAVVQAIKNCPAN

SEQ ID NO: 3781 - protein, 166 aa, Zea mays subsp. mays
  peptide (1)..(166): Ceres Seq. ID no. 12345912
MVSKEQNKRGALHEKLKILRSVTHSHAGDKVSIIADASSYIKELKQKIAKLSQEMASSSPQHATTGVCQQQRSSSSVSVGVLDKKGRFLVSVFMDESCGPPPAGLLASVLEAFDDIGLTVLEARATCAGSFRLEAVGEEVVDGGLIIDAHAVEQAVVQAIKNCPAN

SEQ ID NO: 3782 - protein, 112 aa, Zea mays subsp. mays
  peptide (1)..(112): Ceres Seq. ID no. 12345913
MASSSPQHATTGVCQQQRSSSSVSVGVLDKKGRFLVSVFMDESCGPPPAGLLASVLEAFDDIGLTVLEARATCAGSFRLEAVGEEVVDGGLIIDAHAVEQAVVQAIKNCPAN

SEQ ID NO: 3783 - DNA, 1032 bp, Zea mays subsp. mays
  misc_feature (1)..(1032): Ceres Seq. ID no. 12403846
  misc_feature (1)..(1032): Ortholog of  Ceres SEQ ID NO 14315223 as cited in SEQ ID NO 52527
  misc_feature (1)..(1032): Ortholog of  Ceres SEQ ID NO 14303324 as cited in SEQ ID NO 54563
  misc_feature (1)..(1032): Ortholog of  Ceres SEQ ID NO 14307085 as cited in SEQ ID NO 54749
  misc_feature (1)..(1032): Ortholog of  Ceres SEQ ID NO 13595569 as cited in SEQ ID NO 56778
  misc_feature (1)..(1032): Ortholog of  Ceres SEQ ID NO 14316404 as cited in SEQ ID NO 57641
  misc_feature (1)..(1032): Ortholog of  Ceres SEQ ID NO 14308575 as cited in SEQ ID NO 58782
  misc_feature (1)..(1032): Ortholog of  Ceres SEQ ID NO 12611159 as cited in SEQ ID NO 59821
  misc_feature (1)..(1032): Ortholog of  Ceres SEQ ID NO 15180029 as cited in SEQ ID NO 0
gcacgagaccattacctagaacatcctaatcgaaaaccaccacatctaatccttcctcccagctggtccctgcggccgctgctgctcgtccctacaagtatatcaaccaacagtgctcacatcatgcactctgtggtgtcttggtagtagttgttggggtagctagctagagagagcagcaggccagcacagcagcatggggaggtcgccgtgctgcgagaaggcgcacacgaacaagggcgcctggaccaaggaggaggaccagcggctcgtcgcctacatcaaggcccacggcgaaggctgctggaggtcgctccccaaggccgcgggcctgctgcgctgcggcaagagctgccgcctccggtggatcaactacctgcgccccgacctcaagcgcggcaacttcacccaggaggaggacgacgtcatcatcaagctccaccaggtcctcggaaacaagtggtcgctgatcgccgcccagctgccggggcggacggacaacgagatcaagaactactggaacacgcacatcaagcgcaagctcatcgcccggggcatcgacccacggacgcaccagccggcgagtgccgccgcagttgcccccgccgccgccgcgcaaagcagctttcgccaccatggcgacgacgaggcggtggcgcggcgcagctgctcgcgagacagcggctgcatcgcggcgcacagcagcgacgacgacgacagcacgtccgggtccctgccacaccaacatgctgtcggcggcatcgacctcaacctctcgctaagcccaccgacgagccaaccgtcatcgccggccgccgccaagggagttgtagctagcggatatggccaagggagtgagagctagctgtacctcctctgcactgccacgatgatggttgtcaattgttgttagctcctcctcctcgtcttatgttcttccatgcaggccggaagatcctaaagagaacgtgtgcgtgcgtgtgagaattaaactcgtgtctgttgttcgatcgggcgctctaagatttggcc

SEQ ID NO: 3784 - protein, 222 aa, Zea mays subsp. mays
  peptide (1)..(222): Ceres Seq. ID no. 12403847
MGRSPCCEKAHTNKGAWTKEEDQRLVAYIKAHGEGCWRSLPKAAGLLRCGKSCRLRWINYLRPDLKRGNFTQEEDDVIIKLHQVLGNKWSLIAAQLPGRTDNEIKNYWNTHIKRKLIARGIDPRTHQPASAAAVAPAAAAQSSFRHHGDDEAVARRSCSRDSGCIAAHSSDDDDSTSGSLPHQHAVGGIDLNLSLSPPTSQPSSPAAAKGVVASGYGQGSES

SEQ ID NO: 3785 - DNA, 1152 bp, Zea mays subsp. mays
  misc_feature (1)..(1152): Ceres Seq. ID no. 12362891
  misc_feature (1)..(1152): Ortholog of  Ceres SEQ ID NO 13595084 as cited in SEQ ID NO 56095
  misc_feature (1)..(1152): Ortholog of  Ceres SEQ ID NO 13594252 as cited in SEQ ID NO 57528
  misc_feature (1)..(1152): Ortholog of  Ceres SEQ ID NO 14305682 as cited in SEQ ID NO 59267
  misc_feature (1)..(1152): Ortholog of  Ceres SEQ ID NO 14315060 as cited in SEQ ID NO 60039
  misc_feature (1)..(1152): Ortholog of  Ceres SEQ ID NO 13597809 as cited in SEQ ID NO 64598
  misc_feature (1)..(1152): Ortholog of  Ceres SEQ ID NO 14313544 as cited in SEQ ID NO 68424
  misc_feature (1)..(1152): Ortholog of  Ceres SEQ ID NO 12617960 as cited in SEQ ID NO 69051
  misc_feature (1)..(1152): Ortholog of  Ceres SEQ ID NO 13589401 as cited in SEQ ID NO 0
  misc_feature (1)..(1152): Ortholog of  Ceres SEQ ID NO 15179361 as cited in SEQ ID NO 0
atatatctttttctccccaagaaaaaaaaggcggcgagagcataagaaaaaaacacacacacacacacacacacaaagcgcacttttcaaatcgacaaaggggaaaggttcgcttcttctcgcatcttgctttacttcgagtgccatggccgatccggcggaggagaacgttgtctcgccgccaccgacccctgcggccccagccgtgggcgcctcagactcgcccctgcagcctgttgctgacggcgcctcaacggagaaggtgtctgccccggcgccggaggtaaggtcccggggattcaggcttcttggagaggacacttccgtgcacaaatcccttgggggcggtaaaactgctgacgttctgttatggaaagacaagaaaacttctgctgttgtaataggcggcgcaactgtcatctgggttctgttcgaagtgcttgattaccacctcctgaccctgatatcccatgtactgattggtgtgcttgccaccttattcctgtggtccaaagcaaccacgttcatcaagaagagtccaccggatattccagtagtgcaggtatctgaggaccttgttgtgaatgtttcacgggcattacggaatgacatcaacagagcgcttcacttgttccgtgagatcgcaatggggcatgatctgaagaagtttttgggtgtgatcgtgggtctgtgggttctctccggagttggaagcagctgtgacttcctcacgttgacatacattgccgtcctgatgctccacacggtgccaatcttgtacgacaagtaccaggacaaggtggaccatgtcgctggaagggcacacaccgaggccctcaagcagtacaaggtgctggatgccaaggtcctgagcaaaatccccaggggtgcggtcaaatccaaaaagcagaactagttaggataagccgcagattgtgaatgcccgtatcatgagtatcgggcttgtggtttgcatggcatatgtaaatctgtctgttggcttcagcttggttcttctgcgactactttgttgatgttattatagtcctatgtatgtactgtgtacatgacagatgttcggacgtctcggctactgctgtagcttgtaaattccagtggtgcgttgctaagcacgatgctccccttgttttg

SEQ ID NO: 3786 - protein, 304 aa, Zea mays subsp. mays
  peptide (1)..(304): Ceres Seq. ID no. 12362892
YIFFSPRKKRRREHKKKTHTHTHTQSALFKSTKGKGSLLLASCFTSSAMADPAEENVVSPPPTPAAPAVGASDSPLQPVADGASTEKVSAPAPEVRSRGFRLLGEDTSVHKSLGGGKTADVLLWKDKKTSAVVIGGATVIWVLFEVLDYHLLTLISHVLIGVLATLFLWSKATTFIKKSPPDIPVVQVSEDLVVNVSRALRNDINRALHLFREIAMGHDLKKFLGVIVGLWVLSGVGSSCDFLTLTYIAVLMLHTVPILYDKYQDKVDHVAGRAHTEALKQYKVLDAKVLSKIPRGAVKSKKQN

SEQ ID NO: 3787 - protein, 256 aa, Zea mays subsp. mays
  peptide (1)..(256): Ceres Seq. ID no. 12362893
MADPAEENVVSPPPTPAAPAVGASDSPLQPVADGASTEKVSAPAPEVRSRGFRLLGEDTSVHKSLGGGKTADVLLWKDKKTSAVVIGGATVIWVLFEVLDYHLLTLISHVLIGVLATLFLWSKATTFIKKSPPDIPVVQVSEDLVVNVSRALRNDINRALHLFREIAMGHDLKKFLGVIVGLWVLSGVGSSCDFLTLTYIAVLMLHTVPILYDKYQDKVDHVAGRAHTEALKQYKVLDAKVLSKIPRGAVKSKKQN

SEQ ID NO: 3788 - DNA, 1075 bp, Zea mays subsp. mays
  misc_feature (1)..(1075): Ceres Seq. ID no. 12372530
  misc_feature (1)..(1075): Ortholog of  Ceres SEQ ID NO 12608945 as cited in SEQ ID NO 51209
  misc_feature (1)..(1075): Ortholog of  Ceres SEQ ID NO 14314534 as cited in SEQ ID NO 52434
  misc_feature (1)..(1075): Ortholog of  Ceres SEQ ID NO 14308640 as cited in SEQ ID NO 60489
  misc_feature (1)..(1075): Ortholog of  Ceres SEQ ID NO 12619999 as cited in SEQ ID NO 66123
  misc_feature (1)..(1075): Ortholog of  Ceres SEQ ID NO 13656436 as cited in SEQ ID NO 69154
aaacccataaaaaatactgtattttccaaccaagccactcgcccgaccttcatccgcattccacgcgcactccgctgcctcactccgagactccgccgctgcttccaacttccgttgcgcacgagcgaaacatccggagctagcaagggaggaggaggaggaggcgatggcggggggcggggataaggtggactacgtcttcaaggtggtgctcatcggcgactccgctgtcggcaagtcgcagatccttgcgcgcttcgcccgcaacgagtttagcctcgactcgaaggccaccattggggtcgagttccagactcggacgctcgtcatcgaacacaagtccgtcaaggcgcagatctgggacaccgccgggcaggagaggtatagagctgtcacaagtgcctactacagaggtgctttgggagctctgctagtctatgatatcacaaaacgccagagcttcgaccacatacctcgctggctggaagagcttcggggccatgctgacaaaaacattgtgatcatgctggttggcaacaagagcgacctcgaagacgagcgtgccgtaagcaccgaggacgccaaggagtttgccgagaaggagaacctcttcttccttgagacctccgcgctgcaggcgaccaatgtagaaaatgccttccagaccgtcttgacagagatctttaagatccacagcaagaagaacatggcagcggacccaagggccaatggggccgcaccatcgctggcagggaagaaggtcatcgtcccaggcccagctcaggagatccctaagagcaagtgctgcagttccatgtgacatgttgcctgaattttatttgggtttgttcgtgtccgaggtattctcagcatctttgtggatgtataatactggaataggcttagatttgaattgctggttaacttgattttcggttttgaagggaccgatatcgtagtttagatttgtcacccgtcttcaagatgacgaggatagggagcgagaagaaaacatatgtttgcatagactttgttggattttacaaaaatagcagtgtaagcacattattttttc

SEQ ID NO: 3789 - protein, 217 aa, Zea mays subsp. mays
  peptide (1)..(217): Ceres Seq. ID no. 12372531
MAGGGDKVDYVFKVVLIGDSAVGKSQILARFARNEFSLDSKATIGVEFQTRTLVIEHKSVKAQIWDTAGQERYRAVTSAYYRGALGALLVYDITKRQSFDHIPRWLEELRGHADKNIVIMLVGNKSDLEDERAVSTEDAKEFAEKENLFFLETSALQATNVENAFQTVLTEIFKIHSKKNMAADPRANGAAPSLAGKKVIVPGPAQEIPKSKCCSSM

SEQ ID NO: 3790 - DNA, 777 bp, Zea mays subsp. mays
  misc_feature (1)..(777): Ceres Seq. ID no. 12342769
  misc_feature (1)..(777): Ortholog of  Ceres SEQ ID NO 15172961 as cited in SEQ ID NO 51757
  misc_feature (1)..(777): Ortholog of  Ceres SEQ ID NO 15173213 as cited in SEQ ID NO 57923
  misc_feature (1)..(777): Ortholog of  Ceres SEQ ID NO 13660855 as cited in SEQ ID NO 67670
gggcaactcgaagaagccgcgtgcgttatcctttgagcagtttgggcgctgagcaagtccagtgagagagggagagcggcgagaggatggctgggatggcatcgctgcagggcgccatggcgtcgctctccatctccgcgctaggcgcggcgacggcgagcagcagcagcttctggggcaaccggctcgccacctactccgcgccgcagcctggggtaaggtttatggtcaagatatgcccaattgaaatgagacttaagagatgggagcgaaagaagtgtaaaccaaacagtcttcctgtgctgcacaagatgcatgttaggatcggggacacggtacaggttattgcaggccgtgagaaaggaaaggttggagaagtcacacgccttttcaagcacaacagcacggtgatcgtgaaggacctgaacttgaagtcgaagcacaagaaaggcacagacgatgaacccggtgaaatcgtcatgattgaaggccccattcatagctcaaatgtgatgctctactctaaggagaagagtgtggtaagcagggttggccacaaattcctggaggacgggaccaaggtccgatacctggtcaagaccggtgaagtaatcgacagtgttgagaagtgggtaaaggtttttaaggaaggaaattcggagtaacagttttagcatgaaaacctgcaaaatgctctgaacgctgactgcgtcttgcatgttgaattgagcctgtttatccctctatgttgttatttacgccagtttttccccctgt

SEQ ID NO: 3791 - protein, 192 aa, Zea mays subsp. mays
  peptide (1)..(192): Ceres Seq. ID no. 12342770
MAGMASLQGAMASLSISALGAATASSSSFWGNRLATYSAPQPGVRFMVKICPIEMRLKRWERKKCKPNSLPVLHKMHVRIGDTVQVIAGREKGKVGEVTRLFKHNSTVIVKDLNLKSKHKKGTDDEPGEIVMIEGPIHSSNVMLYSKEKSVVSRVGHKFLEDGTKVRYLVKTGEVIDSVEKWVKVFKEGNSE

SEQ ID NO: 3792 - protein, 189 aa, Zea mays subsp. mays
  peptide (1)..(189): Ceres Seq. ID no. 12342771
MASLQGAMASLSISALGAATASSSSFWGNRLATYSAPQPGVRFMVKICPIEMRLKRWERKKCKPNSLPVLHKMHVRIGDTVQVIAGREKGKVGEVTRLFKHNSTVIVKDLNLKSKHKKGTDDEPGEIVMIEGPIHSSNVMLYSKEKSVVSRVGHKFLEDGTKVRYLVKTGEVIDSVEKWVKVFKEGNSE

SEQ ID NO: 3793 - protein, 182 aa, Zea mays subsp. mays
  peptide (1)..(182): Ceres Seq. ID no. 12342772
MASLSISALGAATASSSSFWGNRLATYSAPQPGVRFMVKICPIEMRLKRWERKKCKPNSLPVLHKMHVRIGDTVQVIAGREKGKVGEVTRLFKHNSTVIVKDLNLKSKHKKGTDDEPGEIVMIEGPIHSSNVMLYSKEKSVVSRVGHKFLEDGTKVRYLVKTGEVIDSVEKWVKVFKEGNSE

SEQ ID NO: 3794 - DNA, 674 bp, Zea mays subsp. mays
  misc_feature (1)..(674): Ceres Seq. ID no. 12353693
  misc_feature (1)..(674): Ortholog of  Ceres SEQ ID NO 15173170 as cited in SEQ ID NO 64240
gatttcgtgtccctgcagccacggccaccgcccaatctccacttctttatcttctccgaggtgagagagcccaggcgatccaattccaccctcgttctcaggcactgtcacacagacacagctgacctgccactgccaggaaagtaggtcgaggatgccccgcagcggcttctcggggtccttcaggtcgcccaagatcgacgtcgtcatcgacatgggaaaccccttcctcaaccgcaccgtcgacggcttcctcaagatcggcgccgtcggcgcctgcaaggtggctgccgaggagaccttcgagtgcctccacaggggggatgtttcgaagcacaaggttgagcatgccctgaggaagatgtgcaaggagggcgcatattggggcactgttgctggagtttatgtgggcatggtgtacggcgtggaaagggtccgtggccgcagtgactggaagaacgcgatgatcgggggcgccttgtccggcgccctgatctccggcgccagcaacagcgacagaggcaaggtcgtcaaggacgccatcaccgccggcgcggtcgccacagccgtcgagttcatcaactgcattacctagccgagcaaggagcaactgcatttgcagtgccattgtcgtgcaaaaatatgaataaagtacttcgtcatgtccagttcat

SEQ ID NO: 3795 - protein, 146 aa, Zea mays subsp. mays
  peptide (1)..(146): Ceres Seq. ID no. 12353694
MPRSGFSGSFRSPKIDVVIDMGNPFLNRTVDGFLKIGAVGACKVAAEETFECLHRGDVSKHKVEHALRKMCKEGAYWGTVAGVYVGMVYGVERVRGRSDWKNAMIGGALSGALISGASNSDRGKVVKDAITAGAVATAVEFINCIT

SEQ ID NO: 3796 - protein, 126 aa, Zea mays subsp. mays
  peptide (1)..(126): Ceres Seq. ID no. 12353695
MGNPFLNRTVDGFLKIGAVGACKVAAEETFECLHRGDVSKHKVEHALRKMCKEGAYWGTVAGVYVGMVYGVERVRGRSDWKNAMIGGALSGALISGASNSDRGKVVKDAITAGAVATAVEFINCIT

SEQ ID NO: 3797 - protein, 77 aa, Zea mays subsp. mays
  peptide (1)..(77): Ceres Seq. ID no. 12353696
MCKEGAYWGTVAGVYVGMVYGVERVRGRSDWKNAMIGGALSGALISGASNSDRGKVVKDAITAGAVATAVEFINCIT

SEQ ID NO: 3798 - DNA, 1029 bp, Zea mays subsp. mays
  misc_feature (1)..(1029): Ceres Seq. ID no. 13564872
  misc_feature (1)..(1029): Ortholog of  Ceres SEQ ID NO 14311229 as cited in SEQ ID NO 53262
ctcgcaccaccaccgtcactcaacacagcacaggcagctcgagagagagagagaaagatgtcgtggttcgggcaccaccaccacaaccagccggctcccccggcgtcgggccccaaccaggtgttcaagatcttctgccgcgccaacgagaactactgcctggccgtccgcgacggcgccgtcgtgctggccccggtcaaccccaaggacgaccaccagcactggtacaaggacatgcgcttcagcacccgggtcaaggacgaggaaggcatgccggcgttcgcgctcgtcaacaaggccacggggctcgccatcaagcactccctcggccagtcccacccggtcaagctcgcgcctttcagcccggaccaggaggacgcgtcggtgctgtggacggagagcaaggacgtgggcaagggcttccgctgcatccgcatggtcaacaacacccgcctcaacttcgacgccttccacggcgacaaggaccacggcggcgtgcacgacggcaccaccgtggtgctgtgggagtgggccaagggcgacaaccagagctggaagatcctgccctggggcgacgaggcctacgccgggggcggcancagcgccgccaacgcgccccgcttcggcggcggcgagcccaccgtccgcatntactgcaaggccgacgaagggttcagcgccacggtccgcaacggcgccgtgtgcctcgcgcccaccaacccgcgcgacgagtaccagcactggatcaaggacatgcgccacatcaacagcgtcaaggacgaggaagggtacccggccttcgcgctcgtcaacagggtcaccggcgaggccatcaagcactccctgtgtgtttgtgtttagttccagtcgtttgtgaggaagtcagttatgtttgagtgagaggggtacttcgctcttcggttaactctgtacttgtcatgaggagagttttcatacccggagtgtagaactctgtactgtactcggatccttcctttttcatccaagtgggttttattttatcaaccg

SEQ ID NO: 3799 - protein, 297 aa, Zea mays subsp. mays
  peptide (1)..(297): Ceres Seq. ID no. 13564873
  misc_feature (199)..(199): Xaa is any aa, unknown or other
  misc_feature (217)..(217): Xaa is any aa, unknown or other
RTTTVTQHSTGSSREREKDVVVRAPPPQPAGSPGVGPQPGVQDLLPRQRELLPGRPRRRRRAGPGQPQGRPPALVQGHALQHPGQGRGRHAGVRARQQGHGARHQALPRPVPPGQARAFQPGPGGRVGAVDGEQGRGQGLPLHPHGQQHPPQLRRLPRRQGPRRRARRHHRGAVGVGQGRQPELEDPALGRRGLRRGRXQRRQRAPLRRRRAHRPHXLQGRRRVQRHGPQRRRVPRAHQPARRVPALDQGHAPHQQRQGRGRVPGLRARQQGHRRGHQALPVCLCLVPVVCEEVSYV

SEQ ID NO: 3800 - protein, 291 aa, Zea mays subsp. mays
  peptide (1)..(291): Ceres Seq. ID no. 13564874
  misc_feature (200)..(200): Xaa is any aa, unknown or other
  misc_feature (217)..(217): Xaa is any aa, unknown or other
SHHHRHSTQHRQLERERERCRGSGTTTTTSRLPRRRAPTRCSRSSAAPTRTTAWPSATAPSCWPRSTPRTTTSTGTRTCASAPGSRTRKACRRSRSSTRPRGSPSSTPSASPTRSSSRLSARTRRTRRCCGRRARTWARASAASAWSTTPASTSTPSTATRTTAACTTAPPWCCGSGPRATTRAGRSCPGATRPTPGAAXAPPTRPASAAASPPSAXTARPTKGSAPRSATAPCASRPPTRATSTSTGSRTCATSTASRTRKGTRPSRSSTGSPARPSSTPCVFVFSSSRL

SEQ ID NO: 3801 - protein, 286 aa, Zea mays subsp. mays
  peptide (1)..(286): Ceres Seq. ID no. 13564875
  misc_feature (200)..(200): Xaa is any aa, unknown or other
  misc_feature (217)..(217): Xaa is any aa, unknown or other
LAPPPSLNTAQAARERERKMSWFGHHHHNQPAPPASGPNQVFKIFCRANENYCLAVRDGAVVLAPVNPKDDHQHWYKDMRFSTRVKDEEGMPAFALVNKATGLAIKHSLGQSHPVKLAPFSPDQEDASVLWTESKDVGKGFRCIRMVNNTRLNFDAFHGDKDHGGVHDGTTVVLWEWAKGDNQSWKILPWGDEAYAGGGXSAANAPRFGGGEPTVRXYCKADEGFSATVRNGAVCLAPTNPRDEYQHWIKDMRHINSVKDEEGYPAFALVNRVTGEAIKHSLCVCV

SEQ ID NO: 3802 - protein, 267 aa, Zea mays subsp. mays
  peptide (1)..(267): Ceres Seq. ID no. 13564876
  misc_feature (181)..(181): Xaa is any aa, unknown or other
  misc_feature (198)..(198): Xaa is any aa, unknown or other
MSWFGHHHHNQPAPPASGPNQVFKIFCRANENYCLAVRDGAVVLAPVNPKDDHQHWYKDMRFSTRVKDEEGMPAFALVNKATGLAIKHSLGQSHPVKLAPFSPDQEDASVLWTESKDVGKGFRCIRMVNNTRLNFDAFHGDKDHGGVHDGTTVVLWEWAKGDNQSWKILPWGDEAYAGGGXSAANAPRFGGGEPTVRXYCKADEGFSATVRNGAVCLAPTNPRDEYQHWIKDMRHINSVKDEEGYPAFALVNRVTGEAIKHSLCVCV

SEQ ID NO: 3803 - DNA, 901 bp, Zea mays subsp. mays
  misc_feature (1)..(901): Ceres Seq. ID no. 12342757
  misc_feature (1)..(901): Ortholog of  Ceres SEQ ID NO 13639250 as cited in SEQ ID NO 56555
  misc_feature (1)..(901): Ortholog of  Ceres SEQ ID NO 15177034 as cited in SEQ ID NO 60024
  misc_feature (1)..(901): Ortholog of  Ceres SEQ ID NO 13598257 as cited in SEQ ID NO 63008
  misc_feature (1)..(901): Ortholog of  Ceres SEQ ID NO 13597309 as cited in SEQ ID NO 63851
  misc_feature (1)..(901): Ortholog of  Ceres SEQ ID NO 12599167 as cited in SEQ ID NO 64443
aaccaacccactcatcactcctcactcactcactcaaaacgaaagccagctcagctcagctctgctcagctcatctgctcacacctcacacccacaggccggccgccacagcaccgcggatagcagagcggcagctaggtcggtcgtcgtcgtcgtcgtcagccatgagcaaggacaagcaccacaagcacgagcaccacctgcggcgttgctgcgggtgcatggcgtcgtgcctcctggcgctggtcctcatcgtggccttcgtctcgctggtggtgtacctggcgctgcgcccctcgaagccgtccttctacctgcaggacctgcagctgcgcaggcccatctcgctgggcgacccgtcgctgacggcgtcggcgcaggtgacgctggcctcccgcaaccccaacgaccgcgtgggcatcttctacaagcgcctggacgtgttcgtcacctaccgcgacgaggccgtgacggtgcccgtgtctctgccgccgcagtaccagggccaccgcgacttcaccgtctggtcccccgtgctgtcggccgagtccgtgcccgtggccgcctacgtcgccgacgccatgaagcaggacgtcgccgcgggcttcgtcgcgctgcaggtcaaggtggacggccgcgtcaagtggaaggtcggcagctgggtctccggcagctaccacctcttcgtcagctgccccgccgtgctctccgcgggctaccccggcgtcaacaacaccgtgtcgtcgctcaagttcgcccagcccacaggatgcagcgtcgaggtgtgagtttgtgaccaaacaagtgccctgccctgccccctacgtattgttgcgtgctactcaaatttcatcttttgggtgcgacggccgccgttaactgggctcttttaattttgtcc

SEQ ID NO: 3804 - protein, 264 aa, Zea mays subsp. mays
  peptide (1)..(264): Ceres Seq. ID no. 12342758
TNPLITPHSLTQNESQLSSALLSSSAHTSHPQAGRHSTADSRAAARSVVVVVVSHEQGQAPQARAPPAALLRVHGVVPPGAGPHRGLRLAGGVPGAAPLEAVLLPAGPAAAQAHLAGRPVADGVGAGDAGLPQPQRPRGHLLQAPGRVRHLPRRGRDGARVSAAAVPGPPRLHRLVPRAVGRVRARGRLRRRRHEAGRRRGLRRAAGQGGRPRQVEGRQLGLRQLPPLRQLPRRALRGLPRRQQHRVVAQVRPAHRMQRRGVSL

SEQ ID NO: 3805 - protein, 261 aa, Zea mays subsp. mays
  peptide (1)..(261): Ceres Seq. ID no. 12342759
PTHSSLLTHSLKTKASSAQLCSAHLLTPHTHRPAATAPRIAERQLGRSSSSSSAMSKDKHHKHEHHLRRCCGCMASCLLALVLIVAFVSLVVYLALRPSKPSFYLQDLQLRRPISLGDPSLTASAQVTLASRNPNDRVGIFYKRLDVFVTYRDEAVTVPVSLPPQYQGHRDFTVWSPVLSAESVPVAAYVADAMKQDVAAGFVALQVKVDGRVKWKVGSWVSGSYHLFVSCPAVLSAGYPGVNNTVSSLKFAQPTGCSVEV

SEQ ID NO: 3806 - protein, 207 aa, Zea mays subsp. mays
  peptide (1)..(207): Ceres Seq. ID no. 12342760
MSKDKHHKHEHHLRRCCGCMASCLLALVLIVAFVSLVVYLALRPSKPSFYLQDLQLRRPISLGDPSLTASAQVTLASRNPNDRVGIFYKRLDVFVTYRDEAVTVPVSLPPQYQGHRDFTVWSPVLSAESVPVAAYVADAMKQDVAAGFVALQVKVDGRVKWKVGSWVSGSYHLFVSCPAVLSAGYPGVNNTVSSLKFAQPTGCSVEV

SEQ ID NO: 3807 - DNA, 1097 bp, Zea mays subsp. mays
  misc_feature (1)..(1097): Ceres Seq. ID no. 13494437
  misc_feature (1)..(1097): Ortholog of  Ceres SEQ ID NO 14304202 as cited in SEQ ID NO 56346
  misc_feature (1)..(1097): Ortholog of  Ceres SEQ ID NO 12613472 as cited in SEQ ID NO 60611
gcacgagaccattacctagaacatcctaatcgaaaaacagcgagtaccgagtaggagcaaccgcttgcgtcagacgcacactgacggagagtgatcactgatttctggtcatggcaaccgtaactgaggaagttgctccggtcgtcaccgtctccgaggagccggcgccggaagcggcgaaggaggtggtggagaagccggaggaggggaagaagcccgacgaggagggtgacgagaggaagaaggccgaccccgccgccgagaaggagaagaaggcgaggaagccgcggagcaggaagcccaagtccgccgggctgcaccacccgccctatttcgagatgatcaaggaggcgatcctgtcgcaggacggcgggaaggtcggggcgagcccgtacgcgatcgccaagcacatgggggagaagcaccgggacgtgctcccgcccaattaccgcaaggtgctggcagtgcagctgcgcggcttcgccgccaagggccgcctcgtcaaggtcaaggcttccttcaagctcgccgccgccgaggagaggaagccctccgcggccgcgaaggcgaagaagaaggcgtcggcgggaatggccaagcgcaagagggccgccgcgccggccaagaagaagccggcggccgctgcctcggcgccgtcgagggaggcacgtaaggtgcgcgcgaagcgagcgaggaaggtggccccggcgcccgcgcagcccaagcccaagccagcccgcgccgccgcttccggtgccggcaagaaggtcaacaaggccagcgcctgattagcggcggccgtcctggtccccccgcgcgcgcctccgtgtattatactagccggtagtagcagtaggagttgcaagtactagcagcgtggtagtcgtgatgatgttgtggtcgtcgtctccgccggcccgatcgatcgggcgctctgttccgccgtgtggcagagttttgtaaataactagtctggtgtgatgcgctcatggcaataaagcgcgcgcttctagcttccttgatgaaacatccatgatccattatcagtgcagtcttgtggttatcgtgttggttagttcgatcactggaactggctc

SEQ ID NO: 3808 - protein, 225 aa, Zea mays subsp. mays
  peptide (1)..(225): Ceres Seq. ID no. 13494438
MATVTEEVAPVVTVSEEPAPEAAKEVVEKPEEGKKPDEEGDERKKADPAAEKEKKARKPRSRKPKSAGLHHPPYFEMIKEAILSQDGGKVGASPYAIAKHMGEKHRDVLPPNYRKVLAVQLRGFAAKGRLVKVKASFKLAAAEERKPSAAAKAKKKASAGMAKRKRAAAPAKKKPAAAASAPSREARKVRAKRARKVAPAPAQPKPKPARAAASGAGKKVNKASA

SEQ ID NO: 3809 - protein, 149 aa, Zea mays subsp. mays
  peptide (1)..(149): Ceres Seq. ID no. 13494439
MIKEAILSQDGGKVGASPYAIAKHMGEKHRDVLPPNYRKVLAVQLRGFAAKGRLVKVKASFKLAAAEERKPSAAAKAKKKASAGMAKRKRAAAPAKKKPAAAASAPSREARKVRAKRARKVAPAPAQPKPKPARAAASGAGKKVNKASA

SEQ ID NO: 3810 - protein, 125 aa, Zea mays subsp. mays
  peptide (1)..(125): Ceres Seq. ID no. 13494440
MGEKHRDVLPPNYRKVLAVQLRGFAAKGRLVKVKASFKLAAAEERKPSAAAKAKKKASAGMAKRKRAAAPAKKKPAAAASAPSREARKVRAKRARKVAPAPAQPKPKPARAAASGAGKKVNKASA

SEQ ID NO: 3811 - DNA, 986 bp, Zea mays subsp. mays
  misc_feature (1)..(986): Ceres Seq. ID no. 12368544
  misc_feature (1)..(986): Ortholog of  Ceres SEQ ID NO 12613415 as cited in SEQ ID NO 67713
acagaccacgccacgttcgcaattacagagatctagagagagagagagagagagggcagatctacgctagagcgacagagccacaactaaccgagagggacagtccagtatggtggtggcgctcgggcccggccggttctacggcagcggcctgccgaggccgcgcttcttcccgggcgaccgcgtggacccgccggcgtccgtcaccgacccgctgctcgagtgggcgcgcgaagcgcactggtccatgggcggcatcagcgtgaagcgcctccgcctgcagggccgcatcgagggctccgtcgacaagctccgccgccgcgcgcaccgcgatgccagggtcaaggccaaggccaaggcccgcgccgctggccacatgccggcttcgctcgccgcgcttgggtccgacgacgacgcctccagcggcgactccgaggacgagcaggaggtggcggcgcgggagcgggccctgaagcgtgagcttgtcgacgacgacgaggactccgacgggtccggcgagtcggaggaggacgagcccctcgcggccatcgtcaccgccgccaagaagaggcgcgcgaggaagctcagcgacgagttcgaccgcatcgccgcggagcagcagcagcagctggtgttggagagcaagcagaagccgggtgccgcgacgccggcgacgacgtcaacaaagaggaaggctaccgtgccgagggcttcgccaaagaggaaggcttctgtacccgctgctggggcgccggcgaggttgtcgccaaagaggaaggctgctgcaacagccgcggcgcccttgtcggcggctgggtcaaggaggacctcgccgaggaataagcactgagtggtggtcgccgtatgtgctgctctagttcctgatctgtttcttggcgatcgtggagtcctgaaaatgtattgtgtggttgggtgtctactgctggattgaaacgatgatgaaatggaatcgaattgatggttat

SEQ ID NO: 3812 - protein, 246 aa, Zea mays subsp. mays
  peptide (1)..(246): Ceres Seq. ID no. 12368545
MVVALGPGRFYGSGLPRPRFFPGDRVDPPASVTDPLLEWAREAHWSMGGISVKRLRLQGRIEGSVDKLRRRAHRDARVKAKAKARAAGHMPASLAALGSDDDASSGDSEDEQEVAARERALKRELVDDDEDSDGSGESEEDEPLAAIVTAAKKRRARKLSDEFDRIAAEQQQQLVLESKQKPGAATPATTSTKRKATVPRASPKRKASVPAAGAPARLSPKRKAAATAAAPLSAAGSRRTSPRNKH

SEQ ID NO: 3813 - protein, 200 aa, Zea mays subsp. mays
  peptide (1)..(200): Ceres Seq. ID no. 12368546
MGGISVKRLRLQGRIEGSVDKLRRRAHRDARVKAKAKARAAGHMPASLAALGSDDDASSGDSEDEQEVAARERALKRELVDDDEDSDGSGESEEDEPLAAIVTAAKKRRARKLSDEFDRIAAEQQQQLVLESKQKPGAATPATTSTKRKATVPRASPKRKASVPAAGAPARLSPKRKAAATAAAPLSAAGSRRTSPRNKH

SEQ ID NO: 3814 - protein, 157 aa, Zea mays subsp. mays
  peptide (1)..(157): Ceres Seq. ID no. 12368547
MPASLAALGSDDDASSGDSEDEQEVAARERALKRELVDDDEDSDGSGESEEDEPLAAIVTAAKKRRARKLSDEFDRIAAEQQQQLVLESKQKPGAATPATTSTKRKATVPRASPKRKASVPAAGAPARLSPKRKAAATAAAPLSAAGSRRTSPRNKH

SEQ ID NO: 3815 - DNA, 1240 bp, Zea mays subsp. mays
  misc_feature (1)..(1240): Ceres Seq. ID no. 12403575
  misc_feature (1)..(1240): Ortholog of  Ceres SEQ ID NO 15177561 as cited in SEQ ID NO 53065
  misc_feature (1)..(1240): Ortholog of  Ceres SEQ ID NO 14309715 as cited in SEQ ID NO 55353
  misc_feature (1)..(1240): Ortholog of  Ceres SEQ ID NO 13595521 as cited in SEQ ID NO 59840
tggatggttggaacggacaaccgtggaggatatggacattgctgttagggcacatctccatggctggaagtttatattcctgaatgacgttgagtgccagtgcgaattgcccgagtcttatgaggcttacaggaagcagcagcatcggtggcattcgggtccaatgcagctattcaggctttgtttaccggacatcatcaaatgcaagattgcattttggaagaaggcgaacctgatattccttttcttcctgctccggaagctcatactgcctttctactccttcacgctgttctgcatcatcctcccgatgacgatgttcgtgccggaggccgagctccccgactgggtggtgtgctacgtcccggccctgatgtccctgctgaacatcctgccgtcccccaagtcgttccccttcatcatcccgtacctgctcttcgagaacaccatgtccgtgaccaagttcaacgcgatgatctccgggctgttccagctggggagcgcgtacgagtgggtggtaccaagaagtcgggccgctcgtcggagggcgacctcatcgcgctggccccgcccaaggagcccgtgaagcttcacgcgacgaggacgggctccgcgccgaacctcgacgccgtcgccaaggaggagcacctggcggcggcatcgaggaaggacgctgccgccgccgccgccaccgtgaagaagaagaaggagaagcacaaccggatatacaagaaggagctggcgctgtcgatgctgctcctgaccgcggccgcccggagcctgctgtcgaagcagggcatacacttctacttcctcctgttccagggcgtgtccttcttgctagtaggccttgacctcataggcgagcaggtcgagtgaaatgtgtaaaacaggaaattgataggtgtggggaaaaaaaaacggtgagtcaccatggatggaagtgctgggagaggagggggatgtgttatttctggctggctgccatggcacggcggcatggcatggcatggcagcagctcttgggcgcttcttggctgagattcggaacatgcgttgtgcggttgagccttcccggatctgtcctggctgcacggcatggtatcccacacgtgaggagagcaacctcctccgcctgtacggaggtgtagatacagttttctcttgttttttcatgtgtgtgggcctgttcgcctgtacgaatggtgaaggtaaacagagagtcgccgctggattaggg

SEQ ID NO: 3816 - protein, 225 aa, Zea mays subsp. mays
  peptide (1)..(225): Ceres Seq. ID no. 12403576
MQDCILEEGEPDIPFLPAPEAHTAFLLLHAVLHHPPDDDVRAGGRAPRLGGVLRPGPDVPAEHPAVPQVVPLHHPVPALREHHVRDQVQRDDLRAVPAGERVRVGGTKKSGRSSEGDLIALAPPKEPVKLHATRTGSAPNLDAVAKEEHLAAASRKDAAAAAATVKKKKEKHNRIYKKELALSMLLLTAAARSLLSKQGIHFYFLLFQGVSFLLVGLDLIGEQVE

SEQ ID NO: 3817 - protein, 194 aa, Zea mays subsp. mays
  peptide (1)..(194): Ceres Seq. ID no. 12403577
GWLERTTVEDMDIAVRAHLHGWKFIFLNDVECQCELPESYEAYRKQQHRWHSGPMQLFRLCLPDIIKCKIAFWKKANLIFLFFLLRKLILPFYSFTLFCIILPMTMFVPEAELPDWVVCYVPALMSLLNILPSPKSFPFIIPYLLFENTMSVTKFNAMISGLFQLGSAYEWVVPRSRAARRRATSSRWPRPRSP

SEQ ID NO: 3818 - protein, 184 aa, Zea mays subsp. mays
  peptide (1)..(184): Ceres Seq. ID no. 12403578
MDIAVRAHLHGWKFIFLNDVECQCELPESYEAYRKQQHRWHSGPMQLFRLCLPDIIKCKIAFWKKANLIFLFFLLRKLILPFYSFTLFCIILPMTMFVPEAELPDWVVCYVPALMSLLNILPSPKSFPFIIPYLLFENTMSVTKFNAMISGLFQLGSAYEWVVPRSRAARRRATSSRWPRPRSP

SEQ ID NO: 3819 - DNA, 1146 bp, Zea mays subsp. mays
  misc_feature (1)..(1146): Ceres Seq. ID no. 12368495
  misc_feature (1)..(1146): Ortholog of  Ceres SEQ ID NO 13595341 as cited in SEQ ID NO 56398
  misc_feature (1)..(1146): Ortholog of  Ceres SEQ ID NO 15173764 as cited in SEQ ID NO 57550
  misc_feature (1)..(1146): Ortholog of  Ceres SEQ ID NO 15227118 as cited in SEQ ID NO 59038
  misc_feature (1)..(1146): Ortholog of  Ceres SEQ ID NO 13597299 as cited in SEQ ID NO 63785
  misc_feature (1)..(1146): Ortholog of  Ceres SEQ ID NO 13663895 as cited in SEQ ID NO 66923
gcacgagaccattacctagaacatcctaatcgaaaagaaacaaaaaacattcggggacgcgcctgcttgcttctttccccaaaccccaaaccgcaggtaggaagcaaaccgcacgccccgctccagaacggatcctcatctctcacgttgtcaccacagtctgaatccagaatccaactagtagctccataaaagcggcaatgatccagctgctgttcgtcgtgctggtggcggaggcgtccctgacggcggcgctgctcttcaagacgccgctgcggaagctcgccgtgctagtgatcgaccggctcaagcgcggccgccacgcgcccgtcgtcgtcaagacggtcgcgggcgtcatccttgccctgctcgcttcaacgctctacagcatgacacagatcgccggcagcacgagcgactccgactctggcggcgggcccacccccaccgaccaggtgctcttctcgcgtcacctcctggaggcgtgcctcatggggtactccttatttcttgctctagtgattgaccggctccaccaatacatcagagatttgcgccggtttaaaaaggacttagaggctgtacgtaagcataataaaatgttggaggaggcaaaacatggaaactcggaggaggcaaagaaataccaggaagagattgccactctgaacaaggagatgaagaaactgaagctacaagtccaagaaaagacagaagaggtccatgtttcagaggacaaggcacttgctatccaaaaacaatccgaaggcttgctgactgaatatgaccgcctgctggaggataatcagcatcttcggacacagctgctgtcaattgaccgcaggctttccaactcttcttgaacgaagagtctatttaggggatgctgaagaatttctgtggaagatcatgttaccacccaaagtgtatggcagctacctgcttcctcacttgttagtcttagcatcttcaattaactagctattgcattatattgttggcaaaactagtgcaagcattatatggtctagaactttggagtttctcttgtgtgtttcttgtaatgcctactttttatgtgtgcttatagtgattactgttttgaacagaattttatgattattgcagacgggcattcacatgttg

SEQ ID NO: 3820 - protein, 220 aa, Zea mays subsp. mays
  peptide (1)..(220): Ceres Seq. ID no. 12368496
MIQLLFVVLVAEASLTAALLFKTPLRKLAVLVIDRLKRGRHAPVVVKTVAGVILALLASTLYSMTQIAGSTSDSDSGGGPTPTDQVLFSRHLLEACLMGYSLFLALVIDRLHQYIRDLRRFKKDLEAVRKHNKMLEEAKHGNSEEAKKYQEEIATLNKEMKKLKLQVQEKTEEVHVSEDKALAIQKQSEGLLTEYDRLLEDNQHLRTQLLSIDRRLSNSS

SEQ ID NO: 3821 - protein, 157 aa, Zea mays subsp. mays
  peptide (1)..(157): Ceres Seq. ID no. 12368497
MTQIAGSTSDSDSGGGPTPTDQVLFSRHLLEACLMGYSLFLALVIDRLHQYIRDLRRFKKDLEAVRKHNKMLEEAKHGNSEEAKKYQEEIATLNKEMKKLKLQVQEKTEEVHVSEDKALAIQKQSEGLLTEYDRLLEDNQHLRTQLLSIDRRLSNSS

SEQ ID NO: 3822 - protein, 123 aa, Zea mays subsp. mays
  peptide (1)..(123): Ceres Seq. ID no. 12368498
MGYSLFLALVIDRLHQYIRDLRRFKKDLEAVRKHNKMLEEAKHGNSEEAKKYQEEIATLNKEMKKLKLQVQEKTEEVHVSEDKALAIQKQSEGLLTEYDRLLEDNQHLRTQLLSIDRRLSNSS

SEQ ID NO: 3823 - DNA, 897 bp, Zea mays subsp. mays
  misc_feature (1)..(897): Ceres Seq. ID no. 12365275
  misc_feature (1)..(897): Ortholog of  Ceres SEQ ID NO 14309365 as cited in SEQ ID NO 0
aaagcattgaagcaaagaaccctgcaactgcaacaagccctgacgcttaatacatcggccggcactcgatcggcagcagatcaaagatggcggcggaggagggggagaaggcgaagagcggcggcggcgggcagcagatgacggtggtgcgggggctggacgtggcgcggtacatggggcggtggtacgagatcgcgtcgttcccgtccttcttccagccgcgggacggccgcgacacgcgcgccacctaccggctgctggaggacggcgccacggtgcacgtgctcaacgagacgtggagcaagggcaagcgcgactacatcgagggcacggcctacaaggccgaccccggcagcgacgaggccaagctcaaggtcaagttctacctcccgcccttcctccccatcgtccccgtcgtcggcgactactgggtgctctacgtcgacgatgactaccagtacgcgctcgtcggcgagccgcgccgcaagaacctctggatcctgtgcaggaagacgagcatcgacgaggacgtgtacaaccagctggtggagcgggccaaggaggaaggctacgacgtgagcaagctgcacaggacgccgcaggacgacccgccgccggagagcgacgccgcgcccaccgacaccaagggggtgtggtggttcaagtcgctcttcgggaaatgactgcccgtcaccgcacgcgcgcgtgctccggtactgtgcttgcagttgcagcaaataaaaccaggcctgagtgagtgaggattggtattttagctttgtagtatctgtctcgctatctgtgtgtgtggaactgtggactgtgctgttacgttatacgtgcatgtatttttaagatttctctagctaattgcatcgatcggcgaggtagtcacgc

SEQ ID NO: 3824 - protein, 198 aa, Zea mays subsp. mays
  peptide (1)..(198): Ceres Seq. ID no. 12365276
MAAEEGEKAKSGGGGQQMTVVRGLDVARYMGRWYEIASFPSFFQPRDGRDTRATYRLLEDGATVHVLNETWSKGKRDYIEGTAYKADPGSDEAKLKVKFYLPPFLPIVPVVGDYWVLYVDDDYQYALVGEPRRKNLWILCRKTSIDEDVYNQLVERAKEEGYDVSKLHRTPQDDPPPESDAAPTDTKGVWWFKSLFGK

SEQ ID NO: 3825 - protein, 181 aa, Zea mays subsp. mays
  peptide (1)..(181): Ceres Seq. ID no. 12365277
MTVVRGLDVARYMGRWYEIASFPSFFQPRDGRDTRATYRLLEDGATVHVLNETWSKGKRDYIEGTAYKADPGSDEAKLKVKFYLPPFLPIVPVVGDYWVLYVDDDYQYALVGEPRRKNLWILCRKTSIDEDVYNQLVERAKEEGYDVSKLHRTPQDDPPPESDAAPTDTKGVWWFKSLFGK

SEQ ID NO: 3826 - protein, 169 aa, Zea mays subsp. mays
  peptide (1)..(169): Ceres Seq. ID no. 12365278
MGRWYEIASFPSFFQPRDGRDTRATYRLLEDGATVHVLNETWSKGKRDYIEGTAYKADPGSDEAKLKVKFYLPPFLPIVPVVGDYWVLYVDDDYQYALVGEPRRKNLWILCRKTSIDEDVYNQLVERAKEEGYDVSKLHRTPQDDPPPESDAAPTDTKGVWWFKSLFGK

SEQ ID NO: 3827 - DNA, 970 bp, Zea mays subsp. mays
  misc_feature (1)..(970): Ceres Seq. ID no. 12365291
  misc_feature (1)..(970): Ortholog of  Ceres SEQ ID NO 13594573 as cited in SEQ ID NO 51220
aatgactcctcttttagcggcgagagactgagagcttggctcaacgcgtcctcggcttctgtggaaggccattccatgcgctccgtgtagccagccattcggtacaaccaactaccctagaagtaacttttcttttcttttttgctctcgagatggatccggttggccccttcctcgtcgcctctataagaagcatccccacacgttctctccacccatcactgcagctcaaacacaaagcagcatcacactgactccactgctctgcctccataataagcacagaagcgccccaataatcagcagcgcaggagcgagcgatcgctatggctcagggaagaggcagtgcgacgcgggggcttgccctcggcagcctactcgccgccgctttcctcctcctcctcggcgtcgccgacgcggccacccacagggtcgactggtccttcaacgcggacagctggtccaagggcaagagcttccgtgccggcgacgtcctcgagttcaactacgacccctccgtgcacaacgtggtggccgtggacgccggcggctacaacggctgccggccctccggcacgtcgtacggctccgggagcgaccgcatcacgctcggccccggcaccagctatttcatctgcagcctcaacgggcactgcgggatggggatgaagatggtcgtcaacgccagctgagcacgacgcttatatgttagtactgcaaaaatatatgggctagtggtggtccgatagatcgtgcaagaactcaatcgtgtgcatactcgtaccgtgtgttcgatggacacggttcatgtgttgtgtatgcatgcgactgctggtaggtcaggcatgatgtacgtgtggctgatggcgtgttagtaaagcgtcctgcagctttgttgttactttgttcgatcgaagcagcggcttcttttgtttgttcatcaataacatctttcattaaattttttttt

SEQ ID NO: 3828 - protein, 121 aa, Zea mays subsp. mays
  peptide (1)..(121): Ceres Seq. ID no. 12365292
MAQGRGSATRGLALGSLLAAAFLLLLGVADAATHRVDWSFNADSWSKGKSFRAGDVLEFNYDPSVHNVVAVDAGGYNGCRPSGTSYGSGSDRITLGPGTSYFICSLNGHCGMGMKMVVNAS

SEQ ID NO: 3829 - DNA, 1029 bp, Zea mays subsp. mays
  misc_feature (1)..(1029): Ceres Seq. ID no. 12403756
  misc_feature (1)..(1029): Ortholog of  Ceres SEQ ID NO 12634256 as cited in SEQ ID NO 0
gcacgagaccattacctagaacatcctaatcgaaaaagactatcatgtctcggtactgcgtcaacgagcagtcgagcacccggcctcatcctgcctcggcaggcagttggcacggcagcaccccagcaggcagcagcccctccaatttaaagcaagcaacgacgggcaaagagcagctcggcgggggctgctgcagcgccgcgcgtttgcgagtccgggacgacgacatggggaggggccgcagcgagataaagcggatcgagaacccgacgcagcggcagtccaccttctacaagcgcagggacgggctcttcaagaaggcaagggagctcgccgtcctgtgcgacgtcgacctgctgctgctcctcttctccggctccgggaagctgtaccactacctctcgcccaccgtgcccactgtcaaggacctggtcgagaggtacgaggccgcgacgcacagcaaggtctgggccgacgttcgccaggagcggcgcgcggagctggagaaggcggagcggatgtgcgagctcatggagaaggagctgcggttcatgacggtggacgacggggagcagtacacggtgccgtcgctggagctgctggagcacagcctggaggcggccgtgcacagggtgcgctccgagaaggaccgcaagatcggcggcgagatcgactgcctccagaacattatcagaggacgccacgaggagcgctacgggttgtgcgacaagcttgctcattctcaggcctggaacaacggcggggaaggtggagggtcgaccccaccaagcggcggcggcggcctggaactcaaactgggtttcaactgacgctggctggcttggaagctcgaggatggatcgaagactatgagctccttcattgtgccctgtcaggctacctacccctgcaccctgttggttatggtttaaaatggttattgaccaaagttgtcctgcatcaaacaaggctcagcttgatgttaatgtgctgagggatctaatgtattattagcgttatccagctctt

SEQ ID NO: 3830 - protein, 261 aa, Zea mays subsp. mays
  peptide (1)..(261): Ceres Seq. ID no. 12403757
MSRYCVNEQSSTRPHPASAGSWHGSTPAGSSPSNLKQATTGKEQLGGGCCSAARLRVRDDDMGRGRSEIKRIENPTQRQSTFYKRRDGLFKKARELAVLCDVDLLLLLFSGSGKLYHYLSPTVPTVKDLVERYEAATHSKVWADVRQERRAELEKAERMCELMEKELRFMTVDDGEQYTVPSLELLEHSLEAAVHRVRSEKDRKIGGEIDCLQNIIRGRHEERYGLCDKLAHSQAWNNGGEGGGSTPPSGGGGLELKLGFN

SEQ ID NO: 3831 - protein, 200 aa, Zea mays subsp. mays
  peptide (1)..(200): Ceres Seq. ID no. 12403758
MGRGRSEIKRIENPTQRQSTFYKRRDGLFKKARELAVLCDVDLLLLLFSGSGKLYHYLSPTVPTVKDLVERYEAATHSKVWADVRQERRAELEKAERMCELMEKELRFMTVDDGEQYTVPSLELLEHSLEAAVHRVRSEKDRKIGGEIDCLQNIIRGRHEERYGLCDKLAHSQAWNNGGEGGGSTPPSGGGGLELKLGFN

SEQ ID NO: 3832 - DNA, 790 bp, Zea mays subsp. mays
  misc_feature (1)..(790): Ceres Seq. ID no. 12404755
  misc_feature (1)..(790): Ortholog of  Ceres SEQ ID NO 15172900 as cited in SEQ ID NO 51859
gccttcaaccatcgttagagtttccttggtagtttttttccctcttgtcacagcaccccccacccacacacacccaaggccccaactgcagtgcccatccggcagacaggtcgatggcggcggaagcagcggcagcggggaaggagaagatgcggacgctagtcagcagcgacttcaagaagttcgatgtggaggagtctgtggcgagggaatcgctgattatcctgaacctgatggcggactgcgacgacagtgacatcccggtcttcaacgtcaacgccaatatcctcgacaaggtcatcgcgtactgcaggaagcacgcctcggcgccgcgcgccgatggcggtgatgcggagccaagtgctgcgagtaacaaggcctcagcggacgatctcaagtcctttgatgctgagttcgtcgatgttgacctggtcaccctcttggagctcattaaggctgcagactacctggagatcaatgggctgctggacctgacctgccaggccgtcgcggacatgatcaaggggaagactccagaggagatacgcgagacattcgacatcgagaatgacttcacacctgaggaagaggctaaagtgaggagggagaatcagtgggcctttgaatgaagaagctgcaggctagctttttttttttctaacaaaacaatagcaatatcatataaccaggccagagatgaagtgcttgttcaggatgttatgagtcgaaggtttggttggtcgtgagcagactatattgctgttccagtattttggctggtttggttccc

SEQ ID NO: 3833 - protein, 171 aa, Zea mays subsp. mays
  peptide (1)..(171): Ceres Seq. ID no. 12404756
MAAEAAAAGKEKMRTLVSSDFKKFDVEESVARESLIILNLMADCDDSDIPVFNVNANILDKVIAYCRKHASAPRADGGDAEPSAASNKASADDLKSFDAEFVDVDLVTLLELIKAADYLEINGLLDLTCQAVADMIKGKTPEEIRETFDIENDFTPEEEAKVRRENQWAFE

SEQ ID NO: 3834 - protein, 159 aa, Zea mays subsp. mays
  peptide (1)..(159): Ceres Seq. ID no. 12404757
MRTLVSSDFKKFDVEESVARESLIILNLMADCDDSDIPVFNVNANILDKVIAYCRKHASAPRADGGDAEPSAASNKASADDLKSFDAEFVDVDLVTLLELIKAADYLEINGLLDLTCQAVADMIKGKTPEEIRETFDIENDFTPEEEAKVRRENQWAFE

SEQ ID NO: 3835 - protein, 131 aa, Zea mays subsp. mays
  peptide (1)..(131): Ceres Seq. ID no. 12404758
MADCDDSDIPVFNVNANILDKVIAYCRKHASAPRADGGDAEPSAASNKASADDLKSFDAEFVDVDLVTLLELIKAADYLEINGLLDLTCQAVADMIKGKTPEEIRETFDIENDFTPEEEAKVRRENQWAFE

SEQ ID NO: 3836 - DNA, 1268 bp, Zea mays subsp. mays
  misc_feature (1)..(1268): Ceres Seq. ID no. 12410087
  misc_feature (1)..(1268): Ortholog of  Ceres SEQ ID NO 13594176 as cited in SEQ ID NO 59144
agggagaaaaatagcaggccgccttgagctggcataggatgcgacggtccggcaggggcagggctcggcggtcgacggaggccaattctttaacttccttcctccgtcgatcatccagcaccagcaggagaatcccgtcgaatccccctccccaacccaagggagcgcgcgcgtatgcctcctccagatccaaagcaacaagcaacagacagcgaggggcaccggggtccgccgcatgtgtgtggttcatggaggatcatgctttcctgcttactgcattagctcctgacgcgccaccctcccctcgcgttcattgatttctgttataattactcacattattattggtaaagaaagatagggcaccgcttctaatttgatgggcattccgttaccgtctcaacgtcaacaacaggtcttttcagcggctcgggcaaaaggcgacaagtcagtgcagagaagatagtgtttgatctaaccccactacaggaacagaggctgcaaagtctgaaggaaaggctaaatgtgccatatgacgaaactcggacagatcatcaagaatcgcttagggctctatggaatgcctcctttcccgatacggagctcactagcttagtttcagaacagtggaaagacatggggtggcagggcgtgaacccagcaactgatttcaggggctgtgggtttgtttcgctcgagaaccttttgttttttgcaagaacatacccggcttctttcaagaggctgatgctgaagcagcaaggaatgcgaactacatgggagtacccatttgcggtcgcgggtgtaaacatctcatacatgctgattcaactgctggagctcaactcagggcgcccgaagtctttgccagggattaacttcatcaaagtgttgacagaacacgaggatgcgttcgacgtgctgtactgcatagcgttcgagatgatggacgcccagtggctagcaatgcgagcctcgtacatgcagttcaaagaggtgctggaggccacaaggcagcagctcgagagggagctctccctggaggatctcaatggcatccatgacctccctgcctgcaacctcttgtacaaatagtgctactggtacttagattatattactgggatgcagtcaaaggaaaatttgatcaggttacatcgtaaccagcatcatcagcctgtaaaaaagaaaaaggaaaagaaaaggagagaagggagacacacatctctggttgtcagtaattcacgtacgccacagttttgcccagg

SEQ ID NO: 3837 - protein, 152 aa, Zea mays subsp. mays
  peptide (1)..(152): Ceres Seq. ID no. 12410088
MGWQGVNPATDFRGCGFVSLENLLFFARTYPASFKRLMLKQQGMRTTWEYPFAVAGVNISYMLIQLLELNSGRPKSLPGINFIKVLTEHEDAFDVLYCIAFEMMDAQWLAMRASYMQFKEVLEATRQQLERELSLEDLNGIHDLPACNLLYK

SEQ ID NO: 3838 - protein, 115 aa, Zea mays subsp. mays
  peptide (1)..(115): Ceres Seq. ID no. 12410089
MLKQQGMRTTWEYPFAVAGVNISYMLIQLLELNSGRPKSLPGINFIKVLTEHEDAFDVLYCIAFEMMDAQWLAMRASYMQFKEVLEATRQQLERELSLEDLNGIHDLPACNLLYK

SEQ ID NO: 3839 - protein, 109 aa, Zea mays subsp. mays
  peptide (1)..(109): Ceres Seq. ID no. 12410090
MRTTWEYPFAVAGVNISYMLIQLLELNSGRPKSLPGINFIKVLTEHEDAFDVLYCIAFEMMDAQWLAMRASYMQFKEVLEATRQQLERELSLEDLNGIHDLPACNLLYK

SEQ ID NO: 3840 - DNA, 1233 bp, Zea mays subsp. mays
  misc_feature (1)..(1233): Ceres Seq. ID no. 12365333
  misc_feature (1)..(1233): Ortholog of  Ceres SEQ ID NO 13595704 as cited in SEQ ID NO 51001
  misc_feature (1)..(1233): Ortholog of  Ceres SEQ ID NO 13638279 as cited in SEQ ID NO 57674
  misc_feature (1)..(1233): Ortholog of  Ceres SEQ ID NO 15177534 as cited in SEQ ID NO 0
gatttagcatcgacacgatggttcaaagcaaaagggtctacatgcagcactcgctcgcttccctccgcctcgaatggtcacgccacccagaccctgcagcagcagttaatcgtcacgcccccatccttccccagcaaacacaacacaagcagacggggagagattcagatccactcgtcacacatccgcgttaccccctctcccttggtttcctctcccaccaccaacccccatcccggttatctccgccgccgcccgctttgggaaggcgcgacgaaggcaggcgagaggctccagccggacgaggaggaaagaggagcagcagggccggaggagagatgttcctgtgggactggttctacggggtgctggcctccctcggcctgtggcagaaggaggcgaagatcctcttcctctgcctcgacaacgccggcaagaccacgctgctccacatgctcaaggacgagcggttggtgcagcaccagccgacgcagcacccgacgtcggaggagctcagcatcggcaagatcaagttcaaggccttcgacctcggcggccaccagatcgcgcgccgcgtctggaaggattactacgcaaaggttgatgctgtagtatacctggtagatgcgtatgataaggagcgatttgctgaatcaaaaaaggagctggacgctctcctgtcagatgattccttggcaaatgttccatttctcatccttggcaacaagattgatatcccgtatgctgcctctgaagaggagctgcggtatcacctaggccttagcaacttcacaaccgggaagggcaaggtcaaccttggcgactccaatgtccggccacttgaggttttcatgtgcagtgttgttcgcaagatgggctacggcgatggtttcaagtgggtctcccaatacatcaagtagggcccttgccggggcgcttgctcagcccagcgatttttttgccttgttatttgttctggttggtatttcgtcacgtgaacgatgatcatcatatcatgacagtatcatggaggggtatgaagaggaaaaaacagtgcttaacattggggaacatgttgaatctttagcgtgaaaacattttgttatgtcagtcaaactcctggaattcttttgcttttccgtaggacctttactaaggacttccctgcgatgcattataagattattgattgcttaaattatgtgttatatatatggtggtggattggtactg

SEQ ID NO: 3841 - protein, 305 aa, Zea mays subsp. mays
  peptide (1)..(305): Ceres Seq. ID no. 12365334
FSIDTMVQSKRVYMQHSLASLRLEWSRHPDPAAAVNRHAPILPQQTQHKQTGRDSDPLVTHPRYPLSLGFLSHHQPPSRLSPPPPALGRRDEGRREAPAGRGGKRSSRAGGEMFLWDWFYGVLASLGLWQKEAKILFLCLDNAGKTTLLHMLKDERLVQHQPTQHPTSEELSIGKIKFKAFDLGGHQIARRVWKDYYAKVDAVVYLVDAYDKERFAESKKELDALLSDDSLANVPFLILGNKIDIPYAASEEELRYHLGLSNFTTGKGKVNLGDSNVRPLEVFMCSVVRKMGYGDGFKWVSQYIK

SEQ ID NO: 3842 - protein, 300 aa, Zea mays subsp. mays
  peptide (1)..(300): Ceres Seq. ID no. 12365335
MVQSKRVYMQHSLASLRLEWSRHPDPAAAVNRHAPILPQQTQHKQTGRDSDPLVTHPRYPLSLGFLSHHQPPSRLSPPPPALGRRDEGRREAPAGRGGKRSSRAGGEMFLWDWFYGVLASLGLWQKEAKILFLCLDNAGKTTLLHMLKDERLVQHQPTQHPTSEELSIGKIKFKAFDLGGHQIARRVWKDYYAKVDAVVYLVDAYDKERFAESKKELDALLSDDSLANVPFLILGNKIDIPYAASEEELRYHLGLSNFTTGKGKVNLGDSNVRPLEVFMCSVVRKMGYGDGFKWVSQYIK

SEQ ID NO: 3843 - protein, 292 aa, Zea mays subsp. mays
  peptide (1)..(292): Ceres Seq. ID no. 12365336
MQHSLASLRLEWSRHPDPAAAVNRHAPILPQQTQHKQTGRDSDPLVTHPRYPLSLGFLSHHQPPSRLSPPPPALGRRDEGRREAPAGRGGKRSSRAGGEMFLWDWFYGVLASLGLWQKEAKILFLCLDNAGKTTLLHMLKDERLVQHQPTQHPTSEELSIGKIKFKAFDLGGHQIARRVWKDYYAKVDAVVYLVDAYDKERFAESKKELDALLSDDSLANVPFLILGNKIDIPYAASEEELRYHLGLSNFTTGKGKVNLGDSNVRPLEVFMCSVVRKMGYGDGFKWVSQYIK

SEQ ID NO: 3844 - DNA, 1563 bp, Zea mays subsp. mays
  misc_feature (1)..(1563): Ceres Seq. ID no. 12410083
  misc_feature (1)..(1563): Ortholog of  Ceres SEQ ID NO 14306297 as cited in SEQ ID NO 56907
gtttacggattctttttctagcatttctcaattcttttttgttccggccccaatatgctctgtctcaaagtcaatttgcctacgagttcgaacgaaccgacaagaaggagcaatacacaagagagaagacaaggaatagcgccagcggcggccagggtgccgctcgatctctatgacttgttcttccctccctttcttcccttcacaaggttcctgaggcccgctttgagctgagatggattcgtcccagtagtgttctgggtgctcccgtttcttgatttcttccgaacttaggcattactgtttacagaatacgaccacaagattccggacactgtgttttgctcttctccgagtttgcactttgcttgatattccatttggaggagctgcgatgggctgtctgcaaacaaagcacgccagtcgatcgccgcacttgctggatacacgggaagctgtagcccttgctgctgaaacatcttgtgagaaagtggatcttccagattttgttaatattgctactggaacactgcggcgtgagaattgaattccatcttccataagaaagaggaatcaaacggttgctttcagatatactgccatgttttcctgcttacattcatgcctacctccttatttttttcccatattttttcggttaacaagcctagcgaaaacaccgtggcattgcaacttctctgactaactctgatacgcatgtattgttgtgtacttgtgttttgggtctagtttgttaagctccacctattgttgcagttacagtgagtgaagttgaagcactgcatgacctcttccggaaaataagtaattcagttatcagagataatctaattcacaaggaagaattccaacttgctctctttaggggcaagaagcagcaaaatctctttgttgatagggtatttgacttgtttgatcaaaaacgaaatggtgtaattgaatttggtgagtttgttcgatctcttggtgtgtttcatccagatgcaccagaagatcagaaagttgcatttgcatttaagttgtatgacttaaaacagacaggctttatagaacggcatgagttaaaggagatggtgctggctctgctggacgaatcagatttggatattgcgagcgacgctgtcgagatgattgttgacaggacatttgatcaggccgacacaaaaggtgatgggaagatagatcaggaagaatggactgaatatgctaaagacaatccatacgtgctgaggaatatgacccttccatacctcaaggacattactatggtattcccaagctttgtgatgcactcagaaatcagtgaaacagacatggctgtctaacctgaaaagtaactgcaaactcacagcttctctgcacagcctgatgtatattaatgatggaaccggaatcttttcatcaagaaaaggttaatttgcaaccttctctcgtgaacagaaatttgtggactggtgtaaatggtgggaataggaaaggtgttctgttatattaccgacaagcaaacgagcaatctagcatctatctgattgtcgttttcag

SEQ ID NO: 3845 - protein, 84 aa, Zea mays subsp. mays
  peptide (1)..(84): Ceres Seq. ID no. 12410084
MVLALLDESDLDIASDAVEMIVDRTFDQADTKGDGKIDQEEWTEYAKDNPYVLRNMTLPYLKDITMVFPSFVMHSEISETDMAV

SEQ ID NO: 3846 - protein, 65 aa, Zea mays subsp. mays
  peptide (1)..(65): Ceres Seq. ID no. 12410085
MIVDRTFDQADTKGDGKIDQEEWTEYAKDNPYVLRNMTLPYLKDITMVFPSFVMHSEISETDMAV

SEQ ID NO: 3847 - protein, 59 aa, Zea mays subsp. mays
  peptide (1)..(59): Ceres Seq. ID no. 12410086
MLCLKVNLPTSSNEPTRRSNTQERRQGIAPAAARVPLDLYDLFFPPFLPFTRFLRPALS

SEQ ID NO: 3848 - DNA, 1622 bp, Zea mays subsp. mays
  misc_feature (1)..(1622): Ceres Seq. ID no. 12407965
  misc_feature (1)..(1622): Ortholog of  Ceres SEQ ID NO 13594604 as cited in SEQ ID NO 52106
aaaacgcacccccaagctaccaacgcacgcaaagcacggacgggcgcatacagctttccctttcgcgagtgcgtgccccttctcttctctagttctcttctccgtcgcgtcagagatcagggagagaccagagcaaacaacaaccaccgcttgtttcatcaagaatcgtggaggagaaccgaaaggtgtagtagccttttccggtagggcatctgctagagccggccggttgaagcaggggagcgagaggaggagggcagccgagcaggagcatcgcagtggtggttaagcagcagcaacgacgacgacgacgacgctgagaggtttccccgttcccgacggcacgtccaccgaggcggcgccatcgcgatgggtcctctggcgccgctgaggtgtaacccgccgccgccgttctccaagtcgccggggtccctgctgctgctgtccaagtcgctcaccctctactgctgagccgagccccctcctcgatcggttccatgggcgccgtggcctcgtcggcgggtggggcccggggaggcgatggcacggtgctgggcgacctgccggagaactgcgtcgcggaggtgctgctcaggctggacccgctggagatctgccggatggcgcggctcagccgcacgttccgtggcgccgcgtccggggacggtgtctgggagtccaagctaccgaggaactacgcgcgcctcctcgccgttgctgcggccggcgatggggaaggtgggcaggccgccgcgtcggcgccgggggcagagctgctgcccaagaaggaactgtacgcgcggctttgccgtcggaaccgtttcgacggcggcaaaaaggagttctggctggacaagggcggtggaggtctatgtatgtcaatttcttcaagggcgctttcaataacaggcattgatgataggaggtattggaacttcattcccagtgatgaatcaagattccgcacggttgcgtacctctcgcaaatctggtggtttgaagtgagaggggaggttgaattcttcttcccagaaggcacgtacagcctattctaccgcattcatctcggccgaccattcaagcgtcttggccggcgagtctacagctcggagcacgtccacggctgggacatgaagccggtgcgtttccagatgtcgacctccgacggacagcatgttcagtccaagtgctacttgagcgatcccggtatctggatcaaccaccatgtcggggacttcgtcgtgaaggactcgagcaggccagtgaacatcaggttcgcgatgattcagatagactgcacgcacacgaaaggcggcctctgcgtggattcggtcgtggtgaaaccgcagcacctcgcgcagaaaaaagcgccctggacttacgtctagggaggagggatatgatccatagtttccttttggattgttctactaccagatgtgcgttttgtttacagaagtgcggttttttacatttgcacttatacgcgtattttgcagtcatgtaatgtaattgaaggggtaagtgatttttttagttcctcttgtcccccctaggaacatgttggacctctgtaaattgttcgtttgaactttgaaatgtacatcggctgtgttctgcct

SEQ ID NO: 3849 - protein, 296 aa, Zea mays subsp. mays
  peptide (1)..(296): Ceres Seq. ID no. 12407966
MGAVASSAGGARGGDGTVLGDLPENCVAEVLLRLDPLEICRMARLSRTFRGAASGDGVWESKLPRNYARLLAVAAAGDGEGGQAAASAPGAELLPKKELYARLCRRNRFDGGKKEFWLDKGGGGLCMSISSRALSITGIDDRRYWNFIPSDESRFRTVAYLSQIWWFEVRGEVEFFFPEGTYSLFYRIHLGRPFKRLGRRVYSSEHVHGWDMKPVRFQMSTSDGQHVQSKCYLSDPGIWINHHVGDFVVKDSSRPVNIRFAMIQIDCTHTKGGLCVDSVVVKPQHLAQKKAPWTYV

SEQ ID NO: 3850 - protein, 255 aa, Zea mays subsp. mays
  peptide (1)..(255): Ceres Seq. ID no. 12407967
MARLSRTFRGAASGDGVWESKLPRNYARLLAVAAAGDGEGGQAAASAPGAELLPKKELYARLCRRNRFDGGKKEFWLDKGGGGLCMSISSRALSITGIDDRRYWNFIPSDESRFRTVAYLSQIWWFEVRGEVEFFFPEGTYSLFYRIHLGRPFKRLGRRVYSSEHVHGWDMKPVRFQMSTSDGQHVQSKCYLSDPGIWINHHVGDFVVKDSSRPVNIRFAMIQIDCTHTKGGLCVDSVVVKPQHLAQKKAPWTYV

SEQ ID NO: 3851 - protein, 170 aa, Zea mays subsp. mays
  peptide (1)..(170): Ceres Seq. ID no. 12407968
MSISSRALSITGIDDRRYWNFIPSDESRFRTVAYLSQIWWFEVRGEVEFFFPEGTYSLFYRIHLGRPFKRLGRRVYSSEHVHGWDMKPVRFQMSTSDGQHVQSKCYLSDPGIWINHHVGDFVVKDSSRPVNIRFAMIQIDCTHTKGGLCVDSVVVKPQHLAQKKAPWTYV

SEQ ID NO: 3852 - DNA, 873 bp, Zea mays subsp. mays
  misc_feature (1)..(873): Ceres Seq. ID no. 12410079
  misc_feature (1)..(873): Ortholog of  Ceres SEQ ID NO 12557737 as cited in SEQ ID NO 81
caatgtcgcgtgcggccactagatttttcctgacgcggtgtctgctcccacttcccctcctctcccccaggtggcggcagcggcggcggggtagcatttgtgctacgagggcttttgcaatggcggcttcggggttcggcggcggcgaggcgccaaaaccctaccgccgccgcgaatcccgcacgaccccaaccatgaccgtgctgagccgccctaccccgggcacggcccagtgcttcgggcggaagaagaccgccgtcgcggtcgcgttacacgaagccggggcgcggcctgatcaaggtgaacggcgtcccgattgagctgatccgaccggagatgctccgcctcaaggccttcgagcccatcctgctggcgggggcggtcccggttcaaggacatcgacatgcggatccgcgtccgcggcggcgggaagacgtcgcagatctacgccatccgccaggccgtcgccaaggggctcgtcgcctactaccagaagtacgtcgacgaggccgccaagaaggagatcaaggacatctttacccgctacgatcgcaccctcctcgtcgctgacccccggcgctgcgagccgaagaagttcggcggacgtggtgcccgcgccaggttccagaagtcgtaccgttgagcggctgcctgctccatctcgatttttcagatcgttgtgggtgttcttcgctttatttcctatcaatggatctgcttatctggttctatatctagctgctgctttaccataatgtttagactttaatgcctagcctgaaaccttgtttgcaatgtgaaattaatgtgagagattatgaagactattttggctagtccctctattatgattttcatcattccagtattgtg

SEQ ID NO: 3853 - protein, 105 aa, Zea mays subsp. mays
  peptide (1)..(105): Ceres Seq. ID no. 12410080
MSRAATRFFLTRCLLPLPLLSPRWRQRRRGSICATRAFAMAASGFGGGEAPKPYRRRESRTTPTMTVLSRPTPGTAQCFGRKKTAVAVALHEAGARPDQGERRPD

SEQ ID NO: 3854 - protein, 79 aa, Zea mays subsp. mays
  peptide (1)..(79): Ceres Seq. ID no. 12410081
MRIRVRGGGKTSQIYAIRQAVAKGLVAYYQKYVDEAAKKEIKDIFTRYDRTLLVADPRRCEPKKFGGRGARARFQKSYR

SEQ ID NO: 3855 - protein, 77 aa, Zea mays subsp. mays
  peptide (1)..(77): Ceres Seq. ID no. 12410082
MLRLKAFEPILLAGAVPVQGHRHADPRPRRREDVADLRHPPGRRQGARRLLPEVRRRGRQEGDQGHLYPLRSHPPRR

SEQ ID NO: 3856 - DNA, 1773 bp, Zea mays subsp. mays
  misc_feature (1)..(1773): Ceres Seq. ID no. 12407294
  misc_feature (1)..(1773): Ortholog of  Ceres SEQ ID NO 13594345 as cited in SEQ ID NO 58043
  misc_feature (1)..(1773): Ortholog of  Ceres SEQ ID NO 12614112 as cited in SEQ ID NO 60891
  misc_feature (1)..(1773): Ortholog of  Ceres SEQ ID NO 14302832 as cited in SEQ ID NO 64926
  misc_feature (1)..(1773): Ortholog of  Ceres SEQ ID NO 12617417 as cited in SEQ ID NO 65089
  misc_feature (1)..(1773): Ortholog of  Ceres SEQ ID NO 13662880 as cited in SEQ ID NO 65422
  misc_feature (1)..(1773): Ortholog of  Ceres SEQ ID NO 13596089 as cited in SEQ ID NO 68373
actcactagctagcttccagcagcagcagccttgtcgtgcaacagcagcaccaggaccaggctaccaccagttagctgctggggacctggggtacggttgctgttccgtgactctcgtcgcacaacacaatgccggccatggtagaggaggggctcgtcaggcgggcggcgcccgagccgcacttcctggtggtgaccttcccggcgcagggccacatcaacccggcgcgccacctcgcgcgccgcctgctacgcgccacgggggcgcgggtcaccgtctgcacggccgtgtccgcgctccgcaagatgttcccgggcgccgaggcagacgcggaggaggagggccaccgcgacggcgcgggggtgcggtacgtgccctactccgacggctacgacgacggcttcgacggcgccgtgcacgacgccacgcgctacatggaccaggtcaaggtcgtggggtcccgcacgctgggggacgtcctggcccgcctccgcggcgcgggcaggcccgccacgctcgtcgtgtacacgctgctgctgtcgtgggtggccgacgtggcgcgcgaccacgccgtgcccgccgcgctctactggatccagccggccaccgtgctcgccgtctacctgcacttcttccgcgccacgggcggcgtcgacgcggccgtcgccgcggcgggcggcgacccgtgggcgggcgtccggttcccgggcctcccgccgctccgcgtccgcgacctgccgtcgttcatcgtctccacctccgaggacgacccctacgcgttcgtcgcggacgcgttccgcgagctcgtcgggcggctggacgncggcgaggacagccccagcgtgctggccaacacgttcgacgccgtggagcccgaggcggtggcgtcgctgcgggagcacggcgtggacgtggtccccgtcggccccgtcctctccttcctggacgacgacgcggcggccggcggcaacaacgacctgttcacgcaggacggcaagggctacctcgagtggctggacgcacaggcgccgggctccgtggtgtacatctcgttcgggagcctgtcggtgatgcgcaggcggcagatcgaggaggtggcgcgggggatgtccgagagcggccgcccgttcctgtgggtgctgcgggaggacaaccgcagaagcgagggcgccgacgccgacgccgcgacgctggccggcggcgggcgcggcatggtggtggggtggtgcgaccaggtgcgggtgttgtcgcacccggccgtgggctgcttcgtcacggcactggcggctggaactccacgctggagagcacggcgtgcggcgtccccgtcgtgtgcgtgccgcagtggacggaccagggcaccaacgcgtggctggtggagaggatcgggaccggcgtcagggccgccgtcagcgacaaggacggggtgctggaggccggcgagctgcggaggtgtatcgacctcgctacctccgacatggtgcgcgccaaggccgccgtgtggagggagaaggcgcgcgccgccgcgtcgaagggcggctcgtcggagaggaacctcaaggcgttcgtcgccaagcagatcgccggcgggaataactaggccgtcagctctcgtgcggtcgacataggttatgggactcgatctacaactgtacttaattaattgttgctctaagcgcatgtgcaagtgcaaacatgtgtgtcaacgtgataatattgatattctctgcaggtgtgtgtnnacgtgataatttatataattctcncttaat

SEQ ID NO: 3857 - protein, 532 aa, Zea mays subsp. mays
  peptide (1)..(532): Ceres Seq. ID no. 12407295
  misc_feature (274)..(274): Xaa is any aa, unknown or other
SLASFQQQQPCRATAAPGPGYHQLAAGDLGYGCCSVTLVAQHNAGHGRGGARQAGGARAALPGGDLPGAGPHQPGAPPRAPPATRHGGAGHRLHGRVRAPQDVPGRRGRRGGGGPPRRRGGAVRALLRRLRRRLRRRRARRHALHGPGQGRGVPHAGGRPGPPPRRGQARHARRVHAAAVVGGRRGARPRRARRALLDPAGHRARRLPALLPRHGRRRRGRRRGGRRPVGGRPVPGPPAAPRPRPAVVHRLHLRGRPLRVRRGRVPRARRAAGXRRGQPQRAGQHVRRRGARGGGVAAGARRGRGPRRPRPLLPGRRRGGRRQQRPVHAGRQGLPRVAGRTGAGLRGVHLVREPVGDAQAADRGGGAGDVRERPPVPVGAAGGQPQKRGRRRRRRDAGRRRARHGGGVVRPGAGVVAPGRGLLRHGTGGWNSTLESTACGVPVVCVPQWTDQGTNAWLVERIGTGVRAAVSDKDGVLEAGELRRCIDLATSDMVRAKAAVWREKARAAASKGGSSERNLKAFVAKQIAGGNN

SEQ ID NO: 3858 - protein, 499 aa, Zea mays subsp. mays
  peptide (1)..(499): Ceres Seq. ID no. 12407296
  misc_feature (232)..(232): Xaa is any aa, unknown or other
MPAMVEEGLVRRAAPEPHFLVVTFPAQGHINPARHLARRLLRATGARVTVCTAVSALRKMFPGAEADAEEEGHRDGAGVRYVPYSDGYDDGFDGAVHDATRYMDQVKVVGSRTLGDVLARLRGAGRPATLVVYTLLLSWVADVARDHAVPAALYWIQPATVLAVYLHFFRATGGVDAAVAAAGGDPWAGVRFPGLPPLRVRDLPSFIVSTSEDDPYAFVADAFRELVGRLDXGEDSPSVLANTFDAVEPEAVASLREHGVDVVPVGPVLSFLDDDAAAGGNNDLFTQDGKGYLEWLDAQAPGSVVYISFGSLSVMRRRQIEEVARGMSESGRPFLWVLREDNRRSEGADADAATLAGGGRGMVVGWCDQVRVLSHPAVGCFVTALAAGTPRWRARRAASPSCACRSGRTRAPTRGWWRGSGPASGPPSATRTGCWRPASCGGVSTSLPPTWCAPRPPCGGRRRAPPRRRAARRRGTSRRSSPSRSPAGITRPSALVRST

SEQ ID NO: 3859 - protein, 496 aa, Zea mays subsp. mays
  peptide (1)..(496): Ceres Seq. ID no. 12407297
  misc_feature (229)..(229): Xaa is any aa, unknown or other
MVEEGLVRRAAPEPHFLVVTFPAQGHINPARHLARRLLRATGARVTVCTAVSALRKMFPGAEADAEEEGHRDGAGVRYVPYSDGYDDGFDGAVHDATRYMDQVKVVGSRTLGDVLARLRGAGRPATLVVYTLLLSWVADVARDHAVPAALYWIQPATVLAVYLHFFRATGGVDAAVAAAGGDPWAGVRFPGLPPLRVRDLPSFIVSTSEDDPYAFVADAFRELVGRLDXGEDSPSVLANTFDAVEPEAVASLREHGVDVVPVGPVLSFLDDDAAAGGNNDLFTQDGKGYLEWLDAQAPGSVVYISFGSLSVMRRRQIEEVARGMSESGRPFLWVLREDNRRSEGADADAATLAGGGRGMVVGWCDQVRVLSHPAVGCFVTALAAGTPRWRARRAASPSCACRSGRTRAPTRGWWRGSGPASGPPSATRTGCWRPASCGGVSTSLPPTWCAPRPPCGGRRRAPPRRRAARRRGTSRRSSPSRSPAGITRPSALVRST

SEQ ID NO: 3860 - DNA, 1522 bp, Zea mays subsp. mays
  misc_feature (1)..(1522): Ceres Seq. ID no. 12410063
  misc_feature (1)..(1522): Ortholog of  Ceres SEQ ID NO 13663419 as cited in SEQ ID NO 66561
gaagtcaacaggcatgccgaacggtggcggcaagaggtggctgctgctgctgccgctgtcgcggtgggttctcctcctcggcagcctccagctcccggcggtcggcggcagcggccatgtcgtcacgcgcatgcgcgggttcgacgggccacttccgttctacctcgaaaccgggtacgtggaggtggacgagcagcaaggtgtgcagctcttctactacttcgtgcgctcggagcgcgacccctacgaggacccgctgctgctgtggctgtccggcggcccaggctgctccggcatctccggccttgcctacgagataggacccttaaaatttgatgcccgagggcaaggtgaatttcccactcttctctaccgaccggagacatggaccaaggtgagcaacatcatatttgtggactcgccggtggggactgggttctcgtacgccaagtccgaggaagggctcgagaccggcgacaccaagcaagtgaagcagctagtcattttcctcaggaagtggctccaagaccatccccggttcgtgatgaatcctctttatattgctggagattcatacagtggtctcatcattcctactcttgcattagaaattgacagaagcatagaactcggtgaaaagatattttccggtctcaaggggtacattgctggcaacccgttgactggcggacagtttgatacagacagccaaattccatactttcatgccatgggacttgtatccgatgaactttacaagtgcacacgggatatcaataagcaatacatcttggatcctgcttgcccggatgatgatctgttgagccccaagactgtagcagagacagatggaacgagcaggttgatgctagagtctgcagattttctacttggttccaaatgtgcagaagctttatacattctatcctacgcttgggggaatgatgatacagttcaggagagcctcggtatccgcaaggggacaattggagcatggaaacgatacagccatgcattgccttacaattatgatatccagagtgtagtggattaccattcaaggctagccacaaaaggatacagggcgctgatatacagcggcgaccacgatgctgttgtaccccatgttggcacacaagcatggattagatacctcaacttgacaatcgttgatgattggcgaccatggtacgttggaggccaagttgctggattcacaaggagttatgcgagcggcctaacatttgccaccgtgaagggtgctggacatgttgcgccgttgtataagaccttggaatgccaaaaaatgtttataacatggatttcagggaatcctctttgatgcaagtctgatagaatgacccatcggttatctgagtgggcgtcagccgtcaggaatcctctttgaagggtcagttgcttgggtttctttggtgtcaactggttcaaatccttgatcgatatggttgatcgtaatatttttggaacttatttcaagatttattaacggtattgttctctt

SEQ ID NO: 3861 - protein, 446 aa, Zea mays subsp. mays
  peptide (1)..(446): Ceres Seq. ID no. 12410064
KSTGMPNGGGKRWLLLLPLSRWVLLLGSLQLPAVGGSGHVVTRMRGFDGPLPFYLETGYVEVDEQQGVQLFYYFVRSERDPYEDPLLLWLSGGPGCSGISGLAYEIGPLKFDARGQGEFPTLLYRPETWTKVSNIIFVDSPVGTGFSYAKSEEGLETGDTKQVKQLVIFLRKWLQDHPRFVMNPLYIAGDSYSGLIIPTLALEIDRSIELGEKIFSGLKGYIAGNPLTGGQFDTDSQIPYFHAMGLVSDELYKCTRDINKQYILDPACPDDDLLSPKTVAETDGTSRLMLESADFLLGSKCAEALYILSYAWGNDDTVQESLGIRKGTIGAWKRYSHALPYNYDIQSVVDYHSRLATKGYRALIYSGDHDAVVPHVGTQAWIRYLNLTIVDDWRPWYVGGQVAGFTRSYASGLTFATVKGAGHVAPLYKTLECQKMFITWISGNPL

SEQ ID NO: 3862 - protein, 442 aa, Zea mays subsp. mays
  peptide (1)..(442): Ceres Seq. ID no. 12410065
MPNGGGKRWLLLLPLSRWVLLLGSLQLPAVGGSGHVVTRMRGFDGPLPFYLETGYVEVDEQQGVQLFYYFVRSERDPYEDPLLLWLSGGPGCSGISGLAYEIGPLKFDARGQGEFPTLLYRPETWTKVSNIIFVDSPVGTGFSYAKSEEGLETGDTKQVKQLVIFLRKWLQDHPRFVMNPLYIAGDSYSGLIIPTLALEIDRSIELGEKIFSGLKGYIAGNPLTGGQFDTDSQIPYFHAMGLVSDELYKCTRDINKQYILDPACPDDDLLSPKTVAETDGTSRLMLESADFLLGSKCAEALYILSYAWGNDDTVQESLGIRKGTIGAWKRYSHALPYNYDIQSVVDYHSRLATKGYRALIYSGDHDAVVPHVGTQAWIRYLNLTIVDDWRPWYVGGQVAGFTRSYASGLTFATVKGAGHVAPLYKTLECQKMFITWISGNPL

SEQ ID NO: 3863 - protein, 403 aa, Zea mays subsp. mays
  peptide (1)..(403): Ceres Seq. ID no. 12410066
MRGFDGPLPFYLETGYVEVDEQQGVQLFYYFVRSERDPYEDPLLLWLSGGPGCSGISGLAYEIGPLKFDARGQGEFPTLLYRPETWTKVSNIIFVDSPVGTGFSYAKSEEGLETGDTKQVKQLVIFLRKWLQDHPRFVMNPLYIAGDSYSGLIIPTLALEIDRSIELGEKIFSGLKGYIAGNPLTGGQFDTDSQIPYFHAMGLVSDELYKCTRDINKQYILDPACPDDDLLSPKTVAETDGTSRLMLESADFLLGSKCAEALYILSYAWGNDDTVQESLGIRKGTIGAWKRYSHALPYNYDIQSVVDYHSRLATKGYRALIYSGDHDAVVPHVGTQAWIRYLNLTIVDDWRPWYVGGQVAGFTRSYASGLTFATVKGAGHVAPLYKTLECQKMFITWISGNPL

SEQ ID NO: 3864 - DNA, 1300 bp, Zea mays subsp. mays
  misc_feature (1)..(1300): Ceres Seq. ID no. 13494465
  misc_feature (1)..(1300): Ortholog of  Ceres SEQ ID NO 14314434 as cited in SEQ ID NO 52401
  misc_feature (1)..(1300): Ortholog of  Ceres SEQ ID NO 14303939 as cited in SEQ ID NO 54286
  misc_feature (1)..(1300): Ortholog of  Ceres SEQ ID NO 14307760 as cited in SEQ ID NO 54741
  misc_feature (1)..(1300): Ortholog of  Ceres SEQ ID NO 14313391 as cited in SEQ ID NO 58556
  misc_feature (1)..(1300): Ortholog of  Ceres SEQ ID NO 14307540 as cited in SEQ ID NO 59670
  misc_feature (1)..(1300): Ortholog of  Ceres SEQ ID NO 15179003 as cited in SEQ ID NO 0
  misc_feature (1)..(1300): Ortholog of  Ceres SEQ ID NO 15179235 as cited in SEQ ID NO 0
gagcaaaatataaagtttataaacccactcctccccttcccctgttccctctaccaccaccaccggcaccgcgggacagtctgctctcgtcccgctgcagcccgtccccgacccggaaccctagcgactgccattgcccacgcgccgctcgcccgatgaacggcgggggctctgggctggcgcccaacgccgcgcacaccgcggacgaggtcttccgcgactacaaaggccgccgcgccggcatgatcaaggccctcaccactgatgtggagaggttcttcaaactctgtgaccctgaaaaggagaacttgtgcctttatggctatcccgatgagacgtgggaggtgaccttgccagctgaggaagttccccctgagatccctgaaccagcattaggaatcaactttgctagggatggcatgaatgagaaagactggctggcgctagttgcagtccacagtgattcctggttactgtctgttgcattctactttggtgcacgctttggatttgacagagaaactaggaggcgactctttagcctgataaacaacatgcccacgatatttgaggtagtgacaggagcagccaagaagcaggcgaaggagaagacacctaatagtagcagcaagagcaacaggcctagttcaaaagtgtcaagagcagagtctcgttcaaaggctaaggtcccccaagacgaagaagagagcggtgatgacgatgaggatgaggaggcagacgagcacaacaataccttgtgtggaacttgcggaactaacgacagcaaggaccagttctggatctgttgtgataactgcgagaagtggtaccatgggaagtgtgtcaagatcacgccagctcgagctgagcatatcaagcagtacaagtgcccagactgcaccaacaagcgggccagggcatgagcggcaaacatcggcatcgggcgacctttgataggaaggaagaaaccacctcctggcttcaagatccctagatatggcgtaggtccctagtttacgaagtctgcattttcatgtgttcattaatatatctgctgattagctgttcgacctagcagtgtctaaaacgtgccgtgtgtcttctgtgctgagtgttgacatggggcctcctccctccagcctgtaaacgctgtcactgaaggtacctctcaactgaccatccttcattgttggtgtcgtgcagtgagtagtggccgtactctttgttcccagttcctagcatttgaattgctcaaatgcgtaccttgctgagtaaggccgttggaaaatgacgaatagct

SEQ ID NO: 3865 - protein, 306 aa, Zea mays subsp. mays
  peptide (1)..(306): Ceres Seq. ID no. 13494466
AKYKVYKPTPPLPLFPLPPPPAPRDSLLSSRCSPSPTRNPSDCHCPRAARPMNGGGSGLAPNAAHTADEVFRDYKGRRAGMIKALTTDVERFFKLCDPEKENLCLYGYPDETWEVTLPAEEVPPEIPEPALGINFARDGMNEKDWLALVAVHSDSWLLSVAFYFGARFGFDRETRRRLFSLINNMPTIFEVVTGAAKKQAKEKTPNSSSKSNRPSSKVSRAESRSKAKVPQDEEESGDDDEDEEADEHNNTLCGTCGTNDSKDQFWICCDNCEKWYHGKCVKITPARAEHIKQYKCPDCTNKRARA

SEQ ID NO: 3866 - protein, 255 aa, Zea mays subsp. mays
  peptide (1)..(255): Ceres Seq. ID no. 13494467
MNGGGSGLAPNAAHTADEVFRDYKGRRAGMIKALTTDVERFFKLCDPEKENLCLYGYPDETWEVTLPAEEVPPEIPEPALGINFARDGMNEKDWLALVAVHSDSWLLSVAFYFGARFGFDRETRRRLFSLINNMPTIFEVVTGAAKKQAKEKTPNSSSKSNRPSSKVSRAESRSKAKVPQDEEESGDDDEDEEADEHNNTLCGTCGTNDSKDQFWICCDNCEKWYHGKCVKITPARAEHIKQYKCPDCTNKRARA

SEQ ID NO: 3867 - protein, 226 aa, Zea mays subsp. mays
  peptide (1)..(226): Ceres Seq. ID no. 13494468
MIKALTTDVERFFKLCDPEKENLCLYGYPDETWEVTLPAEEVPPEIPEPALGINFARDGMNEKDWLALVAVHSDSWLLSVAFYFGARFGFDRETRRRLFSLINNMPTIFEVVTGAAKKQAKEKTPNSSSKSNRPSSKVSRAESRSKAKVPQDEEESGDDDEDEEADEHNNTLCGTCGTNDSKDQFWICCDNCEKWYHGKCVKITPARAEHIKQYKCPDCTNKRARA

SEQ ID NO: 3868 - DNA, 1586 bp, Zea mays subsp. mays
  misc_feature (1)..(1586): Ceres Seq. ID no. 12405130
  misc_feature (1)..(1586): Ortholog of  Ceres SEQ ID NO 15179641 as cited in SEQ ID NO 56414
  misc_feature (1)..(1586): Ortholog of  Ceres SEQ ID NO 14316049 as cited in SEQ ID NO 67036
  misc_feature (1)..(1586): Ortholog of  Ceres SEQ ID NO 14313252 as cited in SEQ ID NO 67134
  misc_feature (1)..(1586): Ortholog of  Ceres SEQ ID NO 14302220 as cited in SEQ ID NO 69121
gcaacggtccaggtttccaaggtccaacgttccgacccacgggaagcttctagaaaccattagacgcaccggtcgcgttcctcctcatggcccccacttgtcatccgtccatcctcacgtctctgccccaccattttaccggtagccaacaaaactaggttccgtggcgtcgggtgggaccagcaaccagccgccgcagccggcccccaggcgcctctatatacggcactccgactccgatacattggcgacatcacagatcacacacactcgagaactccatttcgatcccatttgaaatcaacccatcctcgtttcctccgtctagcagcctctcaccctcatggccaagatcaagatcgggatcaatgggttcggcaggatcggaaggctggtggccagagtggccctgcagagcgacgacgtcgagctcgtcgccgtgaacgaccccttcatcagcaccgattacatgacctacatgttcaagtatgacactgtgcacggacagtggaagcaccatgaggtcaaggtgaaggactccaagacccttctctttggtgagaaggaggttactgtgtttggctgcaggaaccctgaggagatcccatggggttcggttggcgctgaatatgttgttgagtctactggtgttttcactgaccaggagaaggctgcagctcacttgaagggtggtgccaagaaggttgtcatttctgctcctagcaaggatgcccccatgttcgttgttggtgtcaacgagaaggagtacaagtctgacatcaacattgtctctaatgctagctgcacaaccaactgtcttgctcctcttgctaaggtcatcaatgacaagttcggtattgttgagggtctgatgaccactgttcatgccatcactgctacccagaagactgttgatgggccctcatctaaggactggaggggtggaagggctgctagtttcaacatcattcccagcagcactggagctgctaaggctgttggcaaagtgcttcctgtcctcaatggaaagctgactggaatgtctttccgtgtcccaactgtcgatgtttctgttgttgatctaactgttaggcttgagaagtctgccacctatgatgagatcaaggctgcggtcaaggccgagtcagagggtagcctcaagggcattctgggttatgtcgaggaggaccttgtttccaccgatttccagggtgacagcaggtctagcatctttgatgcgaaggctggcattgccttgaacggcaactttgtgaagcttgtgtcctggtacgacaacgagtggggatacagcacccgagtggtcgacctgatccgccacatgaacagcaccaagtaaatgaacaaactgatgaaagcatgcaaagagtgatgaaagcatgcaaagagagttgtgtttcttccccggaagtgcttccgagaataaatttttcttatctgattgtctaaaacctataattggtgtaatggtatcgtagtggttggttgagcattgagtgactcatattttgtcaggtctatgtgttatcgttaaacttttaacggtcattctatttcaaaagttttcc

SEQ ID NO: 3869 - protein, 337 aa, Zea mays subsp. mays
  peptide (1)..(337): Ceres Seq. ID no. 12405131
MAKIKIGINGFGRIGRLVARVALQSDDVELVAVNDPFISTDYMTYMFKYDTVHGQWKHHEVKVKDSKTLLFGEKEVTVFGCRNPEEIPWGSVGAEYVVESTGVFTDQEKAAAHLKGGAKKVVISAPSKDAPMFVVGVNEKEYKSDINIVSNASCTTNCLAPLAKVINDKFGIVEGLMTTVHAITATQKTVDGPSSKDWRGGRAASFNIIPSSTGAAKAVGKVLPVLNGKLTGMSFRVPTVDVSVVDLTVRLEKSATYDEIKAAVKAESEGSLKGILGYVEEDLVSTDFQGDSRSSIFDAKAGIALNGNFVKLVSWYDNEWGYSTRVVDLIRHMNSTK

SEQ ID NO: 3870 - protein, 295 aa, Zea mays subsp. mays
  peptide (1)..(295): Ceres Seq. ID no. 12405132
MTYMFKYDTVHGQWKHHEVKVKDSKTLLFGEKEVTVFGCRNPEEIPWGSVGAEYVVESTGVFTDQEKAAAHLKGGAKKVVISAPSKDAPMFVVGVNEKEYKSDINIVSNASCTTNCLAPLAKVINDKFGIVEGLMTTVHAITATQKTVDGPSSKDWRGGRAASFNIIPSSTGAAKAVGKVLPVLNGKLTGMSFRVPTVDVSVVDLTVRLEKSATYDEIKAAVKAESEGSLKGILGYVEEDLVSTDFQGDSRSSIFDAKAGIALNGNFVKLVSWYDNEWGYSTRVVDLIRHMNSTK

SEQ ID NO: 3871 - protein, 292 aa, Zea mays subsp. mays
  peptide (1)..(292): Ceres Seq. ID no. 12405133
MFKYDTVHGQWKHHEVKVKDSKTLLFGEKEVTVFGCRNPEEIPWGSVGAEYVVESTGVFTDQEKAAAHLKGGAKKVVISAPSKDAPMFVVGVNEKEYKSDINIVSNASCTTNCLAPLAKVINDKFGIVEGLMTTVHAITATQKTVDGPSSKDWRGGRAASFNIIPSSTGAAKAVGKVLPVLNGKLTGMSFRVPTVDVSVVDLTVRLEKSATYDEIKAAVKAESEGSLKGILGYVEEDLVSTDFQGDSRSSIFDAKAGIALNGNFVKLVSWYDNEWGYSTRVVDLIRHMNSTK

SEQ ID NO: 3872 - DNA, 1349 bp, Zea mays subsp. mays
  misc_feature (1)..(1349): Ceres Seq. ID no. 13498573
  misc_feature (1)..(1349): Ortholog of  Ceres SEQ ID NO 15177903 as cited in SEQ ID NO 54993
  misc_feature (1)..(1349): Ortholog of  Ceres SEQ ID NO 15177994 as cited in SEQ ID NO 55641
  misc_feature (1)..(1349): Ortholog of  Ceres SEQ ID NO 13595454 as cited in SEQ ID NO 56502
  misc_feature (1)..(1349): Ortholog of  Ceres SEQ ID NO 13589016 as cited in SEQ ID NO 68472
attgaactgctctgggaccgccctgtaacatccaccaactcgaggaggaggaggaggaggaggaggaggaggagagatccccccaccgagcctcggtttccaagcgccagcagaagaagaagagacaggacacatggcggcaggtttcggcccgaggttcgccgccggcgatgctccggcgagacggtgtaacctggagcggttcctcgaggccaccacgcccgtcgttgcgtcctccagctgctcgtccaaggagaccgcgaacggttgggggcagcggcggtcagacgacgcagacggctcgtcgccgttcttcgctctgggcgacctctgggactcgttcaaggagtgcagcgcgtacggcaccgctgtgccccttgctctgaacggctgcagcgacggcgtcgttcagtactacgtcccctacctgtctgcaatccagctttacggagccctcagcaggcacatcggcccttcgaggacgggtgcagaggagagcgacagcgacgcggagcgcgagacgagctccagcacgaacacgttatcggcgcgggaggaggcgagcgagagcagcaccagcggcagcgaagcctccggcgacgagggcgagccgggaccggggagctggtgccaggagcggctcctcttcgagttcctcgagtccgagcctccctaccagcgcgagcctctggctgacaagatttgtagccttgcccagcggtttccggagctcaagactctcaggagctgcgacctgtctccggcaagctggatctccgtggcgtggtacggtggacgaactagatagatgtacccgatctaccggatcccgacggggccaacgctgcgcgacctggacgcctgcttcctcacctaccactccctgtccacgcagttcgcagcaggcgccagcagcaacggccccagaccggcgacggcagccaccgcgacggcgatgatgtggctcccgacgttcgcgatggcgtcgtacaaggtgaaggcggcggcgtggacgccgggctggcgcgaccggcaggtggccgcgtccctcgcgcaggccgccgacgcctggctcaggctcctgcgcgccgaccacccggaccaccgcttcttcgccgcccggcggcctcccaggagatggtgatcatttgagtgtatagagtactctctctctctggcaagtctgaaggtagttgtcctgaaaaaagaaacggctgaggtagttagggttcactagcggaaccggagtgataaagtatgttcatcctgtagtttcaatgttttttccttttttttgtatccgccatgttctcaggaaaaaaatgtatcagaaaacgtataataggtgt

SEQ ID NO: 3873 - protein, 224 aa, Zea mays subsp. mays
  peptide (1)..(224): Ceres Seq. ID no. 13498574
MAAGFGPRFAAGDAPARRCNLERFLEATTPVVASSSCSSKETANGWGQRRSDDADGSSPFFALGDLWDSFKECSAYGTAVPLALNGCSDGVVQYYVPYLSAIQLYGALSRHIGPSRTGAEESDSDAERETSSSTNTLSAREEASESSTSGSEASGDEGEPGPGSWCQERLLFEFLESEPPYQREPLADKICSLAQRFPELKTLRSCDLSPASWISVAWYGGRTR

SEQ ID NO: 3874 - DNA, 986 bp, Zea mays subsp. mays
  misc_feature (1)..(986): Ceres Seq. ID no. 12376299
  misc_feature (1)..(986): Ortholog of  Ceres SEQ ID NO 13595292 as cited in SEQ ID NO 55879
  misc_feature (1)..(986): Ortholog of  Ceres SEQ ID NO 12593564 as cited in SEQ ID NO 63168
attcaagcatcgacagtcgacgctgcagcaggaagccaaagaggagagaatccatcgagtcgaccaccgagcacggtcagggcggcggggctcgccgtggccacagctcaggaatccaatcccccactcctcaccggcgcccgcggttttataaatagattccctcgtcactgtcgcggtcgcggcttgatcggattcaactcacctaccccaccccctcgattccttcccagctctggctacttcctacgccaccaccgcccgctccggcctcggctcctcgagcaagctgccatggctgccgccgcgctgagggagcaactcaacgctctcctctcctccatgttcgcctcgggtctggtggacgagcagttccagcagctgcagatgctgcaggaagacgggggcacgccgggcttcgtcgccgaggtcgtcaccctcttctgcgacgacgccgacaggatcatctccgagctcgccgctctgcttgaccagcccatcgtggactttgataaggtggacgcctacgtgcatcagctcaaagggagcagcgccagtgttggcgctcagaaagtgaagtttacttgcatgcagttccgtcagttatgtcaggataagaacagagacgggtgcatcatggcattggctgttgtgagaaatgagttctatgatctgcgcaataaattccagactatgcttcagcttgagcagcaaatccaggctcaacaataaatcgaagcagaaagcgtagctgcatgtggcctcacatgataagtgtatctttaaagatgtagaccatgttctctgtgttcctacaattgtgacaaaatcatcgtcgttgaggccggctcacatgcatgtaactgttagctataacaattattgtctaacgttgtccttgttactccacccgtttgtgttggattgccatcgaccatcatatgaaaacttttttttttccaatcccctccaatccatgtgggatg

SEQ ID NO: 3875 - protein, 243 aa, Zea mays subsp. mays
  peptide (1)..(243): Ceres Seq. ID no. 12376300
IQASTVDAAAGSQRGENPSSRPPSTVRAAGLAVATAQESNPPLLTGARGFINRFPRHCRGRGLIGFNSPTPPPRFLPSSGYFLRHHRPLRPRLLEQAAMAAAALREQLNALLSSMFASGLVDEQFQQLQMLQEDGGTPGFVAEVVTLFCDDADRIISELAALLDQPIVDFDKVDAYVHQLKGSSASVGAQKVKFTCMQFRQLCQDKNRDGCIMALAVVRNEFYDLRNKFQTMLQLEQQIQAQQ

SEQ ID NO: 3876 - protein, 145 aa, Zea mays subsp. mays
  peptide (1)..(145): Ceres Seq. ID no. 12376301
MAAAALREQLNALLSSMFASGLVDEQFQQLQMLQEDGGTPGFVAEVVTLFCDDADRIISELAALLDQPIVDFDKVDAYVHQLKGSSASVGAQKVKFTCMQFRQLCQDKNRDGCIMALAVVRNEFYDLRNKFQTMLQLEQQIQAQQ

SEQ ID NO: 3877 - protein, 129 aa, Zea mays subsp. mays
  peptide (1)..(129): Ceres Seq. ID no. 12376302
MFASGLVDEQFQQLQMLQEDGGTPGFVAEVVTLFCDDADRIISELAALLDQPIVDFDKVDAYVHQLKGSSASVGAQKVKFTCMQFRQLCQDKNRDGCIMALAVVRNEFYDLRNKFQTMLQLEQQIQAQQ

SEQ ID NO: 3878 - DNA, 1429 bp, Zea mays subsp. mays
  misc_feature (1)..(1429): Ceres Seq. ID no. 12374435
  misc_feature (1)..(1429): Ortholog of  Ceres SEQ ID NO 15168537 as cited in SEQ ID NO 57100
  misc_feature (1)..(1429): Ortholog of  Ceres SEQ ID NO 15178681 as cited in SEQ ID NO 63192
  misc_feature (1)..(1429): Ortholog of  Ceres SEQ ID NO 13579918 as cited in SEQ ID NO 64644
  misc_feature (1)..(1429): Ortholog of  Ceres SEQ ID NO 13654122 as cited in SEQ ID NO 68192
agtccaagtctccagctacgactgccaggtctccgcttgtcgccgtcacgcgcgcgcaggggcagggcgcaccatccccgcgccgccatgtccggcaccgggtgcctccccaccgacggcccggccctatcccgggtctgccgggacggcgcggccgccgcacggctcaagacggggtcgctgctggccattctcgtcgccagcgccgtcggcatctgcctccccgtcgcgctcacgcgggccttccgcggcagcccaaactacgcgcggggcctgctcctcgtcaagtgctacgcggctggggtcatcctctccacctcgctcgtccacgtgctccccgacgcgcacgccgccctcgccgactgcgccgtcgcctcgcgcaggccctggagggacttccccttcgcgggccttttcaccctcgtcggcgcgctgctcgcgctcctcgtcgacctctccgcctcctcccacctcgaggcccacgcccacgtcggcgcccaccacgaaactccctacgccccgatcccgaagaaggtacccgtgttcgagctcgccggcgaaatgagccccaagaaacgcgctttcttgggcgacgaccgagaagaggaccccgcgccgcacgccgccaccaacggcgcagacccggaccgcgacgacgtggcgctcttcggacccaagaagggcgcccgcagcgacgaggtcccggtcatcactgccgggtgccatgccgtcgcccatgaagtggtggaggtaggggaggggcccggtgaggacgaggaggaggccaggaggaagcagaagatggtgtccaaagtgctggagattgggatagtcttccactccgtcatcatcggagttacaatggggatgtcccaggatgtctgtgcaatccggccacttgtggttgcgctctccttccatcaggtgttcgaggggatgggcctgggcggatgcatcgcacaggctggttttgggatggcaacagttggctacatgtgcataatgttctcagtgacgacgccattgggaattcttcttggaatgctagtgttccacatgactggctacgacgatagcaatccaaatgccttaataatggaagggatccttggttcactttcggctggaattctcatctatatggcgctagtcgacctagtttctcttgattttttccacaacaagatgatgtcagcgtctttgaagctgaagaaggcgtgttacattgccttggtgcttggatctgcttctatgtcggtattagctctctgggcataggcattttgaagaaaagccttatttacgatcttcagaggtattgctccttgatgtaaaggaatggataatttgggggccaacagtacactagtccctcatgtaaatttgaacacaaaggaaactgaaaattcacgaccacagtttgtgagct

SEQ ID NO: 3879 - protein, 425 aa, Zea mays subsp. mays
  peptide (1)..(425): Ceres Seq. ID no. 12374436
SPSLQLRLPGLRLSPSRARRGRAHHPRAAMSGTGCLPTDGPALSRVCRDGAAAARLKTGSLLAILVASAVGICLPVALTRAFRGSPNYARGLLLVKCYAAGVILSTSLVHVLPDAHAALADCAVASRRPWRDFPFAGLFTLVGALLALLVDLSASSHLEAHAHVGAHHETPYAPIPKKVPVFELAGEMSPKKRAFLGDDREEDPAPHAATNGADPDRDDVALFGPKKGARSDEVPVITAGCHAVAHEVVEVGEGPGEDEEEARRKQKMVSKVLEIGIVFHSVIIGVTMGMSQDVCAIRPLVVALSFHQVFEGMGLGGCIAQAGFGMATVGYMCIMFSVTTPLGILLGMLVFHMTGYDDSNPNALIMEGILGSLSAGILIYMALVDLVSLDFFHNKMMSASLKLKKACYIALVLGSASMSVLALWA

SEQ ID NO: 3880 - protein, 396 aa, Zea mays subsp. mays
  peptide (1)..(396): Ceres Seq. ID no. 12374437
MSGTGCLPTDGPALSRVCRDGAAAARLKTGSLLAILVASAVGICLPVALTRAFRGSPNYARGLLLVKCYAAGVILSTSLVHVLPDAHAALADCAVASRRPWRDFPFAGLFTLVGALLALLVDLSASSHLEAHAHVGAHHETPYAPIPKKVPVFELAGEMSPKKRAFLGDDREEDPAPHAATNGADPDRDDVALFGPKKGARSDEVPVITAGCHAVAHEVVEVGEGPGEDEEEARRKQKMVSKVLEIGIVFHSVIIGVTMGMSQDVCAIRPLVVALSFHQVFEGMGLGGCIAQAGFGMATVGYMCIMFSVTTPLGILLGMLVFHMTGYDDSNPNALIMEGILGSLSAGILIYMALVDLVSLDFFHNKMMSASLKLKKACYIALVLGSASMSVLALWA

SEQ ID NO: 3881 - protein, 245 aa, Zea mays subsp. mays
  peptide (1)..(245): Ceres Seq. ID no. 12374438
SKSPATTARSPLVAVTRAQGQGAPSPRRHVRHRVPPHRRPGPIPGLPGRRGRRTAQDGVAAGHSRRQRRRHLPPRRAHAGLPRQPKLRAGPAPRQVLRGWGHPLHLARPRAPRRARRPRRLRRRLAQALEGLPLRGPFHPRRRAARAPRRPLRLLPPRGPRPRRRPPRNSLRPDPEEGTRVRARRRNEPQETRFLGRRPRRGPRAARRHQRRRPGPRRRGALRTQEGRPQRRGPGHHCRVPCRRP

SEQ ID NO: 3882 - DNA, 1476 bp, Zea mays subsp. mays
  misc_feature (1)..(1476): Ceres Seq. ID no. 13492814
  misc_feature (1)..(1476): Ortholog of  Ceres SEQ ID NO 15177750 as cited in SEQ ID NO 57772
  misc_feature (1)..(1476): Ortholog of  Ceres SEQ ID NO 13596581 as cited in SEQ ID NO 62420
  misc_feature (1)..(1476): Ortholog of  Ceres SEQ ID NO 13591273 as cited in SEQ ID NO 65904
  misc_feature (1)..(1476): Ortholog of  Ceres SEQ ID NO 13623086 as cited in SEQ ID NO 0
agcccactcgtagtcgtaggcactttcatctgtgccctctgcgttcgagatcgatctcagctggcaccgtcccagttcgccatggcggaggaccggagccccaagcccatccactgcaaagcggcggtgtgccgagccgccggcgagccactcaccatcgaggagatcgtcgtcgacccgccgaaagcgtacgagatccgcatccgggtcatctgcacctcactctgccacaccgatatcaccttctggaaagctaaggtggcaccggtgtttccaagaatactagggcatgaggcgtacggggtagtggagagcgtgggggagcacgtggagggcttcgccggcgggggacaccgtggtgccgacgttcctggggcagtgcgagcgctgcgccagctgcgcgtcggagcacagcaacgtgtgcgacgcggtgccgttcgtcatcggccccgggatgcggcgcgacggcaccacccggttccgggacgcgcgggggagcccgctgcacgacctcctcgccgtctccagcttcagcgagtacaccgtcgtggacgtgaaccaggtggtcaaggtcgaccccgccgtgccgcccaagctcgcctgcctcctcagctgcggcgccggcaccggggtaggagcagcgtggaggtctgccaaggtggagccaggatccactgttgcaatctttggccttggatctgtcggtttggcggtggtccaaggcgcgaaaatgtgtggcgcatccaagatcatcggcgttgatctcaaccctgacaaggaggaagtagggagatcgttcggcgtcacagacttcgtcaatccatcgcagctggacaagcgttccgtcgtagaggtgatcgttgagatgaccggcggcggcgtggactacagcttcgagtgcatcggcgtgccgtcggtgatgaccgacgccttcagatgcaccaagatggggaagggcaagacgatcgtgctggggctggggagggacagcgacgaggtgtgcctgccgtcgctggagctgctgttcgggaggtgcgtcatggggtcgctcttcggcgggctgaagcccaagacccacatccccgtcctcgccaagaaatgcatggacaaggagctgcagctggacgcgctggtcacgcatgagcttggactgcaggacatcaacaaggccttcgacctgctcctgcaggggaaaagtctgcgctgcatcctctggatggacaaggacaagtaacggaaggagaggggcggccggaccaatccttcctgtctctgaataaatttgccctgttttttcagcgaggcgtcgctgaaagctgctgttagcggcgaccaagactatctgttcctgaaagccggtgtatcagtatcgtttcgttgtctgaactgattaaatcctaatatcgatagattagactctcccagcaactgctttgtcccctaaataaagtgattcatcatctcttttttacatct

SEQ ID NO: 3883 - protein, 259 aa, Zea mays subsp. mays
  peptide (1)..(259): Ceres Seq. ID no. 13492815
MRRDGTTRFRDARGSPLHDLLAVSSFSEYTVVDVNQVVKVDPAVPPKLACLLSCGAGTGVGAAWRSAKVEPGSTVAIFGLGSVGLAVVQGAKMCGASKIIGVDLNPDKEEVGRSFGVTDFVNPSQLDKRSVVEVIVEMTGGGVDYSFECIGVPSVMTDAFRCTKMGKGKTIVLGLGRDSDEVCLPSLELLFGRCVMGSLFGGLKPKTHIPVLAKKCMDKELQLDALVTHELGLQDINKAFDLLLQGKSLRCILWMDKDK

SEQ ID NO: 3884 - protein, 253 aa, Zea mays subsp. mays
  peptide (1)..(253): Ceres Seq. ID no. 13492816
SPLVVVGTFICALCVRDRSQLAPSQFAMAEDRSPKPIHCKAAVCRAAGEPLTIEEIVVDPPKAYEIRIRVICTSLCHTDITFWKAKVAPVFPRILGHEAYGVVESVGEHVEGFAGGGHRGADVPGAVRALRQLRVGAQQRVRRGAVRHRPRDAARRHHPVPGRAGEPAARPPRRLQLQRVHRRGREPGGQGRPRRAAQARLPPQLRRRHRGRSSVEVCQGGARIHCCNLWPWICRFGGGPRRENVWRIQDHRR

SEQ ID NO: 3885 - protein, 226 aa, Zea mays subsp. mays
  peptide (1)..(226): Ceres Seq. ID no. 13492817
MAEDRSPKPIHCKAAVCRAAGEPLTIEEIVVDPPKAYEIRIRVICTSLCHTDITFWKAKVAPVFPRILGHEAYGVVESVGEHVEGFAGGGHRGADVPGAVRALRQLRVGAQQRVRRGAVRHRPRDAARRHHPVPGRAGEPAARPPRRLQLQRVHRRGREPGGQGRPRRAAQARLPPQLRRRHRGRSSVEVCQGGARIHCCNLWPWICRFGGGPRRENVWRIQDHRR

SEQ ID NO: 3886 - DNA, 1334 bp, Zea mays subsp. mays; identical to SEQ ID NO: 3398
  misc_feature (1)..(1334): Ceres Seq. ID no. 12414173
  misc_feature (1)..(1334): Ortholog of  Ceres SEQ ID NO 14312281 as cited in SEQ ID NO 59172
  misc_feature (1)..(1334): Ortholog of  Ceres SEQ ID NO 14302299 as cited in SEQ ID NO 68665
  misc_feature (1)..(1334): Ortholog of  Ceres SEQ ID NO 15174396 as cited in SEQ ID NO 0

SEQ ID NO: 3887 - protein, 361 aa, Zea mays subsp. mays; identical to SEQ ID NO: 3399
  peptide (1)..(361): Ceres Seq. ID no. 12414174

SEQ ID NO: 3888 - protein, 322 aa, Zea mays subsp. mays; identical to SEQ ID NO: 3400
  peptide (1)..(322): Ceres Seq. ID no. 12414175

SEQ ID NO: 3889 - protein, 320 aa, Zea mays subsp. mays; identical to SEQ ID NO: 3401
  peptide (1)..(320): Ceres Seq. ID no. 12414176

SEQ ID NO: 3890 - DNA, 1368 bp, Zea mays subsp. mays
  misc_feature (1)..(1368): Ceres Seq. ID no. 12376414
  misc_feature (1)..(1368): Ortholog of  Ceres SEQ ID NO 13502952 as cited in SEQ ID NO 62271
  misc_feature (1)..(1368): Ortholog of  Ceres SEQ ID NO 13502973 as cited in SEQ ID NO 68052
  misc_feature (1)..(1368): Ortholog of  Ceres SEQ ID NO 13596000 as cited in SEQ ID NO 68188
acgggtgctccaaacaactgcactagacatctcaattaattagctaatgagcaagcggctgagctgcactcaagacaaactaccatggatcagtcaaacattagcaacaagcacataacgatgacaaccctaatgctcctcctctgtgtcatagccattgcagactgcatttgccaagccgcagtggcagcccgggtggagccatccaccaccgtcggcagaactacaggaggagacgaggcgatgatgatggcgaggtacaagaagtggatggcgcagtatcgccggaagtacaaggacgacgccgagaaagcacaccgtttccaggtattcaaggcgaacgcggagtttattgacaggtctaacgctggaggcaagaagaagtacgtcctagggaccaaccagtttgccgacctgaccagcaaagagttcgcggccatgtacaccggtttgaggaaaccggcggcggtgccttccggggccaagcagatccctgcaggtttcaagtaccagaattttacgcgcctagatgatgatgtccaggttgattggaggcagcagggtgctgtcactcctgtcaagaaccaaggccaatgtggctgttgctgggcgttctctgcagtaggtgccatggaaggtttgatcatgataacgacaggaaacctggtttccctgtcggagcagcagattctagactgcgacgagtcagacgggaaccagggctgcaacggtggctacatggacaacgccttccagtacgtcgtcaacaatggcggcgtcactactgaggacgcctacccttactctgcagtccaagggacgtgccaaaacgtccagccagccgccaccatcagcggcttccaggacctgcccagcggcgacgagaacgcgctcgccaacgcagtcgccaaccagccggtgtctgttggcgtcgacggcggatcgagtcctttccagttttaccagggtggcatatacgacggggatggctgtggcacggacatgaaccatgcagtgacggcgatcggctacggcgccgatgaccagggaacccagtactggatcctcaagaactcctggggcacaggatggggtgagaacggtttcatgcagctacagatgggcgtcggcgcctgtggtatctccacgatggcctcctacccaactccatgaacacaaatcttcagataaagcatagtatatatcagtccatgcgtatgactgcagaataaagcatggaagattaattacatgcgtgcatcaaggcatgctacgtactgtattaaaacttcggtactggccagatatatgtacaaaggtagaatgttcgtgtgataatataaaagttcgtaatgcttgtacgaatgc

SEQ ID NO: 3891 - protein, 362 aa, Zea mays subsp. mays
  peptide (1)..(362): Ceres Seq. ID no. 12376415
MDQSNISNKHITMTTLMLLLCVIAIADCICQAAVAARVEPSTTVGRTTGGDEAMMMARYKKWMAQYRRKYKDDAEKAHRFQVFKANAEFIDRSNAGGKKKYVLGTNQFADLTSKEFAAMYTGLRKPAAVPSGAKQIPAGFKYQNFTRLDDDVQVDWRQQGAVTPVKNQGQCGCCWAFSAVGAMEGLIMITTGNLVSLSEQQILDCDESDGNQGCNGGYMDNAFQYVVNNGGVTTEDAYPYSAVQGTCQNVQPAATISGFQDLPSGDENALANAVANQPVSVGVDGGSSPFQFYQGGIYDGDGCGTDMNHAVTAIGYGADDQGTQYWILKNSWGTGWGENGFMQLQMGVGACGISTMASYPTP

SEQ ID NO: 3892 - protein, 350 aa, Zea mays subsp. mays
  peptide (1)..(350): Ceres Seq. ID no. 12376416
MTTLMLLLCVIAIADCICQAAVAARVEPSTTVGRTTGGDEAMMMARYKKWMAQYRRKYKDDAEKAHRFQVFKANAEFIDRSNAGGKKKYVLGTNQFADLTSKEFAAMYTGLRKPAAVPSGAKQIPAGFKYQNFTRLDDDVQVDWRQQGAVTPVKNQGQCGCCWAFSAVGAMEGLIMITTGNLVSLSEQQILDCDESDGNQGCNGGYMDNAFQYVVNNGGVTTEDAYPYSAVQGTCQNVQPAATISGFQDLPSGDENALANAVANQPVSVGVDGGSSPFQFYQGGIYDGDGCGTDMNHAVTAIGYGADDQGTQYWILKNSWGTGWGENGFMQLQMGVGACGISTMASYPTP

SEQ ID NO: 3893 - protein, 346 aa, Zea mays subsp. mays
  peptide (1)..(346): Ceres Seq. ID no. 12376417
MLLLCVIAIADCICQAAVAARVEPSTTVGRTTGGDEAMMMARYKKWMAQYRRKYKDDAEKAHRFQVFKANAEFIDRSNAGGKKKYVLGTNQFADLTSKEFAAMYTGLRKPAAVPSGAKQIPAGFKYQNFTRLDDDVQVDWRQQGAVTPVKNQGQCGCCWAFSAVGAMEGLIMITTGNLVSLSEQQILDCDESDGNQGCNGGYMDNAFQYVVNNGGVTTEDAYPYSAVQGTCQNVQPAATISGFQDLPSGDENALANAVANQPVSVGVDGGSSPFQFYQGGIYDGDGCGTDMNHAVTAIGYGADDQGTQYWILKNSWGTGWGENGFMQLQMGVGACGISTMASYPTP

SEQ ID NO: 3894 - DNA, 1069 bp, Zea mays subsp. mays
  misc_feature (1)..(1069): Ceres Seq. ID no. 12403740
  misc_feature (1)..(1069): Ortholog of  Ceres SEQ ID NO 15169248 as cited in SEQ ID NO 55022
  misc_feature (1)..(1069): Ortholog of  Ceres SEQ ID NO 14315042 as cited in SEQ ID NO 56959
  misc_feature (1)..(1069): Ortholog of  Ceres SEQ ID NO 12608620 as cited in SEQ ID NO 60192
  misc_feature (1)..(1069): Ortholog of  Ceres SEQ ID NO 15173077 as cited in SEQ ID NO 64566
  misc_feature (1)..(1069): Ortholog of  Ceres SEQ ID NO 13662898 as cited in SEQ ID NO 66199
  misc_feature (1)..(1069): Ortholog of  Ceres SEQ ID NO 14313358 as cited in SEQ ID NO 67347
  misc_feature (1)..(1069): Ortholog of  Ceres SEQ ID NO 13654314 as cited in SEQ ID NO 67914
gccccaagccgcaaccgcaaccaccttcccaaatctcagtagtcgcctctcgtcgtcttcgtctagcccggcccgttccaaaacctccgtagccgccgccgccaccccggcgaccgaagatgatctccccggacgcagcccgcaacgtagtcggcatcatcggcaatgtcatctccttcggcctcttcctgtccccagtgctgacgttctggcggatctacaaggccaaggacgtggaggagttcaagccggacccttacctggcgacgctgctcaactgcatgctctgggtgttctatggcatccccgtcgtccaccccaacagcattctcgtcgtcaccatcaacggcatcggcctcgtcatcgaggccgtctacctcactatcttcttcctctattccgacagccagaagcgcaagaaggcgttcgcgatcctggccgtggagattctgttcatggtcgccgtggtgctcggtgtgatcctcggcgcgcacactcacgagaaacgttccatgatcgtcggcatcctctgcgtcatcttcggctcgatgatgtacgcctcaccactcactatcatgagtcgagtgatcaagaccaagagcgttgagtacatgcccttcctcctgtcgctggtgagcttcctcaacggctgctgctggacggcctacgcgctcatccgcttcgacctctacgtcacgatcccgaacgccctgggcgcattcttcggcctcgtccagctgatcctctacttctgctactacaagtcgacccccaagaaggagaagaacgtggagctgcccaccgtctccagcaacgtcggcggcggcaacgtcaccgtcagcgttgagcgatagatgatgtagctgccgccgcccgtcgagaacgaactcgacgagacgtgctttacccacaagtagttttggccttgtctaattgctcttctcggatgatcgtttaagtgagtgttagttagttttgccctgcgtgtgatgtcaggaacaattaatatatccatgtggctgtgtttgccattctagataattaagaacaatcgtatctgattgctacc

SEQ ID NO: 3895 - protein, 244 aa, Zea mays subsp. mays
  peptide (1)..(244): Ceres Seq. ID no. 12403741
MISPDAARNVVGIIGNVISFGLFLSPVLTFWRIYKAKDVEEFKPDPYLATLLNCMLWVFYGIPVVHPNSILVVTINGIGLVIEAVYLTIFFLYSDSQKRKKAFAILAVEILFMVAVVLGVILGAHTHEKRSMIVGILCVIFGSMMYASPLTIMSRVIKTKSVEYMPFLLSLVSFLNGCCWTAYALIRFDLYVTIPNALGAFFGLVQLILYFCYYKSTPKKEKNVELPTVSSNVGGGNVTVSVER

SEQ ID NO: 3896 - protein, 201 aa, Zea mays subsp. mays
  peptide (1)..(201): Ceres Seq. ID no. 12403742
PQAATATTFPNLSSRLSSSSSSPARSKTSVAAAATPATEDDLPGRSPQRSRHHRQCHLLRPLPVPSADVLADLQGQGRGGVQAGPLPGDAAQLHALGVLWHPRRPPQQHSRRHHQRHRPRHRGRLPHYLLPLFRQPEAQEGVRDPGRGDSVHGRRGARCDPRRAHSRETFHDRRHPLRHLRLDDVRLTTHYHESSDQDQER

SEQ ID NO: 3897 - protein, 190 aa, Zea mays subsp. mays
  peptide (1)..(190): Ceres Seq. ID no. 12403743
MLWVFYGIPVVHPNSILVVTINGIGLVIEAVYLTIFFLYSDSQKRKKAFAILAVEILFMVAVVLGVILGAHTHEKRSMIVGILCVIFGSMMYASPLTIMSRVIKTKSVEYMPFLLSLVSFLNGCCWTAYALIRFDLYVTIPNALGAFFGLVQLILYFCYYKSTPKKEKNVELPTVSSNVGGGNVTVSVER

SEQ ID NO: 3898 - DNA, 1237 bp, Zea mays subsp. mays
  misc_feature (1)..(1237): Ceres Seq. ID no. 12365371
  misc_feature (1)..(1237): Ortholog of  Ceres SEQ ID NO 14308727 as cited in SEQ ID NO 58726
  misc_feature (1)..(1237): Ortholog of  Ceres SEQ ID NO 13663517 as cited in SEQ ID NO 66850
aggaggggactaggggagagagagagagagagagggggaaggccaagaagaggcttcctctccccccattctccaatccgtgccctagtcgagccagccgcgaggaaggaggcgtctcgcctagcgcccgccctcggccgaccttctgctgcaccttcgaactctggaaagttcatagatttttgggcaatagcaagtggacatggaaccatcctctcagcctcagcctgcgatgggtgttgccgccggtgggtcacaagtgtatcctgcctctgcctacccgcctgcagcaacagtagctcctcctgctgttgcatctgctggtttacagtcagtgcaaccattcccagccaaccctgcccatatgaggtgctcagcaccagattgtctaccagcaagctcaacagttccaccaacagctccagcagcagcaacagcagcagcttcaccagttctgggtcgaacgcatgactgaaatcgaggcaacagctgatttcaggaaccacaacttgccacttgcgaggataaagaagatcatgaaggccgacgaagatgtccgcatgatctcagccgaagctcccgtggtcttcgcaaaagcttgcgagatattcatactggagctgacgctgaggtcgtggatgcacaccgaggagaacaagcgccgcaccttgcagaagaacgacattgccgcagccatcaccaggaccgacatttacgacttcttggtcgacattgttcccagggatgagatgaaggacgacggaatcgggcttcctaggcccgggctgccacccatgggagccccagctgacgcatatccatactactacatgccacagcagcaggtgcctggtcctgggatggtttatggcgcccagcaaggccacccggtgacgtatctgtggcaggatcctcaggaacagcaggagcaagctcctgaagagcagcagtctctgcatgaaagggactgaggatgtcgctcaagctatcacctgatttttcagagctctcattttaggttctctaaactgcaggttttcgttggctaatatcgttgggtatcaaactgaaacaggtagggtgtagcatcatggtagtttgatttctgctgtggtgttagttggagggataatgattagcggctagtggattaaagttacccataccgtttcctttcgttccaaaagttcgccttcatgaggcctctgatatgaaaaatgctgggtgttaatgcttc

SEQ ID NO: 3899 - protein, 167 aa, Zea mays subsp. mays
  peptide (1)..(167): Ceres Seq. ID no. 12365372
MTEIEATADFRNHNLPLARIKKIMKADEDVRMISAEAPVVFAKACEIFILELTLRSWMHTEENKRRTLQKNDIAAAITRTDIYDFLVDIVPRDEMKDDGIGLPRPGLPPMGAPADAYPYYYMPQQQVPGPGMVYGAQQGHPVTYLWQDPQEQQEQAPEEQQSLHERD

SEQ ID NO: 3900 - protein, 156 aa, Zea mays subsp. mays
  peptide (1)..(156): Ceres Seq. ID no. 12365373
RRGLGERERERGGRPRRGFLSPHSPIRALVEPAARKEASRLAPALGRPSAAPSNSGKFIDFWAIASGHGTILSASACDGCCRRWVTSVSCLCLPACSNSSSSCCCICWFTVSATIPSQPCPYEVLSTRLSTSKLNSSTNSSSSSNSSSFTSSGSNA

SEQ ID NO: 3901 - protein, 144 aa, Zea mays subsp. mays
  peptide (1)..(144): Ceres Seq. ID no. 12365374
MKADEDVRMISAEAPVVFAKACEIFILELTLRSWMHTEENKRRTLQKNDIAAAITRTDIYDFLVDIVPRDEMKDDGIGLPRPGLPPMGAPADAYPYYYMPQQQVPGPGMVYGAQQGHPVTYLWQDPQEQQEQAPEEQQSLHERD

SEQ ID NO: 3902 - DNA, 873 bp, Zea mays subsp. mays
  misc_feature (1)..(873): Ceres Seq. ID no. 12353716
  misc_feature (1)..(873): Ortholog of  Ceres SEQ ID NO 13596735 as cited in SEQ ID NO 62904
gtttgatgtgagccttggagtgctagattctgtttccattgtccattctcagtcacctgagcagccgaacgttctcagtcacctgcaggtcaggaaccaacgatgccgggcatccaccgctacaccgccgagctgctggtgctgctcaccatcattacccgcctcctgctgctggccacggcgtggccggcattgcccgccccagcgtcgctcgagccgtcgctgcttttcccgtccgccggcgccacctcgcccacgcagacccagtcagccggggtcgcctccacaatcccggccttcccggagcagtcagaggccgccgcggctgctgccacctccgtctgccagctcaccccgtcgcctccgctccttcccgctgtcctagcatcgtgcaacgccaatgccggcgggagtggcgtgacgctcccgccgcgcctaagatgctgcccggcgctcgccgcgtggctgtacactgcgtacgcgcccaccgcgctctcgggcagcggcgtcggagaagcgtcggtggccgcgtcggccgaggccgccgccgtggtggacttgccagtgctgccggacgacgcggaggaatgcgccggcgcggcggaccgtgcgctgcgggcggccggggtggcgctaccgcggccgcattggggcgaaagcaccggcactggcaacgggacggcggcgtgcgacgtagcgttctgctactgcggggtgaggctgcggcggcctgcgtgcgcggcgccgcagggccggatggcaaggagactggagagggactgcgcgctgccggggctcgccggctgctccaggtgcctgcgggcgctcagcaagctgggtgggaggagcaacgccacgtcgtcggcgaaggcg

SEQ ID NO: 3903 - protein, 257 aa, Zea mays subsp. mays
  peptide (1)..(257): Ceres Seq. ID no. 12353717
MPGIHRYTAELLVLLTIITRLLLLATAWPALPAPASLEPSLLFPSAGATSPTQTQSAGVASTIPAFPEQSEAAAAAATSVCQLTPSPPLLPAVLASCNANAGGSGVTLPPRLRCCPALAAWLYTAYAPTALSGSGVGEASVAASAEAAAVVDLPVLPDDAEECAGAADRALRAAGVALPRPHWGESTGTGNGTAACDVAFCYCGVRLRRPACAAPQGRMARRLERDCALPGLAGCSRCLRALSKLGGRSNATSSAKA

SEQ ID NO: 3904 - protein, 144 aa, Zea mays subsp. mays
  peptide (1)..(144): Ceres Seq. ID no. 12353718
MLPGARRVAVHCVRAHRALGQRRRRSVGGRVGRGRRRGGLASAAGRRGGMRRRGGPCAAGGRGGATAAALGRKHRHWQRDGGVRRSVLLLRGEAAAACVRGAAGPDGKETGEGLRAAGARRLLQVPAGAQQAGWEEQRHVVGEG

SEQ ID NO: 3905 - DNA, 1615 bp, Zea mays subsp. mays
  misc_feature (1)..(1615): Ceres Seq. ID no. 12344675
  misc_feature (1)..(1615): Ortholog of  Ceres SEQ ID NO 15178246 as cited in SEQ ID NO 52038
aatccgaaccgcaaccctagatttcgcttcctctctgtcccctccgctgcgccgccataacataaatccgccgcccctctccctcagtaaacccctctcttcttcccgcggtctgctcgttcgatctgtgcagcagatctgaggtcccgggcgaccgtgaagcagcttcaatcgtcggcatggcgctcgtattgcatagtggggctggaaacaagaatgccttcaaagcacttattgctgcagaatacagtgggatcaaggttgagttgaccaaggattttgagatgggtgtctccaacaagacccctgagtttcttaagatgaacccccttgggaaggttcctgttctggagactcctgatggccctgtttttgagagtaatgctatcgcacgctatgttgctcgcttgaaggatgacaaccctctttttgggtcttcccgtattgaacaagcccacgttgagcaatggatggattttgccgcaacagaagttgatcctggtgttgcatggtacttgtatccaaggcttgggtacctcccttatgttagcacaactgaggaaacagctatttcttcattgaagaggtcgcttggtgctctgaacacacaccttgcttcaaacacataccttgttgggcatgctgttactctagctgacattgtaatgacatgcaacctctaccatggaattgcacggatcttgaccaagaccttcacgtctgatttccctcatgtcgagaggtatttctggaccatggttaaccagcctaacttcaagaaggtcattggtgaggtcaagcaggcagagtctgcacctcctattccgaaaaaggctgctccttctaaggagccaaaggcaaaggatgtcaagaaggaggctccaaaggaggcccccaagccaaaggtggttgaggcaccagcagaagaggaagcaccaaagccaaagccaaagaatcctcttgacttgctgccaccaagcaagatggtccttgatgactggaagaggctatactcaaacacaaagactaacttccgggaggttgccatcaaaggtttctgggacatgtacgacccagagggctactctttgtggttctgtgactacaagtacaatgatgagaacaccgtctcctttgtgaccctgaacaaggttggtggattcctgcagcggatggacctgtgccgcaagtacgcctttgggaagatgctcgtgataggctctgagccacccttcaagctgaagggcctttggctcttccgtggccaggatgttcccaagtttgtaatggacgaggtctatgacatcgagctctacgagtggaccaaggtggacatctctgatgaggcccagaaggagcgtgtcaatgcgatgattgaggaccaggagccctttgagggcgaggccttgcttgacgcgaaatgcttcaagtgagtgtgcttgcctggagacaactgtttagcccttgaatttgcctatggaagagtttgcccttttactagtgtcgatgttgatctggtataccttgctatgaactggttaaagtttgtgctggtttgggattttttgtgcatcttgtgatacctcaagtcttcatcatttaaatgtttagccgc

SEQ ID NO: 3906 - protein, 417 aa, Zea mays subsp. mays
  peptide (1)..(417): Ceres Seq. ID no. 12344676
MALVLHSGAGNKNAFKALIAAEYSGIKVELTKDFEMGVSNKTPEFLKMNPLGKVPVLETPDGPVFESNAIARYVARLKDDNPLFGSSRIEQAHVEQWMDFAATEVDPGVAWYLYPRLGYLPYVSTTEETAISSLKRSLGALNTHLASNTYLVGHAVTLADIVMTCNLYHGIARILTKTFTSDFPHVERYFWTMVNQPNFKKVIGEVKQAESAPPIPKKAAPSKEPKAKDVKKEAPKEAPKPKVVEAPAEEEAPKPKPKNPLDLLPPSKMVLDDWKRLYSNTKTNFREVAIKGFWDMYDPEGYSLWFCDYKYNDENTVSFVTLNKVGGFLQRMDLCRKYAFGKMLVIGSEPPFKLKGLWLFRGQDVPKFVMDEVYDIELYEWTKVDISDEAQKERVNAMIEDQEPFEGEALLDAKCFK

SEQ ID NO: 3907 - protein, 382 aa, Zea mays subsp. mays
  peptide (1)..(382): Ceres Seq. ID no. 12344677
MGVSNKTPEFLKMNPLGKVPVLETPDGPVFESNAIARYVARLKDDNPLFGSSRIEQAHVEQWMDFAATEVDPGVAWYLYPRLGYLPYVSTTEETAISSLKRSLGALNTHLASNTYLVGHAVTLADIVMTCNLYHGIARILTKTFTSDFPHVERYFWTMVNQPNFKKVIGEVKQAESAPPIPKKAAPSKEPKAKDVKKEAPKEAPKPKVVEAPAEEEAPKPKPKNPLDLLPPSKMVLDDWKRLYSNTKTNFREVAIKGFWDMYDPEGYSLWFCDYKYNDENTVSFVTLNKVGGFLQRMDLCRKYAFGKMLVIGSEPPFKLKGLWLFRGQDVPKFVMDEVYDIELYEWTKVDISDEAQKERVNAMIEDQEPFEGEALLDAKCFK

SEQ ID NO: 3908 - protein, 370 aa, Zea mays subsp. mays
  peptide (1)..(370): Ceres Seq. ID no. 12344678
MNPLGKVPVLETPDGPVFESNAIARYVARLKDDNPLFGSSRIEQAHVEQWMDFAATEVDPGVAWYLYPRLGYLPYVSTTEETAISSLKRSLGALNTHLASNTYLVGHAVTLADIVMTCNLYHGIARILTKTFTSDFPHVERYFWTMVNQPNFKKVIGEVKQAESAPPIPKKAAPSKEPKAKDVKKEAPKEAPKPKVVEAPAEEEAPKPKPKNPLDLLPPSKMVLDDWKRLYSNTKTNFREVAIKGFWDMYDPEGYSLWFCDYKYNDENTVSFVTLNKVGGFLQRMDLCRKYAFGKMLVIGSEPPFKLKGLWLFRGQDVPKFVMDEVYDIELYEWTKVDISDEAQKERVNAMIEDQEPFEGEALLDAKCFK

SEQ ID NO: 3909 - DNA, 1539 bp, Zea mays subsp. mays
  misc_feature (1)..(1539): Ceres Seq. ID no. 12391407
  misc_feature (1)..(1539): Ortholog of  Ceres SEQ ID NO 13656783 as cited in SEQ ID NO 69218
aaaagtggattccaaaatccttcgtccagctgctgactagcgcagtcccgtcgctctcccactccttttcctccttaaatttccacacgaaaaattctcggtggacagaaaaaacaaggcaaagatcagaagagaacgcggaagtgatggccatggatccaagcgtcgcggcgcgccagagcgaggaggcggcggaggccttcttccgcgcggcgccgccgctccgtgaccgcgaccgtctcgccgccagcctcgccgatttcctcgcccgccactcagccgggggtggtggagtggtgtgcgtcacctccggcggcactacggtgcccctggagcagcgttgcgtgcgctacatcgacaattttagctccggccagcgcggtgccgcctccaccgagtattttcttaaggccggctacgctgtcatcttcatccatcgccgtgggagcaagcagccttactgtaggtttcttccagaggattcctttctcgatctttttgagctcggggaagactcagagatccaagttccacagtctcattcatcggtggtcaaggcagcaattagcaattaccggaaggcaatcgatgaatgccttcttctcaaactgcctttcacaacaatttttgagtaccttcagttactacaaatggtggctacttctatgaattgcttggggcaccgtggaatgttttatcttgctgctgcagtttccgacttctatgttccatgggaaagtatggctaaacataaaattgagtcagcaggcggccctttgaacatgcaactcaaccaagtccctaagatgcttttcatcctccggaaaaactgggcccctgctgcattttgtgtatccttcaagctcgaaacagatcctaacattctcctacagaaggcagagatggctttgaagaagtacggtatgaacgtcgtggtggcaaatgaactcgcaaactacaaagatgtagtggtgatggtcacaagcaacggggggaggacgaccgtgagcaggaggagcaaggcggaagacctggaagcgcagctaaccgacctcctggtgaagatgcactcggagcacattgcacagcccaattcgtaggaccatcgagcgagcgagatggttaaattaaatcagacatgccggcggcaagtatgagcgattctacttctactcgcctagcaaattgtgatatacagagttcaccgggtttgtcataaagacgctcatcaatgtgctgcagcagattaattcaaaaaattatagctgaatagctcacaccaggtacatgcaagtttttgaacataacctaggtaagggcatgtacagtggtgtttaatgtggaggctcttaaggtgtttaagggggttatttgaaaaaaaaatcttagagccgtctctccgtgaagagacgcttctggctcgtaaaccaagtagcaacagacgcttcacttcccactgtacgaatttgtcgtctgttctatcgatctaatgctatacaaatacatttaattatgtatttattaatagactacatttat

SEQ ID NO: 3910 - protein, 365 aa, Zea mays subsp. mays
  peptide (1)..(365): Ceres Seq. ID no. 12391408
KWIPKSFVQLLTSAVPSLSHSFSSLNFHTKNSRWTEKTRQRSEENAEVMAMDPSVAARQSEEAAEAFFRAAPPLRDRDRLAASLADFLARHSAGGGGVVCVTSGGTTVPLEQRCVRYIDNFSSGQRGAASTEYFLKAGYAVIFIHRRGSKQPYCRFLPEDSFLDLFELGEDSEIQVPQSHSSVVKAAISNYRKAIDECLLLKLPFTTIFEYLQLLQMVATSMNCLGHRGMFYLAAAVSDFYVPWESMAKHKIESAGGPLNMQLNQVPKMLFILRKNWAPAAFCVSFKLETDPNILLQKAEMALKKYGMNVVVANELANYKDVVVMVTSNGGRTTVSRRSKAEDLEAQLTDLLVKMHSEHIAQPNS

SEQ ID NO: 3911 - protein, 317 aa, Zea mays subsp. mays
  peptide (1)..(317): Ceres Seq. ID no. 12391409
MAMDPSVAARQSEEAAEAFFRAAPPLRDRDRLAASLADFLARHSAGGGGVVCVTSGGTTVPLEQRCVRYIDNFSSGQRGAASTEYFLKAGYAVIFIHRRGSKQPYCRFLPEDSFLDLFELGEDSEIQVPQSHSSVVKAAISNYRKAIDECLLLKLPFTTIFEYLQLLQMVATSMNCLGHRGMFYLAAAVSDFYVPWESMAKHKIESAGGPLNMQLNQVPKMLFILRKNWAPAAFCVSFKLETDPNILLQKAEMALKKYGMNVVVANELANYKDVVVMVTSNGGRTTVSRRSKAEDLEAQLTDLLVKMHSEHIAQPNS

SEQ ID NO: 3912 - protein, 315 aa, Zea mays subsp. mays
  peptide (1)..(315): Ceres Seq. ID no. 12391410
MDPSVAARQSEEAAEAFFRAAPPLRDRDRLAASLADFLARHSAGGGGVVCVTSGGTTVPLEQRCVRYIDNFSSGQRGAASTEYFLKAGYAVIFIHRRGSKQPYCRFLPEDSFLDLFELGEDSEIQVPQSHSSVVKAAISNYRKAIDECLLLKLPFTTIFEYLQLLQMVATSMNCLGHRGMFYLAAAVSDFYVPWESMAKHKIESAGGPLNMQLNQVPKMLFILRKNWAPAAFCVSFKLETDPNILLQKAEMALKKYGMNVVVANELANYKDVVVMVTSNGGRTTVSRRSKAEDLEAQLTDLLVKMHSEHIAQPNS

SEQ ID NO: 3913 - DNA, 1285 bp, Zea mays subsp. mays
  misc_feature (1)..(1285): Ceres Seq. ID no. 12357949
  misc_feature (1)..(1285): Ortholog of  Ceres SEQ ID NO 12364737 as cited in SEQ ID NO 51089
  misc_feature (1)..(1285): Ortholog of  Ceres SEQ ID NO 14311515 as cited in SEQ ID NO 51680
  misc_feature (1)..(1285): Ortholog of  Ceres SEQ ID NO 12581561 as cited in SEQ ID NO 53617
  misc_feature (1)..(1285): Ortholog of  Ceres SEQ ID NO 14316263 as cited in SEQ ID NO 55294
  misc_feature (1)..(1285): Ortholog of  Ceres SEQ ID NO 13595567 as cited in SEQ ID NO 56760
  misc_feature (1)..(1285): Ortholog of  Ceres SEQ ID NO 14315035 as cited in SEQ ID NO 56880
  misc_feature (1)..(1285): Ortholog of  Ceres SEQ ID NO 15176751 as cited in SEQ ID NO 59719
  misc_feature (1)..(1285): Ortholog of  Ceres SEQ ID NO 13597380 as cited in SEQ ID NO 64054
  misc_feature (1)..(1285): Ortholog of  Ceres SEQ ID NO 12625474 as cited in SEQ ID NO 64169
  misc_feature (1)..(1285): Ortholog of  Ceres SEQ ID NO 13597502 as cited in SEQ ID NO 64681
  misc_feature (1)..(1285): Ortholog of  Ceres SEQ ID NO 15180805 as cited in SEQ ID NO 0
ctggtacttggcaatcctctctagctagctcagcatccgacgacgggacttgcacgatggatgctgctctgctcgtcgtctccctcgtcctctgcctgctggcggctgcccctgcggcgtccgcggcgcgggccttcttcgtcttcggcgactccctcgtcgacaacggcaacaacaactacctgctgaccacggcgcgcgccgacgcgcccccctacggcatcgacttccccacgcaccaagccacgggccgcttctccaacgggcttaacatccccgacatcatcagcgagcacctcggggccgaacctgcgctgccgtacctgagccccgagctccgaggggagaagctgctcgtcggcgccaacttcgcgtcggccggcgtcgggatcctcaacgacacaggaatacagtttgtgaacatcatcaggatcggcgaccagctgcagtacttccgggagtaccagcggaagctgcgagccctcgtcggcgagccgcaggcgacgcagctcgtgaaccaggccctcgtgctcatcacgctcggcggcaacgacttcgtgaacaactactacctggtgcccatgtccgtgcggtcgcgccagtacgcactcccggactacgtccgcttcatcgtctccgagtacaggaagatcctctcgaggctgtacgagctgggcgcgcggcgcgtgatcgtgacggggacggggccgctggggtgcgtcccggccgagctggcgctgcacagccagaacggcgagtgcgcggcggagctgacgcgcgccgtgaacctcttcaacccgcagatggtggacatggtgcgcggcatcaaccgcgccatcggcgccgacgtcttcgtcaccgccaacacctaccgcatgaacttcgactacctcgcaaacccgcaggacttcgggttcacgaacgtgcaggtggcgtgctgcggccagggccccgtacaacgggatcgggctgtgcacggcggcgtcgaacgtgtgcgacaaccgcgacgtgttcgcgttctgggacgcgttccaccccacggagagggcaaaccgcatcatcgtcgcccagttcatgcacggcgacacggactacatgcaccccatgaacctcagcaccatcctcgccacggaccaggagggcctctagactatagcttgatcagccggacacgattatacgtacatgcgtgatgtgtctcacgtgcctagcacgttagccatgtgttggatgatggcagcccaatttgccaataatattcgtgcctcgatccaagtttcacctt

SEQ ID NO: 3914 - protein, 396 aa, Zea mays subsp. mays
  peptide (1)..(396): Ceres Seq. ID no. 12357950
GTWQSSLASSASDDGTCTMDAALLVVSLVLCLLAAAPAASAARAFFVFGDSLVDNGNNNYLLTTARADAPPYGIDFPTHQATGRFSNGLNIPDIISEHLGAEPALPYLSPELRGEKLLVGANFASAGVGILNDTGIQFVNIIRIGDQLQYFREYQRKLRALVGEPQATQLVNQALVLITLGGNDFVNNYYLVPMSVRSRQYALPDYVRFIVSEYRKILSRLYELGARRVIVTGTGPLGCVPAELALHSQNGECAAELTRAVNLFNPQMVDMVRGINRAIGADVFVTANTYRMNFDYLANPQDFGFTNVQVACCGQGPVQRDRAVHGGVERVRQPRRVRVLGRVPPHGEGKPHHRRPVHARRHGLHAPHEPQHHPRHGPGGPLDYSLISRTRLYVHA

SEQ ID NO: 3915 - protein, 378 aa, Zea mays subsp. mays
  peptide (1)..(378): Ceres Seq. ID no. 12357951
MDAALLVVSLVLCLLAAAPAASAARAFFVFGDSLVDNGNNNYLLTTARADAPPYGIDFPTHQATGRFSNGLNIPDIISEHLGAEPALPYLSPELRGEKLLVGANFASAGVGILNDTGIQFVNIIRIGDQLQYFREYQRKLRALVGEPQATQLVNQALVLITLGGNDFVNNYYLVPMSVRSRQYALPDYVRFIVSEYRKILSRLYELGARRVIVTGTGPLGCVPAELALHSQNGECAAELTRAVNLFNPQMVDMVRGINRAIGADVFVTANTYRMNFDYLANPQDFGFTNVQVACCGQGPVQRDRAVHGGVERVRQPRRVRVLGRVPPHGEGKPHHRRPVHARRHGLHAPHEPQHHPRHGPGGPLDYSLISRTRLYVHA

SEQ ID NO: 3916 - protein, 203 aa, Zea mays subsp. mays
  peptide (1)..(203): Ceres Seq. ID no. 12357952
MSVRSRQYALPDYVRFIVSEYRKILSRLYELGARRVIVTGTGPLGCVPAELALHSQNGECAAELTRAVNLFNPQMVDMVRGINRAIGADVFVTANTYRMNFDYLANPQDFGFTNVQVACCGQGPVQRDRAVHGGVERVRQPRRVRVLGRVPPHGEGKPHHRRPVHARRHGLHAPHEPQHHPRHGPGGPLDYSLISRTRLYVHA

SEQ ID NO: 3917 - DNA, 1579 bp, Zea mays subsp. mays
  misc_feature (1)..(1579): Ceres Seq. ID no. 12376418
  misc_feature (1)..(1579): Ortholog of  Ceres SEQ ID NO 15178131 as cited in SEQ ID NO 52639
  misc_feature (1)..(1579): Ortholog of  Ceres SEQ ID NO 12617639 as cited in SEQ ID NO 65219
  misc_feature (1)..(1579): Ortholog of  Ceres SEQ ID NO 14312605 as cited in SEQ ID NO 0
  misc_feature (1)..(1579): Ortholog of  Ceres SEQ ID NO 15176145 as cited in SEQ ID NO 0
agaaccgaacctcgccgccgccgactcctcttccgtctctctctctatcatctactccttgtctccttccctctaaacccgcacccgcagcagcgccgctagggtttgctcaggccccgaaccccacccttggattgctctgatttcgtggcggctgtttcccgaagtttgcagtatggcggggtacccggaggacaaccagcacgagttgaacgggtacgacgaggaggtcgacgaagaggagggacaccccgggaggcgggtaggccgggatgggggctctgggtacgctgatgctgtcggagaggatgggaggggggcgggtggcgactcgttgggaaagatttttgtcggaggcgttgcttgggagacaactgaagaatcattctccaagcattttgagaagtatggggcaataactgattctgtaattatgaaggacaagcatactaagatgcctcgtggatttggatttgttacattttctgatccatctgttatagacaaggttttggaggatgatcacgttatagatggcagaacggttgaagttaagaggactgtcccgagggaagagatgatcaccaaagacggccctaagacaagaaagatcttcatcggtgggctaccaccatctcttactgaagatgaattgaaggatcacttttcatcatatggtaatgtggttgaacatcagataatgcttgatcatagcactgggcgttctagagggtttggttttgtcacatttgaaagtgaagattctgttgaaagggtcatatcagaggggagaatgcgtgatcttggtgggaagcaggttgaaataaagaaggctgaaccaaagaaacatggatctgaccacagcagtaatgggagatcaaaccacggaggtggagcttaccgcaattcttaccgtagtggtggtggagctggtagtggcagcagtggaggcggcggtggttatgggtatggtggtgcttatcgatctgctgcagcaggttatggatatgatggtggcgcaggagcaggatatggctatggtagagggtatggctatggaggcaatgctggctttgggtctagttttggtggtggttatggtggatccatgtatggaggtgctgcctatggtgcatatggtgcctatggtggtggcgcctatggaggaggtgcctacggaggcggtgcctatggaggtggtgctgcctatggtggcgccccaggtggttatggcactggcggatacggcagttatggcggagcaggtagtactggtggtgggagcacaggtgctcggggttctagcaggtatcatccatacggaaaataagcgacgagtttaaactatttttctgggtctcaggtgttcctcttctcctagaagttcagatttcatggcatgtccatctaaacagtgggcattggaacgtagttgggtctaattaagtcaccgtgagaactgtgtaattgctgcagctgagcctccctgcctgccttgtttgcagtacaagctacacataaaacctgtgttgtattctttagtttggtatatgcagagtttagaaccctgagatcgagc

SEQ ID NO: 3918 - protein, 384 aa, Zea mays subsp. mays
  peptide (1)..(384): Ceres Seq. ID no. 12376419
MAGYPEDNQHELNGYDEEVDEEEGHPGRRVGRDGGSGYADAVGEDGRGAGGDSLGKIFVGGVAWETTEESFSKHFEKYGAITDSVIMKDKHTKMPRGFGFVTFSDPSVIDKVLEDDHVIDGRTVEVKRTVPREEMITKDGPKTRKIFIGGLPPSLTEDELKDHFSSYGNVVEHQIMLDHSTGRSRGFGFVTFESEDSVERVISEGRMRDLGGKQVEIKKAEPKKHGSDHSSNGRSNHGGGAYRNSYRSGGGAGSGSSGGGGGYGYGGAYRSAAAGYGYDGGAGAGYGYGRGYGYGGNAGFGSSFGGGYGGSMYGGAAYGAYGAYGGGAYGGGAYGGGAYGGGAAYGGAPGGYGTGGYGSYGGAGSTGGGSTGARGSSRYHPYGK

SEQ ID NO: 3919 - protein, 298 aa, Zea mays subsp. mays
  peptide (1)..(298): Ceres Seq. ID no. 12376420
MKDKHTKMPRGFGFVTFSDPSVIDKVLEDDHVIDGRTVEVKRTVPREEMITKDGPKTRKIFIGGLPPSLTEDELKDHFSSYGNVVEHQIMLDHSTGRSRGFGFVTFESEDSVERVISEGRMRDLGGKQVEIKKAEPKKHGSDHSSNGRSNHGGGAYRNSYRSGGGAGSGSSGGGGGYGYGGAYRSAAAGYGYDGGAGAGYGYGRGYGYGGNAGFGSSFGGGYGGSMYGGAAYGAYGAYGGGAYGGGAYGGGAYGGGAAYGGAPGGYGTGGYGSYGGAGSTGGGSTGARGSSRYHPYGK

SEQ ID NO: 3920 - protein, 291 aa, Zea mays subsp. mays
  peptide (1)..(291): Ceres Seq. ID no. 12376421
MPRGFGFVTFSDPSVIDKVLEDDHVIDGRTVEVKRTVPREEMITKDGPKTRKIFIGGLPPSLTEDELKDHFSSYGNVVEHQIMLDHSTGRSRGFGFVTFESEDSVERVISEGRMRDLGGKQVEIKKAEPKKHGSDHSSNGRSNHGGGAYRNSYRSGGGAGSGSSGGGGGYGYGGAYRSAAAGYGYDGGAGAGYGYGRGYGYGGNAGFGSSFGGGYGGSMYGGAAYGAYGAYGGGAYGGGAYGGGAYGGGAAYGGAPGGYGTGGYGSYGGAGSTGGGSTGARGSSRYHPYGK

SEQ ID NO: 3921 - DNA, 1494 bp, Zea mays subsp. mays
  misc_feature (1)..(1494): Ceres Seq. ID no. 12566181
  misc_feature (1)..(1494): Ortholog of  Ceres SEQ ID NO 15170461 as cited in SEQ ID NO 52853
  misc_feature (1)..(1494): Ortholog of  Ceres SEQ ID NO 14313666 as cited in SEQ ID NO 54618
  misc_feature (1)..(1494): Ortholog of  Ceres SEQ ID NO 13595351 as cited in SEQ ID NO 55934
  misc_feature (1)..(1494): Ortholog of  Ceres SEQ ID NO 13595513 as cited in SEQ ID NO 56663
  misc_feature (1)..(1494): Ortholog of  Ceres SEQ ID NO 13639645 as cited in SEQ ID NO 57488
gcacgagaccattacctagaacatcctaatcaaaaaacaagcaacgagagctactagctagctagcagcactgcgggtacgtacccaactactacacattacgtacgtgagctagctagctagcagctagtgatagagaccagatcagctgcagcggcgacgatggctcctgagaagctgaagctgctcgtcggagtgctggccctgcagttccttctggcagggttccacatcgtctccagggcggcgctcaacatgggcatcagcgagatcgtgttcatggtgtacaggaacctcatctccctcgccttgctcgctccgttcgcctacttcctcgagaagaaagacaggccgccactcaccttctctttgctggtggagttcttcctgctagcgctgtgtgggataactgcgaaccagggcttctacctcctgggcctgtatcacctgtcaccaacctacgcctctgcgatacagaacaccgtccccgcgatcaccttcgccatggccgctgtcctcaggctagagcaggtggacctgagcaggaggcatgggctggccaaggtggtgggcacggtggtgagcatcggaggggccaccgtcataaccctgtacaagggcctgccgctgctccatcacagtgatgtgcacgtcaagtcgtctccggtgacgctgtcctcctccagcggcagccccatcctcaactggactctcggctgcgtcttcatcctcggccactgcctctcctggtccggatggatggtccttcaggtgccggtgctgaagaggtacccagccaggctctcggttctgtcactgacctgcatcttcgggctcctccagttcctggccattgccgccttcaccgaggaggacctgagcaggtggaaggtccgctcaggaggggagctcttcaccatcctatacgctggccttgtggcatccggggtagcgtttgctctgcagatctggtgcatcgacaggggaggcccgctcttcaccgccgtcttccagccagtgcagaccgtggccgtcgccgtcatggcttccgccatcctcggggaccagctctacacgggagggatcattggagctgtgctgatcgtcatcggcctctacttcgtgctgtggggcaagagcgccgagaagaagggcgccaggaacctgctgcaggatcagctggcgcagggagcagacgtgacgcggcacctgctcggcggagaagcttcggcgaaagatgaagaagcagccccggccatgctggcgtgatgatcgtttagtcgtctgtcaattggagcacagcgtagtcctgttgcatttgggaccgtatgagtcgtgtgatttcagctgttccaatctggcaaccaagaacaagtgtgcatgggttgccggtgtggaacagtgtgtagccatgctgctgtgagtctgtactctgttgctgtaatgttctgtgcaagcgtaggtaaggtgtataactataaaatcacttcatcc

SEQ ID NO: 3922 - protein, 368 aa, Zea mays subsp. mays
  peptide (1)..(368): Ceres Seq. ID no. 12566182
MAPEKLKLLVGVLALQFLLAGFHIVSRAALNMGISEIVFMVYRNLISLALLAPFAYFLEKKDRPPLTFSLLVEFFLLALCGITANQGFYLLGLYHLSPTYASAIQNTVPAITFAMAAVLRLEQVDLSRRHGLAKVVGTVVSIGGATVITLYKGLPLLHHSDVHVKSSPVTLSSSSGSPILNWTLGCVFILGHCLSWSGWMVLQVPVLKRYPARLSVLSLTCIFGLLQFLAIAAFTEEDLSRWKVRSGGELFTILYAGLVASGVAFALQIWCIDRGGPLFTAVFQPVQTVAVAVMASAILGDQLYTGGIIGAVLIVIGLYFVLWGKSAEKKGARNLLQDQLAQGADVTRHLLGGEASAKDEEAAPAMLA

SEQ ID NO: 3923 - protein, 337 aa, Zea mays subsp. mays
  peptide (1)..(337): Ceres Seq. ID no. 12566183
MGISEIVFMVYRNLISLALLAPFAYFLEKKDRPPLTFSLLVEFFLLALCGITANQGFYLLGLYHLSPTYASAIQNTVPAITFAMAAVLRLEQVDLSRRHGLAKVVGTVVSIGGATVITLYKGLPLLHHSDVHVKSSPVTLSSSSGSPILNWTLGCVFILGHCLSWSGWMVLQVPVLKRYPARLSVLSLTCIFGLLQFLAIAAFTEEDLSRWKVRSGGELFTILYAGLVASGVAFALQIWCIDRGGPLFTAVFQPVQTVAVAVMASAILGDQLYTGGIIGAVLIVIGLYFVLWGKSAEKKGARNLLQDQLAQGADVTRHLLGGEASAKDEEAAPAMLA

SEQ ID NO: 3924 - protein, 329 aa, Zea mays subsp. mays
  peptide (1)..(329): Ceres Seq. ID no. 12566184
MVYRNLISLALLAPFAYFLEKKDRPPLTFSLLVEFFLLALCGITANQGFYLLGLYHLSPTYASAIQNTVPAITFAMAAVLRLEQVDLSRRHGLAKVVGTVVSIGGATVITLYKGLPLLHHSDVHVKSSPVTLSSSSGSPILNWTLGCVFILGHCLSWSGWMVLQVPVLKRYPARLSVLSLTCIFGLLQFLAIAAFTEEDLSRWKVRSGGELFTILYAGLVASGVAFALQIWCIDRGGPLFTAVFQPVQTVAVAVMASAILGDQLYTGGIIGAVLIVIGLYFVLWGKSAEKKGARNLLQDQLAQGADVTRHLLGGEASAKDEEAAPAMLA

SEQ ID NO: 3925 - DNA, 1592 bp, Zea mays subsp. mays
  misc_feature (1)..(1592): Ceres Seq. ID no. 12345312
  misc_feature (1)..(1592): Ortholog of  Ceres SEQ ID NO 13596512 as cited in SEQ ID NO 62074
gtcgctgcctgctctgcttgctgcgccactccaaacccaacccaaaacccccacacgagatctgcgcagcaatggcgacgcggtgccacgtcctgctcctcctcgccgccgccttcgcgtccctcctcgcgctcgtggccgcggaagggggcgaagaggggccccgcgggcgccggctgctcgtcctcctggacgacctggccgtgcggtcgtcgcactcggccttcttcggctcgctccaggcgcgtgggttcgatctcgacttccgcctcgctgacgatccaaagctctcgctccaccgctacggccagtacctctacgacggcctcgtgctcttcgccccctccacaccacgttttggtggatcagtggaccagaacgcagtcctcgaatttattgatgctgggcatgacatgatcctggcggcagattcctctgcctctgatctcattcgtggcattgcaacagagtgtggggttgattttgatgaggatccagaggcaatggttattgaccatatgaactatgccgtcacagatgttgaaggtgatcacaccttgattgctggtgacgatcttatccattcggatgtgatactagggtctgaaaagattgaggctcctgtattgtttcgaggaattggacacatggctaatccatcaaacagtttggttctgaaggttctatcagcctctccatcagcatattcagctaatccaaagactaagttagcgtctcctccatcgctcactgggtcagctatatcattggtttcggttatgcaggcaagaaataatgctcgggtgctgttatctggatcactcgatctgtttagcaaccggttcctgaagtctggtgttcaaaaggctgatagcaaaacaagatatgagagagctggaaacgagcaatttgtggcagagataagcaaatgggttttccatgagaggggacatctaaaggctgttaatgttaggcatcacaaggttggggagaccaatgaaccaggcatgtaccgcattaatgatgacctggaatactctgttgagatctatgaatggtccggaacaagctggaagccgtatgttgctgatgatgtgcagcttcaatttttcatgatgagcccttacgttctgaaaactatgtcgactgacaacaagggtttgtattcaacaaccttcaaagttccagatgtttatggagttttccagttcaaagttgagtaccaaagactgggatatactggtctgtcttttacaaagcagattccagtacgtccttacagacataatgagtatgagagattcataacatcagcgtacccatactacaccgcctcattttcaacaatgggtgctttcttcgtattctcgtttgtgtacctgtaccacaaataaaggactcatgggagcgcacaagtctctggaggctgacgtgaccaagatctgtgggcactgaatgttgtgctataagccaagagttacccggcgccaattttatggaaccatgtttttgtactgccaacttagataacatttgacgaccgtgaccgcactcatgggaaatttactcgtgctaggatgttcgatctgccg

SEQ ID NO: 3926 - protein, 463 aa, Zea mays subsp. mays
  peptide (1)..(463): Ceres Seq. ID no. 12345313
RCLLCLLRHSKPNPKPPHEICAAMATRCHVLLLLAAAFASLLALVAAEGGEEGPRGRRLLVLLDDLAVRSSHSAFFGSLQARGFDLDFRLADDPKLSLHRYGQYLYDGLVLFAPSTPRFGGSVDQNAVLEFIDAGHDMILAADSSASDLIRGIATECGVDFDEDPEAMVIDHMNYAVTDVEGDHTLIAGDDLIHSDVILGSEKIEAPVLFRGIGHMANPSNSLVLKVLSASPSAYSANPKTKLASPPSLTGSAISLVSVMQARNNARVLLSGSLDLFSNRFLKSGVQKADSKTRYERAGNEQFVAEISKWVFHERGHLKAVNVRHHKVGETNEPGMYRINDDLEYSVEIYEWSGTSWKPYVADDVQLQFFMMSPYVLKTMSTDNKGLYSTTFKVPDVYGVFQFKVEYQRLGYTGLSFTKQIPVRPYRHNEYERFITSAYPYYTASFSTMGAFFVFSFVYLYHK

SEQ ID NO: 3927 - protein, 440 aa, Zea mays subsp. mays
  peptide (1)..(440): Ceres Seq. ID no. 12345314
MATRCHVLLLLAAAFASLLALVAAEGGEEGPRGRRLLVLLDDLAVRSSHSAFFGSLQARGFDLDFRLADDPKLSLHRYGQYLYDGLVLFAPSTPRFGGSVDQNAVLEFIDAGHDMILAADSSASDLIRGIATECGVDFDEDPEAMVIDHMNYAVTDVEGDHTLIAGDDLIHSDVILGSEKIEAPVLFRGIGHMANPSNSLVLKVLSASPSAYSANPKTKLASPPSLTGSAISLVSVMQARNNARVLLSGSLDLFSNRFLKSGVQKADSKTRYERAGNEQFVAEISKWVFHERGHLKAVNVRHHKVGETNEPGMYRINDDLEYSVEIYEWSGTSWKPYVADDVQLQFFMMSPYVLKTMSTDNKGLYSTTFKVPDVYGVFQFKVEYQRLGYTGLSFTKQIPVRPYRHNEYERFITSAYPYYTASFSTMGAFFVFSFVYLYHK

SEQ ID NO: 3928 - protein, 326 aa, Zea mays subsp. mays
  peptide (1)..(326): Ceres Seq. ID no. 12345315
MILAADSSASDLIRGIATECGVDFDEDPEAMVIDHMNYAVTDVEGDHTLIAGDDLIHSDVILGSEKIEAPVLFRGIGHMANPSNSLVLKVLSASPSAYSANPKTKLASPPSLTGSAISLVSVMQARNNARVLLSGSLDLFSNRFLKSGVQKADSKTRYERAGNEQFVAEISKWVFHERGHLKAVNVRHHKVGETNEPGMYRINDDLEYSVEIYEWSGTSWKPYVADDVQLQFFMMSPYVLKTMSTDNKGLYSTTFKVPDVYGVFQFKVEYQRLGYTGLSFTKQIPVRPYRHNEYERFITSAYPYYTASFSTMGAFFVFSFVYLYHK

SEQ ID NO: 3929 - DNA, 1252 bp, Zea mays subsp. mays
  misc_feature (1)..(1252): Ceres Seq. ID no. 12577727
  misc_feature (1)..(1252): Ortholog of  Ceres SEQ ID NO 12609965 as cited in SEQ ID NO 55883
  misc_feature (1)..(1252): Ortholog of  Ceres SEQ ID NO 13596393 as cited in SEQ ID NO 62144
  misc_feature (1)..(1252): Ortholog of  Ceres SEQ ID NO 13591076 as cited in SEQ ID NO 63757
  misc_feature (1)..(1252): Ortholog of  Ceres SEQ ID NO 13599575 as cited in SEQ ID NO 0
gcacgagaccattacctagaacatcctaatcgaaaaatcgaattcctcgtcaccaacacgcacgcggcctctgcctccgcgatccgcgtctccatcctgaggctccgaatcgatctcccttcctcaccaaaccggagcacttcggaggccggacccggcgagaagcgaccgaccgcagccagctcacgtctccctcttcatccaccatgctgagggtcgcgggcaggcgcctctcgtccgctctcgcctggcgccccgccgccgccgcctcaggctcccggggccctctcgccggtacactacccggccgcgacgacgacgacacacgcgactgcagggcgcgtttcgccatcgaatctcccttcttcgccgctgccagagggttttctgcagagactcttgctccaagaaaccaggatgtgggcttatccgagctcccagcaactgtggcagctgtgaagaatccaagtggaaaaatcgtgtatgatgagtataaccatgagcgctacccgcctggagaccccagcaagcgtgcatttgcctactttgtgctgagtggtgggaggttcatttacgcatctttgctgcgacttctcgtcttaaaatttgtcctgagcatgtcagcaagtaaggatgttctcgcgcttgcctcacttgaggttgacctctcaagcattgagcctggaaccacggtgacggtgaagtggcgtggcaagccggtcttcataaggcggaggacagaggatgatatcaagttggccaacagtgttgacgtcgcatccctccgccacccagagcaggatgcagagcgtgtcaagaaccccgaatggctggtcgtcattggggtctgcactcacctgggctgcatcccgctccctaatgcaggagactttggtggctggttctgcccgtgccacggctcgcactacgacatttctggtaggatccgcaagggcccggcacccttcaacctggaagtgccgacatacagcttcttggaagagaacaagcttctcatcggctgagattgctgttagtgttgttcgtgtggccctgtcgtttttgtttgatcaacaacttcaccttttctcttgcctgggttagggcatacctttgtgggttgtttctgagtgcagtgttgttgctagcacctgacagtaatgaataacctgctgctacataaaggatactgttaattgttgtcaaatttggttctgtttttttcctgacagcaatgaacaaacttctgctg

SEQ ID NO: 3930 - protein, 272 aa, Zea mays subsp. mays; identical to SEQ ID NO: 3119
  peptide (1)..(272): Ceres Seq. ID no. 12577728

SEQ ID NO: 3931 - DNA, 909 bp, Zea mays subsp. mays
  misc_feature (1)..(909): Ceres Seq. ID no. 12403151
  misc_feature (1)..(909): Ortholog of  Ceres SEQ ID NO 13594929 as cited in SEQ ID NO 55800
ctccgctccgcagctcatggcttcctcggtctccctccgtggcgccatcctccagcgcccccacctcaggccccgccccgacgcccgccgcgcgcccacgacgaggcgccgcgccgtgcctgcaaagatctgctgcatcggatgggaaccccgagggcatcctgggcgcgccgcagggcggccacatcgcgcgcctcgagttccgccgccgcctcgagagggactccgaggcgcgcgaggacttcgagcgccaggtgcgcgaggagaaggagcggcggcgcagcgagcgcgaggcgcgggtgatcccggacacggacgccggcctcgtcgagttcttcctcgacaccgacgcgcgcgagatcgagatcgagatcggcaggctgcggcccaggctcagccaggacttcttcggccacgtctcgcgcgagatagcgcagatcaaatttgcagtcaccaggacagcggagatggaagacagactgatcgagctggaggcgatgcagaaggttcttctcgagggagttgaggcgtacgacaagttgcagaacgaccttgttacagcgaaagaacggctcatgaagattctgcagtcaagtgacagaaaatcgacactgctggaaatggtggagcggaacgagctcaatatatccatactaacacttctcgatgagaacattgcgagcgcgaagacgagtaatcaggatgaggcggccgctttcatggaggacgtgagatcatctcttgtgaaatatataacaatatagatctgggacgcttttacataccaatggttcgttcattgcttgggcatggtttgatcgtttttagaagtgtggttgctgttcgttcattgtgaaatatataacaatataaatctggattatttccgcctgtttgtagttgggctgc

SEQ ID NO: 3932 - protein, 253 aa, Zea mays subsp. mays
  peptide (1)..(253): Ceres Seq. ID no. 12403152
PLRSSWLPRSPSVAPSSSAPTSGPAPTPAARPRRGAAPCLQRSAASDGNPEGILGAPQGGHIARLEFRRRLERDSEAREDFERQVREEKERRRSEREARVIPDTDAGLVEFFLDTDAREIEIEIGRLRPRLSQDFFGHVSREIAQIKFAVTRTAEMEDRLIELEAMQKVLLEGVEAYDKLQNDLVTAKERLMKILQSSDRKSTLLEMVERNELNISILTLLDENIASAKTSNQDEAAAFMEDVRSSLVKYITI

SEQ ID NO: 3933 - protein, 174 aa, Zea mays subsp. mays
  peptide (1)..(174): Ceres Seq. ID no. 12403153
SAPQLMASSVSLRGAILQRPHLRPRPDARRAPTTRRRAVPAKICCIGWEPRGHPGRAAGRPHRAPRVPPPPREGLRGARGLRAPGARGEGAAAQRARGAGDPGHGRRPRRVLPRHRRARDRDRDRQAAAQAQPGLLRPRLARDSADQICSHQDSGDGRQTDRAGGDAEGSSRGS

SEQ ID NO: 3934 - protein, 169 aa, Zea mays subsp. mays
  peptide (1)..(169): Ceres Seq. ID no. 12403154
MASSVSLRGAILQRPHLRPRPDARRAPTTRRRAVPAKICCIGWEPRGHPGRAAGRPHRAPRVPPPPREGLRGARGLRAPGARGEGAAAQRARGAGDPGHGRRPRRVLPRHRRARDRDRDRQAAAQAQPGLLRPRLARDSADQICSHQDSGDGRQTDRAGGDAEGSSRGS

SEQ ID NO: 3935 - DNA, 1104 bp, Zea mays subsp. mays
  misc_feature (1)..(1104): Ceres Seq. ID no. 12379137
  misc_feature (1)..(1104): Ortholog of  Ceres SEQ ID NO 13598499 as cited in SEQ ID NO 64013
tcatgcagttcacacactctcctctgacctctcctctcctctcctctcgacctctcccttctatctagccaccgaagccaagaccaaggaacggcatggctcagctgctgcacctgccggacctcgcggcggcgcggccgccggcgcggaggaggaggggtgtggcggtggcggtggcgggggggcgcgtcaagcagggggaggcggggcgggtgatcagggtcgccgaccccgtgcgggagggccggatgccgcctcctcttcttgccgcgccggccacgccgtcggagtctccgccggtcgcggggaggcgcggggacgaggacgacgaggtgaggcagaggtactacctcaacatggggtacgcgatccggacgctcagggaggagctccccgatgtgctctacaaggagcccagctttgacatctacagagatgacattgtcttcacagaccctttgaatacattcaagggcctggaaaattacaagacgatattctgggcgcttcgttttactggccggatcttcttcaaggcattgtgggttgatgtagttagtatatggcagcctgctgagaacattatcatgattcgctggatcgcccacggcattcctcgagtaccttgggatgggcatggccgcttcgatggtgcttctgtgtataaactcgacaaggatggtaagatctacgagcataaggtccacaatgttgctatgaatccaccaacgaagttcaaggtcctaccagtccatgagctaatcagatcacttggttgcccctctactgcaaaaccaacttattttgaagcttcatcacaatatctgtgcgctgggccatcttatttgagattagcttggataagatgctacatctcattgtgccgcatgctttcgctcgcaaatctgggagaaggatagcctgggtttagtgatacctccaaattttgtattttcagtatgacagcacacatgttactaagtactattgagtcatgacagttgtatatatgaacactgatagtttatagaataagacctcttagttaaggtgtacaacacttgttattgattgttataagcatcagtcagcaaactagtcaag

SEQ ID NO: 3936 - protein, 274 aa, Zea mays subsp. mays
  peptide (1)..(274): Ceres Seq. ID no. 12379138
MAQLLHLPDLAAARPPARRRRGVAVAVAGGRVKQGEAGRVIRVADPVREGRMPPPLLAAPATPSESPPVAGRRGDEDDEVRQRYYLNMGYAIRTLREELPDVLYKEPSFDIYRDDIVFTDPLNTFKGLENYKTIFWALRFTGRIFFKALWVDVVSIWQPAENIIMIRWIAHGIPRVPWDGHGRFDGASVYKLDKDGKIYEHKVHNVAMNPPTKFKVLPVHELIRSLGCPSTAKPTYFEASSQYLCAGPSYLRLAWIRCYISLCRMLSLANLGEG

SEQ ID NO: 3937 - protein, 223 aa, Zea mays subsp. mays
  peptide (1)..(223): Ceres Seq. ID no. 12379139
MPPPLLAAPATPSESPPVAGRRGDEDDEVRQRYYLNMGYAIRTLREELPDVLYKEPSFDIYRDDIVFTDPLNTFKGLENYKTIFWALRFTGRIFFKALWVDVVSIWQPAENIIMIRWIAHGIPRVPWDGHGRFDGASVYKLDKDGKIYEHKVHNVAMNPPTKFKVLPVHELIRSLGCPSTAKPTYFEASSQYLCAGPSYLRLAWIRCYISLCRMLSLANLGEG

SEQ ID NO: 3938 - protein, 187 aa, Zea mays subsp. mays
  peptide (1)..(187): Ceres Seq. ID no. 12379140
MGYAIRTLREELPDVLYKEPSFDIYRDDIVFTDPLNTFKGLENYKTIFWALRFTGRIFFKALWVDVVSIWQPAENIIMIRWIAHGIPRVPWDGHGRFDGASVYKLDKDGKIYEHKVHNVAMNPPTKFKVLPVHELIRSLGCPSTAKPTYFEASSQYLCAGPSYLRLAWIRCYISLCRMLSLANLGEG

SEQ ID NO: 3939 - DNA, 964 bp, Zea mays subsp. mays
  misc_feature (1)..(964): Ceres Seq. ID no. 12403052
  misc_feature (1)..(964): Ortholog of  Ceres SEQ ID NO 14308278 as cited in SEQ ID NO 55403
  misc_feature (1)..(964): Ortholog of  Ceres SEQ ID NO 12618176 as cited in SEQ ID NO 64489
  misc_feature (1)..(964): Ortholog of  Ceres SEQ ID NO 15179231 as cited in SEQ ID NO 0
aaattctccctttccacaagaacatcacacggcgatagcaaaaccttccgtcggaggatggcttccgccggcgctggagaaggcaaggagacggggacggctgccgggagcagcctccacagcaagactctcctcaagagccaaccactgtaccagtacatactggaatccaccgtcttcccacgcgagccggactgcctgcgggagctccgcgtcgccaccgccacccaccccatggcgggcatggctgcgtcgccggacgaggtgcagctgctgcagctcctgatcgagattcttggcgtcaagaacgccatcgaggttggcgtcttcaccgggtactcgctgctcgccaccgccctcgccctccccgacgacggcaagattgtggccatcgacgttacccgcgagagctacgaccagattgggtcgccggtgatcgagaaggccggcgtggcgcacaagatcgacttccgcgtcgggctcgcgctgcccgtgctggaccagatggtttccgaggaggggaacaagggcaagttcgacttcgcgttcgtggacgcggacaaggtgaacttcctcaactaccacgagcggctgctgcagctgctcagggtcgggggcctcatcgcctacgacaacacgctgtggggcgggtccgtggccgcgccccacgacgagccgctctccgagcgggaccgcgcgctcgctgcggccaccagggagttcaacgcggccgtggccgccgatccccgcgttcacgtctgccaggtcgccatcgccgacgggctcacgctgtgccgccgcgtcgcctgatccgtatccggttatccgcctcgaaatgcagcagagctgtgggctgtcgctgacactgctgtgagctctgtgcttgaaatggccatggtctgtaatagcgaactgggcttgagtgaaaataaatccaccagcgcgctagcgtgtgtcagcgacc

SEQ ID NO: 3940 - protein, 269 aa, Zea mays subsp. mays
  peptide (1)..(269): Ceres Seq. ID no. 12403053
KFSLSTRTSHGDSKTFRRRMASAGAGEGKETGTAAGSSLHSKTLLKSQPLYQYILESTVFPREPDCLRELRVATATHPMAGMAASPDEVQLLQLLIEILGVKNAIEVGVFTGYSLLATALALPDDGKIVAIDVTRESYDQIGSPVIEKAGVAHKIDFRVGLALPVLDQMVSEEGNKGKFDFAFVDADKVNFLNYHERLLQLLRVGGLIAYDNTLWGGSVAAPHDEPLSERDRALAAATREFNAAVAADPRVHVCQVAIADGLTLCRRVA

SEQ ID NO: 3941 - protein, 250 aa, Zea mays subsp. mays
  peptide (1)..(250): Ceres Seq. ID no. 12403054
MASAGAGEGKETGTAAGSSLHSKTLLKSQPLYQYILESTVFPREPDCLRELRVATATHPMAGMAASPDEVQLLQLLIEILGVKNAIEVGVFTGYSLLATALALPDDGKIVAIDVTRESYDQIGSPVIEKAGVAHKIDFRVGLALPVLDQMVSEEGNKGKFDFAFVDADKVNFLNYHERLLQLLRVGGLIAYDNTLWGGSVAAPHDEPLSERDRALAAATREFNAAVAADPRVHVCQVAIADGLTLCRRVA

SEQ ID NO: 3942 - protein, 191 aa, Zea mays subsp. mays
  peptide (1)..(191): Ceres Seq. ID no. 12403055
MAGMAASPDEVQLLQLLIEILGVKNAIEVGVFTGYSLLATALALPDDGKIVAIDVTRESYDQIGSPVIEKAGVAHKIDFRVGLALPVLDQMVSEEGNKGKFDFAFVDADKVNFLNYHERLLQLLRVGGLIAYDNTLWGGSVAAPHDEPLSERDRALAAATREFNAAVAADPRVHVCQVAIADGLTLCRRVA

SEQ ID NO: 3943 - DNA, 868 bp, Zea mays subsp. mays
  misc_feature (1)..(868): Ceres Seq. ID no. 12365359
  misc_feature (1)..(868): Ortholog of  Ceres SEQ ID NO 14309373 as cited in SEQ ID NO 0
tctgccctctgctcaaaatttcccccaaaacttctcctcttgaggaaggcagcccgagcgagcgcgctgcaatggcggactcgtcggcgccgacgagagtgatgatggcggtgaacgagtcgtcgctcaaggggtacccgcacccctccatcagctgtcgcaccgccttcgactggacgctctccaagctcgtccgctccaaccctgggggcttccacttcctcttcgtccacgttcatgtccccgacgaggacggatttgatgacatggatagcatctatgcttcgccggaggactttcaccaaatgaagcagagagacaagataagagggcttcatttgctcgagtactttgtaaaccaatgccatcagttagggataaaatgcgaggcatggatcagacatggagatccaaaggaggttatctgcagcgaagtgaagagagtccagcctgaccttctagttgtgggaagtaggggtcttgggccatttcagagggttttcgtgggcacggtgagcgagttctgcgttaagcatgccgaatgccccgtcatcaccataaaacggaacgctaccgaagctcctcaggaccctgtcgacgattgatgcttccaagccaagccatgccatgtcactggagaatgagatgttcttcttcactgcttttataatgggttgatgtacaaaatacgatatggaagtggtgcctggaactagttctcggagggttccaactcttgcacactgcgcccccaaaaactagagttgaagatgtaaaacgccgtcgtccgccgagggacgacgagagattgtacgtgatacatcgatcgagtctcgtgaacctaaaaagctgccgctacattattgtt

SEQ ID NO: 3944 - protein, 200 aa, Zea mays subsp. mays
  peptide (1)..(200): Ceres Seq. ID no. 12365360
CPLLKISPKTSPLEEGSPSERAAMADSSAPTRVMMAVNESSLKGYPHPSISCRTAFDWTLSKLVRSNPGGFHFLFVHVHVPDEDGFDDMDSIYASPEDFHQMKQRDKIRGLHLLEYFVNQCHQLGIKCEAWIRHGDPKEVICSEVKRVQPDLLVVGSRGLGPFQRVFVGTVSEFCVKHAECPVITIKRNATEAPQDPVDD

SEQ ID NO: 3945 - protein, 177 aa, Zea mays subsp. mays
  peptide (1)..(177): Ceres Seq. ID no. 12365361
MADSSAPTRVMMAVNESSLKGYPHPSISCRTAFDWTLSKLVRSNPGGFHFLFVHVHVPDEDGFDDMDSIYASPEDFHQMKQRDKIRGLHLLEYFVNQCHQLGIKCEAWIRHGDPKEVICSEVKRVQPDLLVVGSRGLGPFQRVFVGTVSEFCVKHAECPVITIKRNATEAPQDPVDD

SEQ ID NO: 3946 - protein, 167 aa, Zea mays subsp. mays
  peptide (1)..(167): Ceres Seq. ID no. 12365362
MMAVNESSLKGYPHPSISCRTAFDWTLSKLVRSNPGGFHFLFVHVHVPDEDGFDDMDSIYASPEDFHQMKQRDKIRGLHLLEYFVNQCHQLGIKCEAWIRHGDPKEVICSEVKRVQPDLLVVGSRGLGPFQRVFVGTVSEFCVKHAECPVITIKRNATEAPQDPVDD

SEQ ID NO: 3947 - DNA, 937 bp, Zea mays subsp. mays
  misc_feature (1)..(937): Ceres Seq. ID no. 12403587
  misc_feature (1)..(937): Ortholog of  Ceres SEQ ID NO 12633896 as cited in SEQ ID NO 0
tttttcttccgttgctccatgtccatggcttcccgtccgcctcttcgtcgtcgacgtcgtcttcccctcgtcccgctcctcgttctgctctgcctctccccggcatgcgccgccgggagagtcccggtttcggtctactacgaagcgctgtgcccgttctgctccgcgtttgtcgtgaacgacctctccagggtcttccgcgacgggatctcctccatcgctgagctgcggctcgtccctttcggcaatgggcgtgtctcggccgacggaaccgtcacttgccagcatggagaggacgagtgccaactcaacgctatagaagcttgcgtgatcagaatatggcctgacgcggagcagcattttcctttcattcaatgcgttgagcatttagcactgactcggaaatgggacgcctggcagtcttgctttcatgaaactggtctcgcttatcaacctgctattgactgctacatctcagggtatggaaggcagctcgtactccagtatgctgccgagacaaatgctctgcagcctcctcatcggtttgtaccttgggtggtcgtcaacggcaaaccgctcggtgatgattacatgaactttgaggcatacatctgcagcgcttatgacggcaatcttccaaaggcatgcaaggggaagcacctagcaattgctcaggagacgaaagccagccgaggagacaaggtgtgcccagctagcaaaactatcagctaactcgcgtgcgaaaatttattttttttggaatttggataaaactgagtactactttgagtttggttctaagaggttctgcgtttctgctgtcttgttgggtctccgtctattttgaagttagttgaaataacagtgctgtcaaacctttgacagaaaaacatcaaatgcaaacatttcatgttgatattcactagcattttcaggc

SEQ ID NO: 3948 - protein, 243 aa, Zea mays subsp. mays
  peptide (1)..(243): Ceres Seq. ID no. 12403588
FFFRCSMSMASRPPLRRRRRLPLVPLLVLLCLSPACAAGRVPVSVYYEALCPFCSAFVVNDLSRVFRDGISSIAELRLVPFGNGRVSADGTVTCQHGEDECQLNAIEACVIRIWPDAEQHFPFIQCVEHLALTRKWDAWQSCFHETGLAYQPAIDCYISGYGRQLVLQYAAETNALQPPHRFVPWVVVNGKPLGDDYMNFEAYICSAYDGNLPKACKGKHLAIAQETKASRGDKVCPASKTIS

SEQ ID NO: 3949 - protein, 237 aa, Zea mays subsp. mays
  peptide (1)..(237): Ceres Seq. ID no. 12403589
MSMASRPPLRRRRRLPLVPLLVLLCLSPACAAGRVPVSVYYEALCPFCSAFVVNDLSRVFRDGISSIAELRLVPFGNGRVSADGTVTCQHGEDECQLNAIEACVIRIWPDAEQHFPFIQCVEHLALTRKWDAWQSCFHETGLAYQPAIDCYISGYGRQLVLQYAAETNALQPPHRFVPWVVVNGKPLGDDYMNFEAYICSAYDGNLPKACKGKHLAIAQETKASRGDKVCPASKTIS

SEQ ID NO: 3950 - protein, 235 aa, Zea mays subsp. mays
  peptide (1)..(235): Ceres Seq. ID no. 12403590
MASRPPLRRRRRLPLVPLLVLLCLSPACAAGRVPVSVYYEALCPFCSAFVVNDLSRVFRDGISSIAELRLVPFGNGRVSADGTVTCQHGEDECQLNAIEACVIRIWPDAEQHFPFIQCVEHLALTRKWDAWQSCFHETGLAYQPAIDCYISGYGRQLVLQYAAETNALQPPHRFVPWVVVNGKPLGDDYMNFEAYICSAYDGNLPKACKGKHLAIAQETKASRGDKVCPASKTIS

SEQ ID NO: 3951 - DNA, 2365 bp, Zea mays subsp. mays
  misc_feature (1)..(2365): Ceres Seq. ID no. 13635021
  misc_feature (1)..(2365): Ortholog of  Ceres SEQ ID NO 14303276 as cited in SEQ ID NO 1264
  misc_feature (1)..(2365): Ortholog of  Ceres SEQ ID NO 15170536 as cited in SEQ ID NO 52791
  misc_feature (1)..(2365): Ortholog of  Ceres SEQ ID NO 12465083 as cited in SEQ ID NO 68239
  misc_feature (1)..(2365): Ortholog of  Ceres SEQ ID NO 14309653 as cited in SEQ ID NO 0
cgagcaagcagttcgaaacaaggatcgatccaggagcttccagaaggcgaggaggaagagggagaagggcgcgcgcgcgcgcagcgttcaagtggtgctggtgtcggccatggatcgggttcgtggatccgcgttcctgctcggcgtcctgctcgcaggatccctgttcgcgttttcagttgctaaggaggagaccaagaagctcggcactgtgattggtatcgatctcggaaccacctactcctgtgtgggtgtgtacaagaacggtcatgtcgagatcatcgccaatgaccagggtaaccgtatcacaccctcatgggttgccttcaccgatagcgagaggctcatcggtgaggctgccaagaaccaggcagctgtcaaccctgagaggaccatctttgacgtcaagcgtctcatcggaagaaagtttcaggataaggaagtccagagggacatgaaacttgtcccctacaagattattaacaaggatggcaagccatacattcaggtcaagatcaaggatggggagaacaaggtcttcagccccgaggagatcagtgccatgattcttggcaagatgaaggatactgctgaggcgtaccttggcaagaagatcaacgatgccgtcgtcactgtccctgcatacttcaatgatgcgcagaggcaggcaaccaaggatgctggtgtcattgccggcctcaatgttgctaggatcatcaatgagccaactgctgctgctattgcctatggtttggacaagaagggtggcgagaagaacatccttgtctttgaccttggtggtggtacttttgatgtcagtatcttgaccattgataacggtgtgtttgaggtgctggccaccaatggtgacacccatcttggaggtgaggattttgaccagaggatcatggaatacttcatcaagttgatcaagaagaagtacagcaaggacatcagcaaggacaaccgtgctcttggaaagctgaggagggaagctgagcgtgccaagagagcccttagcaaccagcaccaggtccgagttgagatcgagtccctctttgacgggaccgacttctcggagccgctgacccgtgccaggtttgaggagctgaacaacgatctgttccgcaagactatgggtcctgtcaagaaggccatggaggacgctggccttgagaagagccagatccacgagatcgtcctggttggtggaagcaccaggattcccaaggtccagcagctcctgaaggactacttcaatggcaaggagcccaacaagggtgtgaaccctgatgaggctgttgcctttggtgccgcggtgcagggaagcatcttgagcggcgagggtggtgacgagacaaaagatatcctcctccttgacgtggctcctctcaccctgggtattgagaccgtcggtggagtcatgaccaagttgatcccgaggaacactgtcatcccgaccaagaaatcgcaggtgttcaccacctaccaggaccagcagaccactgtctccatccaggtctttgagggtgagcgcagcatgaccaaggactgccgtcttctgggcaagttcgacctcaatggcattccgtcagctccgaggggcacaccccagatcgaggtgaccttcgaggtggacgccaacggtatcctgaacgtgaaggcggaggacaagggcacgggcaagtcggagaagatcacgatcacgaacgagaaggggcggctgagccaggaggagatcgaccgcatggtgcgggaggcggaggagttcgcggaggaggacaagaaggtgaaggagcggatcgacgcccgcaaccagctggagacgtacgtgtacaacatgaagaacacggtgggcgacaaggacaagctcgcggacaagctggaggcggaggagaaggagaaggtggaggaggccctcaaggaggcgctcgagtggctggacgacaaccagtccgccgagaaggaggactacgaggagaagctcaaggaggtggaggccgtgtgcaaccccatcgtgtcggccgtgtaccagcggtcgggcggcgcccccggtggcgatgccgacggcggcgtcgacgacgaccacgacgagctgtagatggtggtggggagcggtgacgtggagtgccgggaaccaagccaaattttgtaatgatgtttaggagggagggtggtggacaaaaaaactaatcttggtgctgctctgccaatagacgggctgagcatagaactttttttcccttctacttccttgtgattgttctttttatagaggattcgcattgcagtgtaatgtaaaaaaaagaagacgcgcttctgaaacttgttactacaagttaataatgaaatggtgcattgcatc

SEQ ID NO: 3952 - protein, 699 aa, Zea mays subsp. mays
  peptide (1)..(699): Ceres Seq. ID no. 13635022
EQAVRNKDRSRSFQKARRKREKGARARSVQVVLVSAMDRVRGSAFLLGVLLAGSLFAFSVAKEETKKLGTVIGIDLGTTYSCVGVYKNGHVEIIANDQGNRITPSWVAFTDSERLIGEAAKNQAAVNPERTIFDVKRLIGRKFQDKEVQRDMKLVPYKIINKDGKPYIQVKIKDGENKVFSPEEISAMILGKMKDTAEAYLGKKINDAVVTVPAYFNDAQRQATKDAGVIAGLNVARIINEPTAAAIAYGLDKKGGEKNILVFDLGGGTFDVSILTIDNGVFEVLATNGDTHLGGEDFDQRIMEYFIKLIKKKYSKDISKDNRALGKLRREAERAKRALSNQHQVRVEIESLFDGTDFSEPLTRARFEELNNDLFRKTMGPVKKAMEDAGLEKSQIHEIVLVGGSTRIPKVQQLLKDYFNGKEPNKGVNPDEAVAFGAAVQGSILSGEGGDETKDILLLDVAPLTLGIETVGGVMTKLIPRNTVIPTKKSQVFTTYQDQQTTVSIQVFEGERSMTKDCRLLGKFDLNGIPSAPRGTPQIEVTFEVDANGILNVKAEDKGTGKSEKITITNEKGRLSQEEIDRMVREAEEFAEEDKKVKERIDARNQLETYVYNMKNTVGDKDKLADKLEAEEKEKVEEALKEALEWLDDNQSAEKEDYEEKLKEVEAVCNPIVSAVYQRSGGAPGGDADGGVDDDHDEL

SEQ ID NO: 3953 - protein, 663 aa, Zea mays subsp. mays
  peptide (1)..(663): Ceres Seq. ID no. 13635023
MDRVRGSAFLLGVLLAGSLFAFSVAKEETKKLGTVIGIDLGTTYSCVGVYKNGHVEIIANDQGNRITPSWVAFTDSERLIGEAAKNQAAVNPERTIFDVKRLIGRKFQDKEVQRDMKLVPYKIINKDGKPYIQVKIKDGENKVFSPEEISAMILGKMKDTAEAYLGKKINDAVVTVPAYFNDAQRQATKDAGVIAGLNVARIINEPTAAAIAYGLDKKGGEKNILVFDLGGGTFDVSILTIDNGVFEVLATNGDTHLGGEDFDQRIMEYFIKLIKKKYSKDISKDNRALGKLRREAERAKRALSNQHQVRVEIESLFDGTDFSEPLTRARFEELNNDLFRKTMGPVKKAMEDAGLEKSQIHEIVLVGGSTRIPKVQQLLKDYFNGKEPNKGVNPDEAVAFGAAVQGSILSGEGGDETKDILLLDVAPLTLGIETVGGVMTKLIPRNTVIPTKKSQVFTTYQDQQTTVSIQVFEGERSMTKDCRLLGKFDLNGIPSAPRGTPQIEVTFEVDANGILNVKAEDKGTGKSEKITITNEKGRLSQEEIDRMVREAEEFAEEDKKVKERIDARNQLETYVYNMKNTVGDKDKLADKLEAEEKEKVEEALKEALEWLDDNQSAEKEDYEEKLKEVEAVCNPIVSAVYQRSGGAPGGDADGGVDDDHDEL

SEQ ID NO: 3954 - protein, 548 aa, Zea mays subsp. mays
  peptide (1)..(548): Ceres Seq. ID no. 13635024
MKLVPYKIINKDGKPYIQVKIKDGENKVFSPEEISAMILGKMKDTAEAYLGKKINDAVVTVPAYFNDAQRQATKDAGVIAGLNVARIINEPTAAAIAYGLDKKGGEKNILVFDLGGGTFDVSILTIDNGVFEVLATNGDTHLGGEDFDQRIMEYFIKLIKKKYSKDISKDNRALGKLRREAERAKRALSNQHQVRVEIESLFDGTDFSEPLTRARFEELNNDLFRKTMGPVKKAMEDAGLEKSQIHEIVLVGGSTRIPKVQQLLKDYFNGKEPNKGVNPDEAVAFGAAVQGSILSGEGGDETKDILLLDVAPLTLGIETVGGVMTKLIPRNTVIPTKKSQVFTTYQDQQTTVSIQVFEGERSMTKDCRLLGKFDLNGIPSAPRGTPQIEVTFEVDANGILNVKAEDKGTGKSEKITITNEKGRLSQEEIDRMVREAEEFAEEDKKVKERIDARNQLETYVYNMKNTVGDKDKLADKLEAEEKEKVEEALKEALEWLDDNQSAEKEDYEEKLKEVEAVCNPIVSAVYQRSGGAPGGDADGGVDDDHDEL

SEQ ID NO: 3955 - DNA, 2187 bp, Zea mays subsp. mays
  misc_feature (1)..(2187): Ceres Seq. ID no. 12362634
  misc_feature (1)..(2187): Ortholog of  Ceres SEQ ID NO 15169092 as cited in SEQ ID NO 60430
  misc_feature (1)..(2187): Ortholog of  Ceres SEQ ID NO 14303680 as cited in SEQ ID NO 66019
  misc_feature (1)..(2187): Ortholog of  Ceres SEQ ID NO 15224940 as cited in SEQ ID NO 0
gcacgagaccattacctagaacatcctaatcgaaaactgcctctgacgaaaactctcctctgactccgctccacccccttctctcacttgtctatcggcggccgtcacctccgctgggctgctggcctcctcactttgcagttgctgcacaggcaagacacggaggcaggcaccacgagtccacgacgctcgctcgcgcgctccgtgaatcccctcgtgactcgtgagggctcgaggcccgacgggaggacgaggaggcaagaaccctagcgccggcgccggcggcccgtaaggctgctgagtgaaaatgggagtggcaggtcacaacgatccattgttaggtgaaacgacatgtgggtctttgctgcagcaacttcagctgatatgggatgaggttggcgaaagtgatgaagatcgtgacaagatgttacttcagctagagcaagagtgcttagatgtttataggagaaaggttgatcaggcttctagcctccaggtcatgtctcctccaacagctttccaactccaaatcggaactgactagactcctttctgcattaggagagtcatctatttctggtgctcctgacaagacatctggtacaatcaaggagcaactagcagctatatcaccatctttagagacactccgcaggaaaaaagagagtagggtgaaagagtttgctcatgtacaacttcagattcagatacttcgtgatgaaattgctggggatctacatattggtgaacagttggaaacaccccatgttaatgcggatgatctttcagtgaggagattaaatgaatatctttctgaactacaagccctgcaaaaggaaaagagtactaggctctcaaggattcttgaatccgtgagttcagtgcacgatctctgttctgtacttggcatggattttgtgggcactgttactaaagttcatccaagtcttgatgactctgttggtgtccaatccaagagcattagtggcgaaacaatatccaagctgtctaaaatggtgattgtacttgaagaagaaaaatcgaagaggtttgcaaagattcaagctctagcttcccagctatctgatctttggaacttaatggattctcctgtggaggaacagcaaccttttcgtcacgtaacatgcataatgtcctcagcattggatgatgtgatagttccaggagctctggctcttgatgtaattcagcaggcggaactcgaagttgaaaggcttgatcagctaaaagctagtaggatgaaggatattgcattcaagaaacagactgaacttgaagatatatatgcccgggctcatgttgcagtagattctagtgctgcaagagataggataatgtctattattgagtccagtagtttcgagccttcagaactactggctgatatggagaaccagatacttaaagcaaatgaggagtccttaagcagaaaggacatattggagagggttgataggtggatgtcagcatgtgaagaagaaagctggcttgaagactacagccgggacgataacaggtacagtgcaactcggggtgcacatctgaatctgaagcgtgcagaaaaggcccgtgttttggtcaataaaattccggctattgttgacacactgcttgcaaagacccgggcatgggaacaagagcatggcgtggccttcacctacgacggcgtccctcttcttgcgatgctggacgaatacaaaatcctgaggcaggagaaggaagacgagaagcgacgaatgagggaccagaaaaagatgaacgaacagctagccgccgaacaggagaagctgttcgggtcaaaaccgagccccgcgcggccgcagtcgtcctcgaggaaggtggctggcgcacggaccaacggcggtggcacgccagctcgcaggctgtcggccctccagagcggcggcaggaccgctagccgggatgggaggagggatgcgagcaggcccgtggcccccgtgaactacgtcgccatcgccaaggaggacgtggcctcgcaggcgtccagcaaccacactgggccgtccaccccctgaccgggccgtgccagcagtaactgaactgttgtggcggtgcttagatatatatataccagtgcagtgcagtagtcagagctgattgtagatcggataatggaaaaaaacaaacgaagctggatatggtatc

SEQ ID NO: 3956 - protein, 533 aa, Zea mays subsp. mays
  peptide (1)..(533): Ceres Seq. ID no. 12362635
MFIGERLIRLLASRSCLLQQLSNSKSELTRLLSALGESSISGAPDKTSGTIKEQLAAISPSLETLRRKKESRVKEFAHVQLQIQILRDEIAGDLHIGEQLETPHVNADDLSVRRLNEYLSELQALQKEKSTRLSRILESVSSVHDLCSVLGMDFVGTVTKVHPSLDDSVGVQSKSISGETISKLSKMVIVLEEEKSKRFAKIQALASQLSDLWNLMDSPVEEQQPFRHVTCIMSSALDDVIVPGALALDVIQQAELEVERLDQLKASRMKDIAFKKQTELEDIYARAHVAVDSSAARDRIMSIIESSSFEPSELLADMENQILKANEESLSRKDILERVDRWMSACEEESWLEDYSRDDNRYSATRGAHLNLKRAEKARVLVNKIPAIVDTLLAKTRAWEQEHGVAFTYDGVPLLAMLDEYKILRQEKEDEKRRMRDQKKMNEQLAAEQEKLFGSKPSPARPQSSSRKVAGARTNGGGTPARRLSALQSGGRTASRDGRRDASRPVAPVNYVAIAKEDVASQASSNHTGPSTP

SEQ ID NO: 3957 - protein, 382 aa, Zea mays subsp. mays
  peptide (1)..(382): Ceres Seq. ID no. 12362636
MDFVGTVTKVHPSLDDSVGVQSKSISGETISKLSKMVIVLEEEKSKRFAKIQALASQLSDLWNLMDSPVEEQQPFRHVTCIMSSALDDVIVPGALALDVIQQAELEVERLDQLKASRMKDIAFKKQTELEDIYARAHVAVDSSAARDRIMSIIESSSFEPSELLADMENQILKANEESLSRKDILERVDRWMSACEEESWLEDYSRDDNRYSATRGAHLNLKRAEKARVLVNKIPAIVDTLLAKTRAWEQEHGVAFTYDGVPLLAMLDEYKILRQEKEDEKRRMRDQKKMNEQLAAEQEKLFGSKPSPARPQSSSRKVAGARTNGGGTPARRLSALQSGGRTASRDGRRDASRPVAPVNYVAIAKEDVASQASSNHTGPSTP

SEQ ID NO: 3958 - protein, 347 aa, Zea mays subsp. mays
  peptide (1)..(347): Ceres Seq. ID no. 12362637
MVIVLEEEKSKRFAKIQALASQLSDLWNLMDSPVEEQQPFRHVTCIMSSALDDVIVPGALALDVIQQAELEVERLDQLKASRMKDIAFKKQTELEDIYARAHVAVDSSAARDRIMSIIESSSFEPSELLADMENQILKANEESLSRKDILERVDRWMSACEEESWLEDYSRDDNRYSATRGAHLNLKRAEKARVLVNKIPAIVDTLLAKTRAWEQEHGVAFTYDGVPLLAMLDEYKILRQEKEDEKRRMRDQKKMNEQLAAEQEKLFGSKPSPARPQSSSRKVAGARTNGGGTPARRLSALQSGGRTASRDGRRDASRPVAPVNYVAIAKEDVASQASSNHTGPSTP

SEQ ID NO: 3959 - DNA, 945 bp, Zea mays subsp. mays
  misc_feature (1)..(945): Ceres Seq. ID no. 13636168
  misc_feature (1)..(945): Ortholog of  Ceres SEQ ID NO 14311229 as cited in SEQ ID NO 53262
atatagaacgctagctgccggccggtgcagaccacgggaggcgcgggcgcgcgctataaaagccgagccagtgggcgcggccagtgtcacaactcacaattcacatcgaggtctcagcttcaggaaagggaaggaagcatgttcgggcaccaccaccaccacggccacggcgggcaccaccaggccccgccgccgcacgagcagacgctgttcaggatcttctgccgcgccgacgaggcgtactgcctcaccgtgcgccacgacgccgtcgtcctcgcgcccaccaacccccgcgacgagtaccagcactggtacaaggacatgaggcacagcacgaaggtgagggacgcggagggcccagccggcgttcgcgctcatcaacagggccaccggcctcgccatcaagcactcgctcggccagtcccatcccgtgaagctagtgccctacaacgcggagtacctggacgagtcggtgctgtggacggagagccgcgacgtcgggcacggcttccgctgcgtgcgcatggtgaacaacatctacctcaacatggacgccttccacggcgacaaggaccacggcggcgtccacgacggcaccaccgtcgtcctctgggagtgggccaagggcgacaaccagcgctggaagatcctgccctggtgaacgtgaacagagacgagctagatgaatccaaggaaccttacctagctgctgccgccgccgcctaattcgtcctcctccgctctagctgttatctgtctgtgtcttcgcgtcctcggttcctgaatggacgaataatatatagcatgcatgtacggctagcgaccatgtctgaatgacatcttcgttgctgctgctgctgctactgctacctgtccgtttggtgttctaaaagactctgatgagtggttctgaatgtctgcatttcaagtttgctgtgtgatgtc

SEQ ID NO: 3960 - protein, 195 aa, Zea mays subsp. mays
  peptide (1)..(195): Ceres Seq. ID no. 13636169
MFGHHHHHGHGGHHQAPPPHEQTLFRIFCRADEAYCLTVRHDAVVLAPTNPRDEYQHWYKDMRHSTKVRDAEGPAGVRAHQQGHRPRHQALARPVPSREASALQRGVPGRVGAVDGEPRRRARLPLRAHGEQHLPQHGRLPRRQGPRRRPRRHHRRPLGVGQGRQPALEDPALVNVNRDELDESKEPYLAAAAAA

SEQ ID NO: 3961 - protein, 134 aa, Zea mays subsp. mays
  peptide (1)..(134): Ceres Seq. ID no. 13636170
MRHSTKVRDAEGPAGVRAHQQGHRPRHQALARPVPSREASALQRGVPGRVGAVDGEPRRRARLPLRAHGEQHLPQHGRLPRRQGPRRRPRRHHRRPLGVGQGRQPALEDPALVNVNRDELDESKEPYLAAAAAA

SEQ ID NO: 3962 - protein, 107 aa, Zea mays subsp. mays
  peptide (1)..(107): Ceres Seq. ID no. 13636171
YRTLAAGRCRPREARARAIKAEPVGAASVTTHNSHRGLSFRKGKEACSGTTTTTATAGTTRPRRRTSRRCSGSSAAPTRRTASPCATTPSSSRPPTPATSTSTGTRT

SEQ ID NO: 3963 - DNA, 1510 bp, Zea mays subsp. mays
  misc_feature (1)..(1510): Ceres Seq. ID no. 12345944
  misc_feature (1)..(1510): Ortholog of  Ceres SEQ ID NO 15174863 as cited in SEQ ID NO 51281
  misc_feature (1)..(1510): Ortholog of  Ceres SEQ ID NO 12614972 as cited in SEQ ID NO 61986
  misc_feature (1)..(1510): Ortholog of  Ceres SEQ ID NO 14302317 as cited in SEQ ID NO 63244
  misc_feature (1)..(1510): Ortholog of  Ceres SEQ ID NO 12625706 as cited in SEQ ID NO 64144
  misc_feature (1)..(1510): Ortholog of  Ceres SEQ ID NO 13584933 as cited in SEQ ID NO 65009
  misc_feature (1)..(1510): Ortholog of  Ceres SEQ ID NO 12634984 as cited in SEQ ID NO 0
  misc_feature (1)..(1510): Ortholog of  Ceres SEQ ID NO 13599377 as cited in SEQ ID NO 0
acacgacgccgcgccccgcggaatccatcttctccatctccaactgtgctactgtaggagctgctgcaatcggggagagaaacgcgaccagtttgccggcaccaacacggcctgctgccacatctccggcatcttcttccgggttggggactgaaaactgtcgctgttagttggggttggggactctttcagtggtaagtccacatgcaggctgcagcaagcaactggacgatggtggcttccaggcagtcagagaacaatgcacaagaagaagcatcaccattgacgactcctaacgccaacatagccaggatcatcccttcgctgcccctcgagaccaggtggccaccgttccctctccgacggtacgccaatttttggctgcctgaggtaacattgaaggaaggcgtccccggcgttcattcctgcttcgagccgagacccaccgacgtgttcctcgcaagcttccccaagtctggcaccacctggctcaaggccctcgccttcgcgacgctgaagcgttccacgcatccgccgttcgacgacgaccatccgctgcgccattgcaaccctcatgactgtgtcaggttcctcgaacttgatttcaaccagcagaaggatgagctcgaggcgctcccgtccccgcgtgtgctggccacgcacctcccctactccctgctgcccggcagcatcaccggcgacggagagcgctcggggtgccggatcgtgtacgtttgccgggaacccaaggacgtgctggtctcctcctggctgttcacgagaaaggcagcgccggcttgtggggttgacgcccggtcgttcacgatccaggaggccttggagctgttctgtgatggccgctgtctcggcggcccacagtggaaccacgtcctccactactggaaggagagcgtgaggaggcctgacatggtgttgttccttcgttacgaggaggtgctgattgagcccgaggcgcacgtcagaaagctggccaatttcatgggctgtggattctccgaggaggaggaggagcgcggggtggtgagcgccatcgtggagctgtgtagcttggggaagctgaaagacatggaggtgaatagaaatgggagcactatgttggggatcaagaacgaaagcttcttcaggaagggtgttgttggggactggagcaagcatatgacgcaggagatggcgcagaggctagacaaggtcgtagaggatgcattgcaagggactggattcacctttgcgagcacagcatgatgaggcagtgcgctcatagtagttgcgaactgcagaataatgccaagatcaactcgttttatcggtgttgctggttggagatcatgccagtcatggtgagcattcttctttggtgatgaagggggaaatatggacatcatcttatcatttaacgaaaattgatttgtgtacaattcatttgtataactttgttacaaaccatatgttgtggcaccttggcacgccaaaaccatatgcattactgtgc

SEQ ID NO: 3964 - protein, 352 aa, Zea mays subsp. mays
  peptide (1)..(352): Ceres Seq. ID no. 12345945
MQAAASNWTMVASRQSENNAQEEASPLTTPNANIARIIPSLPLETRWPPFPLRRYANFWLPEVTLKEGVPGVHSCFEPRPTDVFLASFPKSGTTWLKALAFATLKRSTHPPFDDDHPLRHCNPHDCVRFLELDFNQQKDELEALPSPRVLATHLPYSLLPGSITGDGERSGCRIVYVCREPKDVLVSSWLFTRKAAPACGVDARSFTIQEALELFCDGRCLGGPQWNHVLHYWKESVRRPDMVLFLRYEEVLIEPEAHVRKLANFMGCGFSEEEEERGVVSAIVELCSLGKLKDMEVNRNGSTMLGIKNESFFRKGVVGDWSKHMTQEMAQRLDKVVEDALQGTGFTFASTA

SEQ ID NO: 3965 - protein, 343 aa, Zea mays subsp. mays
  peptide (1)..(343): Ceres Seq. ID no. 12345946
MVASRQSENNAQEEASPLTTPNANIARIIPSLPLETRWPPFPLRRYANFWLPEVTLKEGVPGVHSCFEPRPTDVFLASFPKSGTTWLKALAFATLKRSTHPPFDDDHPLRHCNPHDCVRFLELDFNQQKDELEALPSPRVLATHLPYSLLPGSITGDGERSGCRIVYVCREPKDVLVSSWLFTRKAAPACGVDARSFTIQEALELFCDGRCLGGPQWNHVLHYWKESVRRPDMVLFLRYEEVLIEPEAHVRKLANFMGCGFSEEEEERGVVSAIVELCSLGKLKDMEVNRNGSTMLGIKNESFFRKGVVGDWSKHMTQEMAQRLDKVVEDALQGTGFTFASTA

SEQ ID NO: 3966 - DNA, 1446 bp, Zea mays subsp. mays
  misc_feature (1)..(1446): Ceres Seq. ID no. 12410025
  misc_feature (1)..(1446): Ortholog of  Ceres SEQ ID NO 15168591 as cited in SEQ ID NO 57836
ttggataaaaattctagctaaaccgaggaataaagagcgataagcccggtgtctgtcaacactccagaagagccgcagcgcaaaggagactcctttgtggcgtgcgcgaccagcatgaagccacgtccaccggcgggggcgtcgtccgcttccgccgcgccgcccaggctgcggccgcacctggcgcggctcgcctccttcctgatcgtcttcgccgtgggctactcgctgggcctcctgtcgtcgtccacccggnngccgccaccgagaccgtcccagtcccagtcccagtcccaggcgacgacgatcgcgcggccgcacgccgacgctttattcccggcgtcgnngaactcgaacgggaccgccgcgtcgagctacccgcggtcgcctccgcacgacctgttccggttcagggagcggtgcggggagccggtgccgagcgacgccgtggtgcggacgctgctcgacaggctcttcggcggcgagagcccctacgcggggttcccgcccgagcgcacggcggcgctgctgcgcccggccgcggcgcgcccgcgcgggtgggggtcgacgggggcggtgttcgcggagctcatggaggcggtgcgcccggcggtggtcgtggagctgggcgcgttcctgggcgcgtcggcgctgcacatggcggccgtggccaggaacctgtccctgtccccggccatcctctgcgtcgacgacttccgcggctggccggcgttccgggaccgcttccgccgcgacgtgccgccgccgcggcacggcgacgcgctgctgctgccgcagttcatggccaacgtcgtggcggcggagggggcgcgcgtcgtcctgccgctgcccttctccacggcgtccgcgctcgccgcgctctgcgactggggcgtctacgccgacctcatcgaggtggacgccggccacgacttccactcggcgtgggccgacatcaacctggcctgggccgtgctccgccccggcggcgtcatgttcggccacgactacttcacgtccgccnacgngcgcggcgtgcgccgngccgtcacgctcttcgccaaggtcaaggggctcaccgtccgcccgcacggccagcactgggtgctctccccgaagccgcgagggcgcgccgacgacgcccggcgacggtgagggctcgtcgctngntgctgtcgccgtcgccgcggggccgtgcactcgatcgcccggcaccgaacctgacgtgtcccgtactcccgttgcaccagcggccgtagcacgcacccacccgcctcgatcgaaagctgatcgacgaaaaaggttgcgccgcccccgccactgttctctgaagcgctcgtctcaaccaccatttgcttttgctgtaacactcttctctaactacgccgggatcatacaagaacgatacaatattgtattccaacaatacgagacgtttacgtgtag

SEQ ID NO: 3967 - protein, 346 aa, Zea mays subsp. mays
  peptide (1)..(346): Ceres Seq. ID no. 12410026
  misc_feature (48)..(48): Xaa is any aa, unknown or other
  misc_feature (78)..(78): Xaa is any aa, unknown or other
  misc_feature (304)..(304): Xaa is any aa, unknown or other
  misc_feature (305)..(305): Xaa is any aa, unknown or other
  misc_feature (310)..(310): Xaa is any aa, unknown or other
MKPRPPAGASSASAAPPRLRPHLARLASFLIVFAVGYSLGLLSSSTRXPPPRPSQSQSQSQATTIARPHADALFPASXNSNGTAASSYPRSPPHDLFRFRERCGEPVPSDAVVRTLLDRLFGGESPYAGFPPERTAALLRPAAARPRGWGSTGAVFAELMEAVRPAVVVELGAFLGASALHMAAVARNLSLSPAILCVDDFRGWPAFRDRFRRDVPPPRHGDALLLPQFMANVVAAEGARVVLPLPFSTASALAALCDWGVYADLIEVDAGHDFHSAWADINLAWAVLRPGGVMFGHDYFTSAXXRGVRXAVTLFAKVKGLTVRPHGQHWVLSPKPRGRADDARRR

SEQ ID NO: 3968 - protein, 187 aa, Zea mays subsp. mays
  peptide (1)..(187): Ceres Seq. ID no. 12410027
  misc_feature (145)..(145): Xaa is any aa, unknown or other
  misc_feature (146)..(146): Xaa is any aa, unknown or other
  misc_feature (151)..(151): Xaa is any aa, unknown or other
MEAVRPAVVVELGAFLGASALHMAAVARNLSLSPAILCVDDFRGWPAFRDRFRRDVPPPRHGDALLLPQFMANVVAAEGARVVLPLPFSTASALAALCDWGVYADLIEVDAGHDFHSAWADINLAWAVLRPGGVMFGHDYFTSAXXRGVRXAVTLFAKVKGLTVRPHGQHWVLSPKPRGRADDARRR

SEQ ID NO: 3969 - DNA, 1062 bp, Zea mays subsp. mays
  misc_feature (1)..(1062): Ceres Seq. ID no. 12410021
  misc_feature (1)..(1062): Ortholog of  Ceres SEQ ID NO 13595755 as cited in SEQ ID NO 58146
aattcttctcgtctcgctcggctcctctgggcccacagcggccagcaaactgcctccgtcctcccctgcgggctgtgccgcctcttcttcgcgtcggcgccgccctccttccttctcttctgctgctgatggaactggatcctcgcctctacgagaacgtctctgtcagcgacaacgatgtccgaaacatagttctatcttatcttatgcacaactgttttaaagagacggcagaggcattcctatctagcaccgggttgaatttacctgtcgactatagtgtggatgtggataagcgtaaagcaatttttaattttgtgctagaagggaatgcccttaaagccatagagctgacagaagaaatggcacctaacttgctagagaatgatatggatctacattttgatcttcttagtctccacttcattgagctagttcgctccaaaaaattcacagaagctcttgactttggccagaaaaaattgacatcatttcagaaggttaccaagtatattgagaaactagaggactttatggccctcctggcttatgaagagcctgagaagtcacctatgtttcatctactaagcccagagcacaggcagaatgttgcagagggcttgaatcgggctgtccttgcacatgctaatcttccggcatattcatcgttggagagggtggtccagcaagcgactgtggttagacaatacctacagcaggaagttggcaaggattcttacccaccattttctttgaaggcctttctgagcaagtaaatgtgcaaatggtcactcttcttcagaacagggtaaccacctctccaggccatcatgtacatgtacccttgtggagtgcatacacgatgaagtagtttatacagttcaggtgttgttgacaccacttatacagttgcaatggtgttgtactttaaaaaggagggtgctgtatgctgtctgtttccttgatttacattctgttttacttgtctctctgccttagacatggtgatagcatgtatgtatgacctgttgagctattctgtgcgttcgtttcggtgaactc

SEQ ID NO: 3970 - protein, 257 aa, Zea mays subsp. mays
  peptide (1)..(257): Ceres Seq. ID no. 12410022
FFSSRSAPLGPQRPANCLRPPLRAVPPLLRVGAALLPSLLLLMELDPRLYENVSVSDNDVRNIVLSYLMHNCFKETAEAFLSSTGLNLPVDYSVDVDKRKAIFNFVLEGNALKAIELTEEMAPNLLENDMDLHFDLLSLHFIELVRSKKFTEALDFGQKKLTSFQKVTKYIEKLEDFMALLAYEEPEKSPMFHLLSPEHRQNVAEGLNRAVLAHANLPAYSSLERVVQQATVVRQYLQQEVGKDSYPPFSLKAFLSK

SEQ ID NO: 3971 - protein, 215 aa, Zea mays subsp. mays
  peptide (1)..(215): Ceres Seq. ID no. 12410023
MELDPRLYENVSVSDNDVRNIVLSYLMHNCFKETAEAFLSSTGLNLPVDYSVDVDKRKAIFNFVLEGNALKAIELTEEMAPNLLENDMDLHFDLLSLHFIELVRSKKFTEALDFGQKKLTSFQKVTKYIEKLEDFMALLAYEEPEKSPMFHLLSPEHRQNVAEGLNRAVLAHANLPAYSSLERVVQQATVVRQYLQQEVGKDSYPPFSLKAFLSK

SEQ ID NO: 3972 - protein, 189 aa, Zea mays subsp. mays
  peptide (1)..(189): Ceres Seq. ID no. 12410024
MHNCFKETAEAFLSSTGLNLPVDYSVDVDKRKAIFNFVLEGNALKAIELTEEMAPNLLENDMDLHFDLLSLHFIELVRSKKFTEALDFGQKKLTSFQKVTKYIEKLEDFMALLAYEEPEKSPMFHLLSPEHRQNVAEGLNRAVLAHANLPAYSSLERVVQQATVVRQYLQQEVGKDSYPPFSLKAFLSK

SEQ ID NO: 3973 - DNA, 1631 bp, Zea mays subsp. mays
  misc_feature (1)..(1631): Ceres Seq. ID no. 12406794
  misc_feature (1)..(1631): Ortholog of  Ceres SEQ ID NO 13528157 as cited in SEQ ID NO 60102
  misc_feature (1)..(1631): Ortholog of  Ceres SEQ ID NO 15226041 as cited in SEQ ID NO 62920
  misc_feature (1)..(1631): Ortholog of  Ceres SEQ ID NO 15179340 as cited in SEQ ID NO 0
acctgtagttttctccactcgtcctcgtcctttgtccctgtccttcggggacaaaaacaaccaaggcgcaagcggtaatcttccgtggtgggggcgttctctgctgcaagcagtggtgacgccgcttggagggagggcgggcgggaaaggatggaggcggtggtggacctcaagtacctgccggttttcccgaacggcggcgtggccgcggccaagaagaagacgaggctcgggaccactgcggttgccggcggccagacgggggtgtactaccgggaatgcctcaagaaccacgcggcgagcctgggtggccacgcgctggacgggtgcggcgagttcatgccgtcgccggaggccgacccggcggacccgagttcgctcaggtgcgccgcgtgcggatgccaccgcaacttccaccgccggctaccggagctgtccccgccgccgcctctcctcgctttgccgccgcctccaccgccactggcgccggcgccggctgtcgcgccgcatgccatgcgtgacagccgcacgatgcgcggcgaggaggcgccagacgaccgcctgccggccgccttcgacgacgacaccgaggagtcggacgagggctcagatttcgaagaggaccggtcccctaacgccgctgccggcgccgggcatggtgccgntgccgcccggctaccgccaggtcgcgccacacatgctcctcgcgctgagcaccagcgcgccgggcgcccaaactcccgcggcggggcccaggccgcccgcctccctggtcccgatgccggcgcccgggtgctgctgctgctgcggcggcggcggccggcggcgaggaagcggttccgcaccaagttcagcccggaacagaagcagaggatgcaggctctgtcggagcggttgggttggcggctgcagaagcgcgacgaggcccgtggtcgacgagtgctgccaggagatcggcgtcaccaagggcgtcttcaaggtttggatgcacaacaacaagcacaacttcgtcggcggccacagccgcgcgccgcagcgcctcagcgtctgctgccacggccatccaccatccgttcgacgctgcccccgtctgcgcttcctcccacgccgccccagcaccagccgccgctgtgcacctttccgcccacgccgccccagcgccagccgcctccccggccacgcctgtcctcgctgactccaacatcaacggcaacgctgccgactacttccgtgtccaaccgtcgacggcgagtggcggctcgccgcagtcgtcctagtcaagttagtgctaatcagccatggttatttgtagagcctcgtgtctaattaaccaaccctaatggagcgagcaatggtgggatgcatgggactatcgaatatgggagcgctagtgagaaggctgctgctggtctttgttaatggtggagcccaaagaaggatcgtggggttttgggatctgatgatgtaatgattcaggattagcgcttatggtactagtagactgttagaccaactccactgaactgtactttgtcttcgtctaggatatcatgttgttccatataaaaatgcgatctgtccactgttgggttggctttaatacatatcgatttttacttttactgtttttt

SEQ ID NO: 3974 - protein, 397 aa, Zea mays subsp. mays
  peptide (1)..(397): Ceres Seq. ID no. 12406795
  misc_feature (222)..(222): Xaa is any aa, unknown or other
PVVFSTRPRPLSLSFGDKNNQGASGNLPWWGRSLLQAVVTPLGGRAGGKGWRRWWTSSTCRFSRTAAWPRPRRRRGSGPLRLPAARRGCTTGNASRTTRRAWVATRWTGAASSCRRRRPTRRTRVRSGAPRADATATSTAGYRSCPRRRLSSLCRRLHRHWRRRRLSRRMPCVTAARCAARRRQTTACRPPSTTTPRSRTRAQISKRTGPLTPLPAPGMVPXPPGYRQVAPHMLLALSTSAPGAQTPAAGPRPPASLVPMPAPGCCCCCGGGGRRRGSGSAPSSARNRSRGCRLCRSGWVGGCRSATRPVVDECCQEIGVTKGVFKVWMHNNKHNFVGGHSRAPQRLSVCCHGHPPSVRRCPRLRFLPRRPSTSRRCAPFRPRRPSASRLPGHACPR

SEQ ID NO: 3975 - protein, 391 aa, Zea mays subsp. mays
  peptide (1)..(391): Ceres Seq. ID no. 12406796
  misc_feature (172)..(172): Xaa is any aa, unknown or other
MEAVVDLKYLPVFPNGGVAAAKKKTRLGTTAVAGGQTGVYYRECLKNHAASLGGHALDGCGEFMPSPEADPADPSSLRCAACGCHRNFHRRLPELSPPPPLLALPPPPPPLAPAPAVAPHAMRDSRTMRGEEAPDDRLPAAFDDDTEESDEGSDFEEDRSPNAAAGAGHGAXAARLPPGRATHAPRAEHQRAGRPNSRGGAQAARLPGPDAGARVLLLLRRRRPAARKRFRTKFSPEQKQRMQALSERLGWRLQKRDEARGRRVLPGDRRHQGRLQGLDAQQQAQLRRRPQPRAAAPQRLLPRPSTIRSTLPPSALPPTPPQHQPPLCTFPPTPPQRQPPPRPRLSSLTPTSTATLPTTSVSNRRRRVAARRSRPSQVSANQPWLFVEPRV

SEQ ID NO: 3976 - protein, 328 aa, Zea mays subsp. mays
  peptide (1)..(328): Ceres Seq. ID no. 12406797
  misc_feature (109)..(109): Xaa is any aa, unknown or other
MPSPEADPADPSSLRCAACGCHRNFHRRLPELSPPPPLLALPPPPPPLAPAPAVAPHAMRDSRTMRGEEAPDDRLPAAFDDDTEESDEGSDFEEDRSPNAAAGAGHGAXAARLPPGRATHAPRAEHQRAGRPNSRGGAQAARLPGPDAGARVLLLLRRRRPAARKRFRTKFSPEQKQRMQALSERLGWRLQKRDEARGRRVLPGDRRHQGRLQGLDAQQQAQLRRRPQPRAAAPQRLLPRPSTIRSTLPPSALPPTPPQHQPPLCTFPPTPPQRQPPPRPRLSSLTPTSTATLPTTSVSNRRRRVAARRSRPSQVSANQPWLFVEPRV

SEQ ID NO: 3977 - DNA, 1670 bp, Zea mays subsp. mays
  misc_feature (1)..(1670): Ceres Seq. ID no. 12343352
  misc_feature (1)..(1670): Ortholog of  Ceres SEQ ID NO 15178767 as cited in SEQ ID NO 55317
  misc_feature (1)..(1670): Ortholog of  Ceres SEQ ID NO 13657647 as cited in SEQ ID NO 66399
acacgtttcaccatcaataggacaaaagcagcaccagccaccaggcagactccctcgactccgactctacgcgacacacgagcgcaggggctcaaacgcgaaaaaaaagaggccccaacgcccactccaccggccaatcacccgccggcgcgccatggcggccgccgccgggggactccgtcaagcagccgctcctccaccgcgcgtacccgtcccacgccgcgtcggcctcctcgccggccctcccgtccgttcccccggggggcgggggccgccgcttcccagggggcctcgacgtgcccaacctgaagaagcgcggcggcggcacgcgcagctggatccgcgtcgaggccgccacggcctccgtgcagacgctggagatcgacaaggccaccatgatgcggcgctgcgagctccccgcgcgcgacctccgcctgctcgacccgctcttcgtgtacccgtccacggtcctgggccgcgagcgcgcaatcgtcgtcaacctcgagcagatcaggtgcgtcatcaccgccgacgaggtgctcctgctcaactccctcgacagctacgtcctccagtatgccgccgagctccagcgccgcctgctccagcgcgcggagggcgacgagctacccttcgaattccgagcgctcgagctcgccctcgaggccgcatgctccttcctcgatgcacaggctgcggaattggagattgaagcatatccattactggatgaactgacatccaaaatcagtactctcaatttggaacgtgcccggcgattaaaaagtagactagttgcattgaccagaagagttcaaaaagtcagagatgaaatagaacaactaatggatgatgatggtgatatggctgagatgtatctcaccgaaaaaaagatgaggatggaatcatctgtctttggtgaccagtctttgttgggctacaattcagcaggcgctgttggggcttcagtttcagctcctgtatctccagtctcatcgcctacagaatcacgaaaactggagaaatctttcagtttgtgtagaagtaggcatgacagtacgaagggctcagataacacaatgacagagcatatccaggagctggagatgttactggaagcttattttgttgttatcgacagcactctgaacaagctgacatcgcttaaagagtacatcgatgacactgaagacttcatcaacattcagctggacaatgtgcggaaccagctgatccagtttgaattgctgctaacgaccgcaacatttgttgtggccattttcggagtggttgctgggatattcgggatgaactttgagacatcagttttcgaaatagagaatgcattccagtgggtccttgtaattacttcagtgaccggcgttttcatcttctgctcctttctttggttcttcaagtacaagagattgatgcctttgtagagaatgtatatgccctcctcccataggaccgatgaatcaatttcaaccctgttaagaggcacttgatcagaagcctgaacctctgccgatgtaaattaccattcttttagaggtttacggcatgagtaccgagaatccgggtgaaaattgtaaccttcttgacatgatccctgtgctgtataagagaaaatcatattacagtttatacaaataataccgaccaattct

SEQ ID NO: 3978 - protein, 348 aa, Zea mays subsp. mays
  peptide (1)..(348): Ceres Seq. ID no. 12343353
MMRRCELPARDLRLLDPLFVYPSTVLGRERAIVVNLEQIRCVITADEVLLLNSLDSYVLQYAAELQRRLLQRAEGDELPFEFRALELALEAACSFLDAQAAELEIEAYPLLDELTSKISTLNLERARRLKSRLVALTRRVQKVRDEIEQLMDDDGDMAEMYLTEKKMRMESSVFGDQSLLGYNSAGAVGASVSAPVSPVSSPTESRKLEKSFSLCRSRHDSTKGSDNTMTEHIQELEMLLEAYFVVIDSTLNKLTSLKEYIDDTEDFINIQLDNVRNQLIQFELLLTTATFVVAIFGVVAGIFGMNFETSVFEIENAFQWVLVITSVTGVFIFCSFLWFFKYKRLMPL

SEQ ID NO: 3979 - protein, 347 aa, Zea mays subsp. mays
  peptide (1)..(347): Ceres Seq. ID no. 12343354
MRRCELPARDLRLLDPLFVYPSTVLGRERAIVVNLEQIRCVITADEVLLLNSLDSYVLQYAAELQRRLLQRAEGDELPFEFRALELALEAACSFLDAQAAELEIEAYPLLDELTSKISTLNLERARRLKSRLVALTRRVQKVRDEIEQLMDDDGDMAEMYLTEKKMRMESSVFGDQSLLGYNSAGAVGASVSAPVSPVSSPTESRKLEKSFSLCRSRHDSTKGSDNTMTEHIQELEMLLEAYFVVIDSTLNKLTSLKEYIDDTEDFINIQLDNVRNQLIQFELLLTTATFVVAIFGVVAGIFGMNFETSVFEIENAFQWVLVITSVTGVFIFCSFLWFFKYKRLMPL

SEQ ID NO: 3980 - protein, 236 aa, Zea mays subsp. mays
  peptide (1)..(236): Ceres Seq. ID no. 12343355
HVSPSIGQKQHQPPGRLPRLRLYATHERRGSNAKKKRPQRPLHRPITRRRAMAAAAGGLRQAAAPPPRVPVPRRVGLLAGPPVRSPGGRGPPLPRGPRRAQPEEARRRHAQLDPRRGRHGLRADAGDRQGHHDAALRAPRARPPPARPALRVPVHGPGPRARNRRQPRADQVRHHRRRGAPAQLPRQLRPPVCRRAPAPPAPARGGRRATLRIPSARARPRGRMLLPRCTGCGIGD

SEQ ID NO: 3981 - DNA, 727 bp, Zea mays subsp. mays
  misc_feature (1)..(727): Ceres Seq. ID no. 12356137
  misc_feature (1)..(727): Ortholog of  Ceres SEQ ID NO 13595146 as cited in SEQ ID NO 56566
aatcgcctccccaccccattcttatctcctcgccaccgcttgctatccgtcgcctcgccgcgcgcgcgtacgttcggttctcggccactgctcagctctcgctgcagcgatggccctgcaggccccgtcactcatgcgcgcgccggcggcacagcggtccgcgccgccacggccctccttctccgccccgtggtcgctgcggctgccggcgcctgcgcggcgccgggtggccactgccgcgcggatcaccatgcgggtcgcgtccaagcaggcctacatctgccgtgactgcgggtacatctacaacgacaggacgccgttcgacaagctggctgacaactacttctgccctgtttgtggagctccgaagagaaggttcagaccctacgagccagcagtctccaagaacgcgaacgccaccgatgccagaaaggcgaggaaggaggagctgaagaaggaggagagcatggggaaagccttgcctattgccatcgtcgtcgggatcattgccttggctggcctgtacttctacctcaacaatgtctacagctaaacgacgaatagatccgtttggtgcggcgaacaggattcatgccgttttgcagtctttttccctttgttaatcgttgcaatgtgctgtcttggtgcatgtactactagggctccaagactgtatacaagttttgctgttcatcttgaaataccacacattacataaccagcagtc

SEQ ID NO: 3982 - protein, 183 aa, Zea mays subsp. mays
  peptide (1)..(183): Ceres Seq. ID no. 12356138
IASPPHSYLLATACYPSPRRARVRSVLGHCSALAAAMALQAPSLMRAPAAQRSAPPRPSFSAPWSLRLPAPARRRVATAARITMRVASKQAYICRDCGYIYNDRTPFDKLADNYFCPVCGAPKRRFRPYEPAVSKNANATDARKARKEELKKEESMGKALPIAIVVGIIALAGLYFYLNNVYS

SEQ ID NO: 3983 - protein, 149 aa, Zea mays subsp. mays
  peptide (1)..(149): Ceres Seq. ID no. 12356139
SPPHPILISSPPLAIRRLAARAYVRFSATAQLSLQRWPCRPRHSCARRRHSGPRRHGPPSPPRGRCGCRRLRGAGWPLPRGSPCGSRPSRPTSAVTAGTSTTTGRRSTSWLTTTSALFVELRREGSDPTSQQSPRTRTPPMPERRGRRS

SEQ ID NO: 3984 - protein, 147 aa, Zea mays subsp. mays
  peptide (1)..(147): Ceres Seq. ID no. 12356140
MALQAPSLMRAPAAQRSAPPRPSFSAPWSLRLPAPARRRVATAARITMRVASKQAYICRDCGYIYNDRTPFDKLADNYFCPVCGAPKRRFRPYEPAVSKNANATDARKARKEELKKEESMGKALPIAIVVGIIALAGLYFYLNNVYS

SEQ ID NO: 3985 - DNA, 1435 bp, Zea mays subsp. mays
  misc_feature (1)..(1435): Ceres Seq. ID no. 12373758
  misc_feature (1)..(1435): Ortholog of  Ceres SEQ ID NO 14310168 as cited in SEQ ID NO 20646
aagaagactatgggcttctagcaattcacgtggttgaagacgtcttgtcccgttccagaacactcgcgctctcgcacgacggcacgagcgcgctactgccatagtgccatggcgagcggcggcggtgctgcggcgcggatggacccggaggtagcaacagagctggtgcggaagggtgccaccctcctcctcctcgatgtcccccagcgcaccctcttcggaatcgatacccagatgttctctgttggacccaagttcaaagggatgaagatggtgccaccgggagcccatttcgtctactactgctccccaaacaggcatgggaatgagtttgcacctactgtcgggttctttcttactacacaccaatctgaggtgattgttcgaaagtgggatgtgcaagaggaacgattaatcaaattatcagaagaagaggatatcagatactcagaagctgtaagacattttgaatttgatgatcaacttggaccatacaatttagattcttatggagattggaaacaactttcggactacttgtcaccgaatgtcattgagcgtcttgaaccaattggaggagaaatcacaattgcgtgggagtcatcatggatggataaagctccccaaagtgacatggagagacgtttggtggaacaactaagagaaggaaagtttgcaaagaatgctcctgtacagtctgggcggagaggatgctactacacaagtatccctgcttcagttaagcataaggacatctctgggggtgacttgacagccctaaacttggacaaaacaagtttgctggagactattttggccaaaaattatgaaggtcaagaagatctattcttgggggagcttcagtttgctttcatagcttttatgatgggtcaatcactagaggcttttatgcagtggaaagcactagtcagccttcttttgagctgcagtgatgctccccttcatacaaggactaacatgtttataaagtttataaggacattatactatcaactcaagcatggttttcaacatacccaagattccaaaagtggggatatgggcaattctctgtgtttggatgaaacatggttttcaagagacatattcctgtaccgtctttcaaaggatttctttacagttgtatttgaagccccagtcgtggatggagaccttctgtcatgggctaggaaactaaaatcgcttctggagactacgtttgggtgggatcttgaggacgacgcagtgaaccttattgatgaagatgacgagtttgctcctgtcgttgtggagatggatggatcataagctaatgaagccagattccatgcagagaagtcagcagttgttcagcgtttctaccttttggtacagtggtgcgctgacttgtatgaagttttactgcttgtgctgacattgaatatacgtgctaatt

SEQ ID NO: 3986 - protein, 399 aa, Zea mays subsp. mays
  peptide (1)..(399): Ceres Seq. ID no. 12373759
MASGGGAAARMDPEVATELVRKGATLLLLDVPQRTLFGIDTQMFSVGPKFKGMKMVPPGAHFVYYCSPNRHGNEFAPTVGFFLTTHQSEVIVRKWDVQEERLIKLSEEEDIRYSEAVRHFEFDDQLGPYNLDSYGDWKQLSDYLSPNVIERLEPIGGEITIAWESSWMDKAPQSDMERRLVEQLREGKFAKNAPVQSGRRGCYYTSIPASVKHKDISGGDLTALNLDKTSLLETILAKNYEGQEDLFLGELQFAFIAFMMGQSLEAFMQWKALVSLLLSCSDAPLHTRTNMFIKFIRTLYYQLKHGFQHTQDSKSGDMGNSLCLDETWFSRDIFLYRLSKDFFTVVFEAPVVDGDLLSWARKLKSLLETTFGWDLEDDAVNLIDEDDEFAPVVVEMDGS

SEQ ID NO: 3987 - protein, 389 aa, Zea mays subsp. mays
  peptide (1)..(389): Ceres Seq. ID no. 12373760
MDPEVATELVRKGATLLLLDVPQRTLFGIDTQMFSVGPKFKGMKMVPPGAHFVYYCSPNRHGNEFAPTVGFFLTTHQSEVIVRKWDVQEERLIKLSEEEDIRYSEAVRHFEFDDQLGPYNLDSYGDWKQLSDYLSPNVIERLEPIGGEITIAWESSWMDKAPQSDMERRLVEQLREGKFAKNAPVQSGRRGCYYTSIPASVKHKDISGGDLTALNLDKTSLLETILAKNYEGQEDLFLGELQFAFIAFMMGQSLEAFMQWKALVSLLLSCSDAPLHTRTNMFIKFIRTLYYQLKHGFQHTQDSKSGDMGNSLCLDETWFSRDIFLYRLSKDFFTVVFEAPVVDGDLLSWARKLKSLLETTFGWDLEDDAVNLIDEDDEFAPVVVEMDGS

SEQ ID NO: 3988 - protein, 357 aa, Zea mays subsp. mays
  peptide (1)..(357): Ceres Seq. ID no. 12373761
MFSVGPKFKGMKMVPPGAHFVYYCSPNRHGNEFAPTVGFFLTTHQSEVIVRKWDVQEERLIKLSEEEDIRYSEAVRHFEFDDQLGPYNLDSYGDWKQLSDYLSPNVIERLEPIGGEITIAWESSWMDKAPQSDMERRLVEQLREGKFAKNAPVQSGRRGCYYTSIPASVKHKDISGGDLTALNLDKTSLLETILAKNYEGQEDLFLGELQFAFIAFMMGQSLEAFMQWKALVSLLLSCSDAPLHTRTNMFIKFIRTLYYQLKHGFQHTQDSKSGDMGNSLCLDETWFSRDIFLYRLSKDFFTVVFEAPVVDGDLLSWARKLKSLLETTFGWDLEDDAVNLIDEDDEFAPVVVEMDGS

SEQ ID NO: 3989 - DNA, 1377 bp, Zea mays subsp. mays
  misc_feature (1)..(1377): Ceres Seq. ID no. 12353719
  misc_feature (1)..(1377): Ortholog of  Ceres SEQ ID NO 15171268 as cited in SEQ ID NO 51297
  misc_feature (1)..(1377): Ortholog of  Ceres SEQ ID NO 15170521 as cited in SEQ ID NO 55668
  misc_feature (1)..(1377): Ortholog of  Ceres SEQ ID NO 13598249 as cited in SEQ ID NO 62509
  misc_feature (1)..(1377): Ortholog of  Ceres SEQ ID NO 13598595 as cited in SEQ ID NO 64671
  misc_feature (1)..(1377): Ortholog of  Ceres SEQ ID NO 13654241 as cited in SEQ ID NO 68348
gtgctccccccaggctcctcttcctcgctttccctccaccccgggcgcaaaccctaaccctaccgtcgctcgccccgcggcgtctgccaatggcgcgccccgtgtgagtgtgcgcgagagaggggtagaccttgaggccgctacccggggaggagagcgagagatgtataaacaggggggagcggggggaggggctgggctggaccggaagcggatcaacgacgcgctggataagcatctcgagaaggcggtcgcgtcgccgtccacgtcgagggggtcggcgggcggcgggcgcgaccaccaccgcctcgtcgtgccgtcctccgtgtcgtccatccccaagggccgctgctccgaaggggagtctgattctgatagtgaagcatcggatgttagcggctctgatggagaagacacctcatggatttcatggtattgcaacttaagagggaatgagttcttctgtgaagtcgacgatgattatattcaagacgacttcaacctttgtggtctcagcagccaagttccttattatgattatgctctcgatctcattttagatatcgagtcatctcatggtgatatgttcactgaggaacaaaatgagctcgtagaatcagctgcagagatgctttatgggctgatccatgcacgatacattctgaccagtaaagggctggctgcaatgctggagaagtataggaactatgactttgggcggtgcccgcgtgtttactgctgtggtcaaccatgcctgccagttggacaatcagacatccatcgatctagtaccgtgaagatatactgccccaagtgtgaagacatctactacccacggtccaagtaccaaggcaacatcgacggcgcatactttgggacaacgttccctcatctgttcctgatgacatacgagcacctcaagccacagaagctctcgcagcgctatgttcctcgtgtctttggcttcaagctccacaagccatgaacctcatgtatttgtcttttaaactcctcaagacgtggcactgggggcatgcgggagttttgcaatccttgaagacttgcatataagagcgccattggcaggtcagtggattggtaaaattctatcatgctgcagcgtgcttgtaccttagctggctggcacctatccaacatttgaatgtagctctaaggatatcaatgttgtaacctaactgctattgttctttgattagtaaaccaggagccccccctacaatgtagaatatggcaattatttatggctttgcagaaaataacaacccttcatctgcttggttctcgtaagatggccctttaattttgtagtttgcgaacttctattttgaaatgtgatttgcaaaggtgcgtcatctc

SEQ ID NO: 3990 - protein, 327 aa, Zea mays subsp. mays
  peptide (1)..(327): Ceres Seq. ID no. 12353720
CSPQAPLPRFPSTPGANPNPTVARPAASANGAPRVSVRERGVDLEAATRGGEREMYKQGGAGGGAGLDRKRINDALDKHLEKAVASPSTSRGSAGGGRDHHRLVVPSSVSSIPKGRCSEGESDSDSEASDVSGSDGEDTSWISWYCNLRGNEFFCEVDDDYIQDDFNLCGLSSQVPYYDYALDLILDIESSHGDMFTEEQNELVESAAEMLYGLIHARYILTSKGLAAMLEKYRNYDFGRCPRVYCCGQPCLPVGQSDIHRSSTVKIYCPKCEDIYYPRSKYQGNIDGAYFGTTFPHLFLMTYEHLKPQKLSQRYVPRVFGFKLHKP

SEQ ID NO: 3991 - protein, 273 aa, Zea mays subsp. mays
  peptide (1)..(273): Ceres Seq. ID no. 12353721
MYKQGGAGGGAGLDRKRINDALDKHLEKAVASPSTSRGSAGGGRDHHRLVVPSSVSSIPKGRCSEGESDSDSEASDVSGSDGEDTSWISWYCNLRGNEFFCEVDDDYIQDDFNLCGLSSQVPYYDYALDLILDIESSHGDMFTEEQNELVESAAEMLYGLIHARYILTSKGLAAMLEKYRNYDFGRCPRVYCCGQPCLPVGQSDIHRSSTVKIYCPKCEDIYYPRSKYQGNIDGAYFGTTFPHLFLMTYEHLKPQKLSQRYVPRVFGFKLHKP

SEQ ID NO: 3992 - DNA, 808 bp, Zea mays subsp. mays
  misc_feature (1)..(808): Ceres Seq. ID no. 12566346
  misc_feature (1)..(808): Ortholog of  Ceres SEQ ID NO 13502952 as cited in SEQ ID NO 62271
  misc_feature (1)..(808): Ortholog of  Ceres SEQ ID NO 13502973 as cited in SEQ ID NO 68052
  misc_feature (1)..(808): Ortholog of  Ceres SEQ ID NO 13596000 as cited in SEQ ID NO 68188
aattaatccaacgtagccatgcacaacacgtcaacacacacgcacgcaggctgctgctgggcgttctcggcggtggcggcggtggaagggctgaacaagatccggacggggcggctggtgtcgctgtcggagcaggagctggtggactgcgacgtcagcggcgtggaccagggctgcgacggcggcctcatggacaacgccttccagttcgtcgcgcgccgcggcgggctggcctcggagtcgggctacccgtaccagggccgggacgggccctgccgctcgtcggccgccgccgccgccgcgtccatccggggccacgaggacgtgccgcgcaacaacgaggccgcgctcgcggccgccgtggcccaccagcccgtgtccgtggccatcaacggcgaggacatggcgttccgcttctacgacagcggcgtgctgggcggggcctgcggcacggacctcaaccacgccatcacggccgtcgggtacggcacggcggccgacggcacaaggtactggctgatgaagaactcctggggcgcgtcgtggggcgagggcggatacgtccggatccgccgcggcgtccgcggggagggcgtctgcggtctcgccaagttgccgtcttaccccgtctagagccaggcttattcccgtcggttttaggccgacgagaattaagtgttttcctgtagtaataactatgtccaaaaatatgttaaacaaacaataattgcaactgctgtctggtgtaattgcaacttctgatctggtgtgattgcaacttctatataactatgtccaaaaatctgtt

SEQ ID NO: 3993 - protein, 228 aa, Zea mays subsp. mays
  peptide (1)..(228): Ceres Seq. ID no. 12566347
LIQRSHAQHVNTHARRLLLGVLGGGGGGRAEQDPDGAAGVAVGAGAGGLRRQRRGPGLRRRPHGQRLPVRRAPRRAGLGVGLPVPGPGRALPLVGRRRRRVHPGPRGRAAQQRGRARGRRGPPARVRGHQRRGHGVPLLRQRRAGRGLRHGPQPRHHGRRVRHGGRRHKVLADEELLGRVVGRGRIRPDPPRRPRGGRLRSRQVAVLPRLEPGLFPSVLGRRELSVFL

SEQ ID NO: 3994 - protein, 204 aa, Zea mays subsp. mays
  peptide (1)..(204): Ceres Seq. ID no. 12566348
MHNTSTHTHAGCCWAFSAVAAVEGLNKIRTGRLVSLSEQELVDCDVSGVDQGCDGGLMDNAFQFVARRGGLASESGYPYQGRDGPCRSSAAAAAASIRGHEDVPRNNEAALAAAVAHQPVSVAINGEDMAFRFYDSGVLGGACGTDLNHAITAVGYGTAADGTRYWLMKNSWGASWGEGGYVRIRRGVRGEGVCGLAKLPSYPV

SEQ ID NO: 3995 - protein, 147 aa, Zea mays subsp. mays
  peptide (1)..(147): Ceres Seq. ID no. 12566349
MDNAFQFVARRGGLASESGYPYQGRDGPCRSSAAAAAASIRGHEDVPRNNEAALAAAVAHQPVSVAINGEDMAFRFYDSGVLGGACGTDLNHAITAVGYGTAADGTRYWLMKNSWGASWGEGGYVRIRRGVRGEGVCGLAKLPSYPV

SEQ ID NO: 3996 - DNA, 1262 bp, Zea mays subsp. mays
  misc_feature (1)..(1262): Ceres Seq. ID no. 12353722
  misc_feature (1)..(1262): Ortholog of  Ceres SEQ ID NO 15170760 as cited in SEQ ID NO 52747
  misc_feature (1)..(1262): Ortholog of  Ceres SEQ ID NO 15168549 as cited in SEQ ID NO 56976
  misc_feature (1)..(1262): Ortholog of  Ceres SEQ ID NO 14314335 as cited in SEQ ID NO 57305
agcaacgcaagcaagcaattgtcaaccgactctatcttagctctctttgcaagccagtaggtcaccactcaaaagcttgtgaagcaggtgagatgggcaaggaggtggatgtgtccactctagaggccggcggcgtccgtgaccgtgactacgcggaccctccgccggcaccgctgatcgacatcgacgagctcggcaagtggtccctgtaccgcgccgtgatcgccgagttcgtggccacgctgctgttcctgtacatcacggttgccacggtgatcgggtacaagcaccagacggacgcgtcggcgtcggggcccgacgcggcgtgcagcggcgtgggcatcctgggcatcgcgtgggcgttcggcggcatgatcttcatcctcgtctactgcaccgccggcatctcgggcggccacatcaacccggccgtcacgttcggcctcttcctggcgcgcaaggtctccctggtgcgcgctctgctgtacatggccgcgcagagcctcggtgctatctgcggcgtcgcgctcgtcaagggcttccagagcgggttctacgcgcgctacggcggcggcgccaatgaggtcagcgccgggtactccaccggcacggggctcgccgccgagatcatcggtaccttcgtgctcgtctacaccgtcttctccgccaccgaccccaagcgcaacgctcgcgactcccacgttccggtgctggcgccgcttccgatcgggttcgctgtgttcatggtgcacctggcgacgatcccgatcactggcaccggtatcaacccggcgaggagcctcggcgccgccgtcgtgtacaacaacagcaaagcctggagcgaccagtggatcttctgggtgggcccgttcatcggagcggcgatcgcagcgctataccaccagatcgtcctccgcgccagcgccagggggtacggctccttccggagcaacgcctaggaccatctcgtcggcgggctattcagctcttcctcctccgcagtttaaggtgaacggagaaggagagcgcaagggggtacggagcaacgtctaggctcacctcgcctttgcccccgcccatccacagcagcagtagctttcattcaggtcaagtgttgcagctgccggcaacggtagctagcgcaggcgtttgtgagtttgtgtgcggtgtggaaagcaagtgtgacttggtcagcgtctgtgtgtcctgttgggttgcagtcaatctaacttaataaagatggacgaatgcaagtgattatt

SEQ ID NO: 3997 - protein, 318 aa, Zea mays subsp. mays
  peptide (1)..(318): Ceres Seq. ID no. 12353723
QRKQAIVNRLYLSSLCKPVGHHSKACEAGEMGKEVDVSTLEAGGVRDRDYADPPPAPLIDIDELGKWSLYRAVIAEFVATLLFLYITVATVIGYKHQTDASASGPDAACSGVGILGIAWAFGGMIFILVYCTAGISGGHINPAVTFGLFLARKVSLVRALLYMAAQSLGAICGVALVKGFQSGFYARYGGGANEVSAGYSTGTGLAAEIIGTFVLVYTVFSATDPKRNARDSHVPVLAPLPIGFAVFMVHLATIPITGTGINPARSLGAAVVYNNSKAWSDQWIFWVGPFIGAAIAALYHQIVLRASARGYGSFRSNA

SEQ ID NO: 3998 - protein, 288 aa, Zea mays subsp. mays
  peptide (1)..(288): Ceres Seq. ID no. 12353724
MGKEVDVSTLEAGGVRDRDYADPPPAPLIDIDELGKWSLYRAVIAEFVATLLFLYITVATVIGYKHQTDASASGPDAACSGVGILGIAWAFGGMIFILVYCTAGISGGHINPAVTFGLFLARKVSLVRALLYMAAQSLGAICGVALVKGFQSGFYARYGGGANEVSAGYSTGTGLAAEIIGTFVLVYTVFSATDPKRNARDSHVPVLAPLPIGFAVFMVHLATIPITGTGINPARSLGAAVVYNNSKAWSDQWIFWVGPFIGAAIAALYHQIVLRASARGYGSFRSNA

SEQ ID NO: 3999 - protein, 195 aa, Zea mays subsp. mays
  peptide (1)..(195): Ceres Seq. ID no. 12353725
MIFILVYCTAGISGGHINPAVTFGLFLARKVSLVRALLYMAAQSLGAICGVALVKGFQSGFYARYGGGANEVSAGYSTGTGLAAEIIGTFVLVYTVFSATDPKRNARDSHVPVLAPLPIGFAVFMVHLATIPITGTGINPARSLGAAVVYNNSKAWSDQWIFWVGPFIGAAIAALYHQIVLRASARGYGSFRSNA

SEQ ID NO: 4000 - DNA, 972 bp, Zea mays subsp. mays
  misc_feature (1)..(972): Ceres Seq. ID no. 12365343
  misc_feature (1)..(972): Ortholog of  Ceres SEQ ID NO 13655598 as cited in SEQ ID NO 64077
  misc_feature (1)..(972): Ortholog of  Ceres SEQ ID NO 15179351 as cited in SEQ ID NO 0
aatacatgcgttataacagcagagcagaggtcaacaagacgagacaagagaatgcctgtgagcaggatcgccgtgggtgctccgggcgagctgtcccaccccgacaccgccaaggccgccgtcgccgagttcatctccacgctcatcttcgtcttcgccggctcaggatcggggatggccttcagtaagctcacggacggtggcgccgccactcctgccggcctcatcgccgcgtctctggcgcacgccctcgccctcttcgtggccgtctccgtgggtgccaacatctccggcggccacgtgaaccctgccgtgaccttcggcgcctttgtgggcggcaacatcagcctcctcaaggccctggtctactgggtggcccagctcctgggctccgtcgtcgcctgcctcctcctcaagatcgccacgggcggcgcggcccttggcgccttctcgctgtcggcgggcgtcggcgccatgaacgccgtggtgctggagatggtcatgaccttcggcctcgtgtacacggtgtacgccacggccgtggaccccaagaagggcgacctcggcgtcatcgcgcccatcgccatcggcttcatcgtcggcgccaacatcctggcggggggcgccttcgacggcgcctccatgaaccccgccgtctccttcggcccggccgtcgtcaccggcgtctgggagaaccactgggtgtactgggtcggcccactcgcgggcgcggccatcgcggcgctcgtctacgacatcatcttcatcgggcagcgcccacaccagcagctgccaaccacggcagcagactactgatgaccatcatcatcatgcactgaataattaagaccagaccactcaatatatatacatatgaagaataacatgccaaatctcatctcctagagctagcaacttgattctccatatatttcttaaatacaaactaaactcgattgagtatagcttggt

SEQ ID NO: 4001 - protein, 271 aa, Zea mays subsp. mays
  peptide (1)..(271): Ceres Seq. ID no. 12365344
NTCVITAEQRSTRRDKRMPVSRIAVGAPGELSHPDTAKAAVAEFISTLIFVFAGSGSGMAFSKLTDGGAATPAGLIAASLAHALALFVAVSVGANISGGHVNPAVTFGAFVGGNISLLKALVYWVAQLLGSVVACLLLKIATGGAALGAFSLSAGVGAMNAVVLEMVMTFGLVYTVYATAVDPKKGDLGVIAPIAIGFIVGANILAGGAFDGASMNPAVSFGPAVVTGVWENHWVYWVGPLAGAAIAALVYDIIFIGQRPHQQLPTTAADY

SEQ ID NO: 4002 - protein, 254 aa, Zea mays subsp. mays; identical to SEQ ID NO: 3680
  peptide (1)..(254): Ceres Seq. ID no. 12365345

SEQ ID NO: 4003 - protein, 213 aa, Zea mays subsp. mays; identical to SEQ ID NO: 3681
  peptide (1)..(213): Ceres Seq. ID no. 12365346

SEQ ID NO: 4004 - DNA, 1203 bp, Zea mays subsp. mays
  misc_feature (1)..(1203): Ceres Seq. ID no. 12566771
  misc_feature (1)..(1203): Ortholog of  Ceres SEQ ID NO 14304124 as cited in SEQ ID NO 56378
  misc_feature (1)..(1203): Ortholog of  Ceres SEQ ID NO 12585331 as cited in SEQ ID NO 62912
  misc_feature (1)..(1203): Ortholog of  Ceres SEQ ID NO 13654964 as cited in SEQ ID NO 63176
aggattcacaagtgctcgtagcaaatctacaaaatccccaaccgcctctcaacaaagtctccccacgggaggtacacagctacgcgcaaacccgcgtctcgcgcgaagaatccgcatttccccttccccgcaccgcaccgcacccaacccccgtcggagagagagatggcatcggtggcggagatgcagcccctcgcgccggcggggtaccgccgcgcgccggagatgaaggagaaggtggaggcgtcggtggtggacctggaggccgggaccggggagacgctgtacccggggatctcgcgcggggagagcgccctccgatggggcttcgtccgcaaggtctacggcatcctccgctgcgcagctgctcctcaccaccgccgtctccgccctcaccgttctccaccccaccctcaacgccacgctctccgactccccgggcctcgcgctcgtgctcgccgtcctgcccttcatcctgatgatcccattgtatcattatcagcacaagcacccacacaattccgttttcctgggtctgttcacgttgtgcttgagcttcagcatcggcgtggcttgtgctaacacccaagggaaaatcgttctggaggctttagtgctgacggctggcgtggtggtttcgctgactgcgtatgctttctgggcgtcaaagaagggcaaggaattcgggtacctggggcctatcctgtcttccgcgcttactatcctcgtcctaactagctttcttcaggttttcttcccactgggacccgtgtcggtgggcttgttcggtgggctaggggctctggtcttctcaggcttcatcctgtacgacaccgagaacctgattaggcgccacacctacgacgagtacatctgggcgtcggttgggctgtacctcgacatcctgaacctgttcctctccatcctgaacatgctcaggagcatgcaatccgacaactagccggtcaaagcaccgcaccgcggcctcttgatatcgaacacggtatacccccgcggtcctgtgctctggttgttaagaagacgggatcgaagtgcgacatatgtattgtctattgtatgagcccactcgtgtcaacactgcaaacaattgtggtcatgtcaccttgtatgttcttcgtcactttgcaaacaactgtaagtacctgatatcgttttgcgctcgtgctattcgcgctaaaaatc

SEQ ID NO: 4005 - protein, 160 aa, Zea mays subsp. mays
  peptide (1)..(160): Ceres Seq. ID no. 12566772
MIPLYHYQHKHPHNSVFLGLFTLCLSFSIGVACANTQGKIVLEALVLTAGVVVSLTAYAFWASKKGKEFGYLGPILSSALTILVLTSFLQVFFPLGPVSVGLFGGLGALVFSGFILYDTENLIRRHTYDEYIWASVGLYLDILNLFLSILNMLRSMQSDN

SEQ ID NO: 4006 - protein, 158 aa, Zea mays subsp. mays
  peptide (1)..(158): Ceres Seq. ID no. 12566773
DSQVLVANLQNPQPPLNKVSPREVHSYAQTRVSREESAFPLPRTAPHPTPVGERDGIGGGDAAPRAGGVPPRAGDEGEGGGVGGGPGGRDRGDAVPGDLARGERPPMGLRPQGLRHPPLRSCSSPPPSPPSPFSTPPSTPRSPTPRASRSCSPSCPSS

SEQ ID NO: 4007 - protein, 138 aa, Zea mays subsp. mays
  peptide (1)..(138): Ceres Seq. ID no. 12566774
MASVAEMQPLAPAGYRRAPEMKEKVEASVVDLEAGTGETLYPGISRGESALRWGFVRKVYGILRCAAAPHHRRLRPHRSPPHPQRHALRLPGPRARARRPALHPDDPIVSLSAQAPTQFRFPGSVHVVLELQHRRGLC

SEQ ID NO: 4008 - DNA, 832 bp, Zea mays subsp. mays
  misc_feature (1)..(832): Ceres Seq. ID no. 12366950
  misc_feature (1)..(832): Ortholog of  Ceres SEQ ID NO 13587131 as cited in SEQ ID NO 331
  misc_feature (1)..(832): Ortholog of  Ceres SEQ ID NO 13661176 as cited in SEQ ID NO 61114
gatataagaaaccctagcggagccactaacacagtcgcctccttcctgcgccgccgccgccgccgccgctaccaccgcctcgcggccgcctgcggctccgcgtttccgcacggaagttggtgaaggtttcttgaggctgagaacatggtgctgaagacggaactttgccgcttcagcggccagaagatttatcctgggaaaggcattagatttatccgtgctgattctcaggtcttcctttttgccaactcgaaatgcaagcgctacttccacaaccgcctgaagcctgcaaagcttacctggacagcaatgtacaggaagcagcacaagaaggatatccatgctgaagcggtaaagaagaggcgccgcgccaccaagaagccatactccaggtcaattgtgggtgcttccttggaagtaatccagaagaagagagctgagaagccagaggtccgcgatgctgctagagaagctgctcttcgtgagatcaaggagcgcatcaagaagaccaaggatgagaagaaagcgaagaaggcggaggtgagcaagtcccagaagacgcagacaaagggtgcggtccagaagggttccaagggccccaagttgggcggcggtggtgggaagcgctgaaagaacttagtgtcgtttctcgacattgcagtcgttccttagccaaagccactttcgtagaacctgtgttgaatttgcaagacttattcaagcgttgcttgtgcgtgctaaataccatggcaagagaacggatttatatttatgcctgaaaaaaaatgaccgttcatattcttaactcatcttggataagggcttgttttgc

SEQ ID NO: 4009 - protein, 161 aa, Zea mays subsp. mays; identical to SEQ ID NO: 1700
  peptide (1)..(161): Ceres Seq. ID no. 12366951

SEQ ID NO: 4010 - protein, 106 aa, Zea mays subsp. mays; identical to SEQ ID NO: 1701
  peptide (1)..(106): Ceres Seq. ID no. 12366952

SEQ ID NO: 4011 - DNA, 745 bp, Zea mays subsp. mays
  misc_feature (1)..(745): Ceres Seq. ID no. 13492365
  misc_feature (1)..(745): Ortholog of  Ceres SEQ ID NO 12583650 as cited in SEQ ID NO 57575
tcgggaagaggagcaaaacaaaccctatctaaaccgcggcggactcttcgtccagcaaggtttcccatccaaatccggccacgccacttgttctttttttccgcaacaccgatggtgtacgtggattcttgggaggagttcgtggagcgttccgtgcagctcttccgcggcgaccccaacgccacccgctacgtgatgaagtaccggcactgcgaggggaagctcgtgctcaaggtcaccgacgaccgcgagtgcttgaagttcaagacagatcaagctcaagacgcaaagaagatggagaagctcaacaacatcttttttgctctcatgacacgtgggcctgatgttgatatcagtgaagtttcagggaaggaacaggcagagcaacagcaagcgaagaaaggtcggggaaggaggcaataatgcggtctgatccttatttgttacagaaaattcacaactggaatgatggattaacatttcatggactttattgtaattctgaagaaagtttttccagtacagaaccgagaacaaactaaatgcactctatcatgaatgaatgcatgattgagaaacgcccaaggcttcaaccctgcttcgtttttctgcacgggaagcgttttcatccatgttttctggtagaggaatgtagcttgatactctgcctgatcttatattgcgcactgcctgttggggttgggccatacgattttaggctattctcaatgggaatgaatttcct

SEQ ID NO: 4012 - protein, 140 aa, Zea mays subsp. mays
  peptide (1)..(140): Ceres Seq. ID no. 13492366
SGRGAKQTLSKPRRTLRPARFPIQIRPRHLFFFSATPMVYVDSWEEFVERSVQLFRGDPNATRYVMKYRHCEGKLVLKVTDDRECLKFKTDQAQDAKKMEKLNNIFFALMTRGPDVDISEVSGKEQAEQQQAKKGRGRRQ

SEQ ID NO: 4013 - protein, 103 aa, Zea mays subsp. mays
  peptide (1)..(103): Ceres Seq. ID no. 13492367
MVYVDSWEEFVERSVQLFRGDPNATRYVMKYRHCEGKLVLKVTDDRECLKFKTDQAQDAKKMEKLNNIFFALMTRGPDVDISEVSGKEQAEQQQAKKGRGRRQ

SEQ ID NO: 4014 - protein, 75 aa, Zea mays subsp. mays
  peptide (1)..(75): Ceres Seq. ID no. 13492368
MKYRHCEGKLVLKVTDDRECLKFKTDQAQDAKKMEKLNNIFFALMTRGPDVDISEVSGKEQAEQQQAKKGRGRRQ

SEQ ID NO: 4015 - DNA, 718 bp, Zea mays subsp. mays
  misc_feature (1)..(718): Ceres Seq. ID no. 12403024
  misc_feature (1)..(718): Ortholog of  Ceres SEQ ID NO 12610267 as cited in SEQ ID NO 51993
  misc_feature (1)..(718): Ortholog of  Ceres SEQ ID NO 13495070 as cited in SEQ ID NO 53216
  misc_feature (1)..(718): Ortholog of  Ceres SEQ ID NO 12598241 as cited in SEQ ID NO 61025
  misc_feature (1)..(718): Ortholog of  Ceres SEQ ID NO 13661333 as cited in SEQ ID NO 61620
  misc_feature (1)..(718): Ortholog of  Ceres SEQ ID NO 15173749 as cited in SEQ ID NO 61775
  misc_feature (1)..(718): Ortholog of  Ceres SEQ ID NO 13596812 as cited in SEQ ID NO 62283
  misc_feature (1)..(718): Ortholog of  Ceres SEQ ID NO 13623021 as cited in SEQ ID NO 0
  misc_feature (1)..(718): Ortholog of  Ceres SEQ ID NO 14309080 as cited in SEQ ID NO 0
accttcgctaccattgcttcaccatcaccaccaccccgcggctgcagctcagcagctccagacctcaccagaggcacctaccacaccgcccgccgccgatcccgtcacccgtctcctccccgctgcggagcgtctccagccctgcccggtgcccgcccagatggcaaacgcggcgtcagggatggccgtggacgacgactgcaagcgccggttcctggagctcaaggccaagaggacgcaccgcttcatcatctacaggatcgacgagaagaagaagatggtggtggtggagcaggtgggcaagcccgtgctcggctacgacgacttcgccgccagcctccccgccaacgagtgcaggtacgccatcttcgactacgacttcgtcaccgaggagaactgccagaagagcaagatcttcttcatcgcctggtctcctgacacggcgcgcgtgaggagcaagatgatctacgccagctccaaggagaggttcaagcgggagctggacggcattcaggtggatctccaggccaccgactccgccgaggttggccttgacgtcatccagggccgtgcaagctgaggatgcccagcgatgaactgcccatgccagaggatgtatgagcatcatcagttcagatgagaacttgactgggcgggctatgtaaaaactgcatccaccgcagtgataaatcaatctaatcaatctaccaccccctcc

SEQ ID NO: 4016 - protein, 192 aa, Zea mays subsp. mays
  peptide (1)..(192): Ceres Seq. ID no. 12403025
PSLPLLHHHHHPAAAAQQLQTSPEAPTTPPAADPVTRLLPAAERLQPCPVPAQMANAASGMAVDDDCKRRFLELKAKRTHRFIIYRIDEKKKMVVVEQVGKPVLGYDDFAASLPANECRYAIFDYDFVTEENCQKSKIFFIAWSPDTARVRSKMIYASSKERFKRELDGIQVDLQATDSAEVGLDVIQGRAS

SEQ ID NO: 4017 - protein, 149 aa, Zea mays subsp. mays
  peptide (1)..(149): Ceres Seq. ID no. 12403026
LRYHCFTITTTPRLQLSSSRPHQRHLPHRPPPIPSPVSSPLRSVSSPARCPPRWQTRRQGWPWTTTASAGSWSSRPRGRTASSSTGSTRRRRWWWWSRWASPCSATTTSPPASPPTSAGTPSSTTTSSPRRTARRARSSSSPGLLTRRA

SEQ ID NO: 4018 - protein, 145 aa, Zea mays subsp. mays
  peptide (1)..(145): Ceres Seq. ID no. 12403027
TFATIASPSPPPRGCSSAAPDLTRGTYHTARRRSRHPSPPRCGASPALPGARPDGKRGVRDGRGRRLQAPVPGAQGQEDAPLHHLQDRREEEDGGGGAGGQARARLRRLRRQPPRQRVQVRHLRLRLRHRGELPEEQDLLHRLVS

SEQ ID NO: 4019 - protein, 139 aa, Zea mays subsp. mays
  peptide (1)..(139): Ceres Seq. ID no. 12403028
MANAASGMAVDDDCKRRFLELKAKRTHRFIIYRIDEKKKMVVVEQVGKPVLGYDDFAASLPANECRYAIFDYDFVTEENCQKSKIFFIAWSPDTARVRSKMIYASSKERFKRELDGIQVDLQATDSAEVGLDVIQGRAS

SEQ ID NO: 4020 - DNA, 942 bp, Zea mays subsp. mays
  misc_feature (1)..(942): Ceres Seq. ID no. 12343221
  misc_feature (1)..(942): Ortholog of  Ceres SEQ ID NO 15179603 as cited in SEQ ID NO 0
attacctggcgcggagaggagagggagtgagtcgagatccattcccaactgcacctgcgcgcctcgactggtagcccgaaccctagctagcaggtcggaggcgagagagcagccatggcgcggtgcctcgcgctcgtctccctccttctcctcggcctcgcctccgccgcctccgctgccgatgcgccctttgtcgtcgcgcacaagaaggtttcgctctcccgccccaagccgggcgtcgagcgcgtcgccgtctccctcgacctctacaaccagggatccgcgactgcctatgatgtgtcacttaatgacgactcttggccaacacaagcatttgagcttgtcactggagagaaatcgaagacattggaaaggcttgaccctggtgccactgctacacacacatatgtcctggagaccaaaacacagggcaggttccagggttcaccagctattattacgtaccgtgttcccacaaagactgctcttcaggaggcctactcaactcccatcttcccactggatattctcgctgagagacttcctgagaagaagtttgaatgggctaagaggcttgtggcgaaatatgggtcacttgtgtctgttgtctcatttgttggattgtttatctacctcgttgcgagcccgtcgaagagcagctcaaaaggaagcaagaagagacgttgatctacttatagttcggcgcagttgaagttgtagctggtggtttttgcctggaggaactcttggtagtttgagctgagcgaaagctttaaattttacatttactcaccacaccatgaactgcaacgaagtgagcatctgttagaaaagtggaccagtaattttggttggttatttatttcctgtttctctgtcagactcttaactcggaggacctgtaactaggaaagttacttttgcttgaaagaacattttggc

SEQ ID NO: 4021 - protein, 236 aa, Zea mays subsp. mays
  peptide (1)..(236): Ceres Seq. ID no. 12343222
LPGAERRGSESRSIPNCTCAPRLVARTLASRSEAREQPWRGASRSSPSFSSASPPPPPLPMRPLSSRTRRFRSPAPSRASSASPSPSTSTTRDPRLPMMCHLMTTLGQHKHLSLSLERNRRHWKGLTLVPLLHTHMSWRPKHRAGSRVHQLLLRTVFPQRLLFRRPTQLPSSHWIFSLRDFLRRSLNGLRGLWRNMGHLCLLSHLLDCLSTSLRARRRAAQKEARRDVDLLIVRRS

SEQ ID NO: 4022 - protein, 190 aa, Zea mays subsp. mays
  peptide (1)..(190): Ceres Seq. ID no. 12343223
MARCLALVSLLLLGLASAASAADAPFVVAHKKVSLSRPKPGVERVAVSLDLYNQGSATAYDVSLNDDSWPTQAFELVTGEKSKTLERLDPGATATHTYVLETKTQGRFQGSPAIITYRVPTKTALQEAYSTPIFPLDILAERLPEKKFEWAKRLVAKYGSLVSVVSFVGLFIYLVASPSKSSSKGSKKRR

SEQ ID NO: 4023 - protein, 176 aa, Zea mays subsp. mays
  peptide (1)..(176): Ceres Seq. ID no. 12343224
MRPLSSRTRRFRSPAPSRASSASPSPSTSTTRDPRLPMMCHLMTTLGQHKHLSLSLERNRRHWKGLTLVPLLHTHMSWRPKHRAGSRVHQLLLRTVFPQRLLFRRPTQLPSSHWIFSLRDFLRRSLNGLRGLWRNMGHLCLLSHLLDCLSTSLRARRRAAQKEARRDVDLLIVRRS

SEQ ID NO: 4024 - DNA, 1063 bp, Zea mays subsp. mays
  misc_feature (1)..(1063): Ceres Seq. ID no. 12343133
  misc_feature (1)..(1063): Ortholog of  Ceres SEQ ID NO 12619999 as cited in SEQ ID NO 66123
  misc_feature (1)..(1063): Ortholog of  Ceres SEQ ID NO 13656436 as cited in SEQ ID NO 69154
acgtctgtctccctctccctgcgctcgctctctccctccctcggtcaaagccagcacgacaacacagcagtctcggtagctgtccccctcgccctcatccctcctcggcgccgctgccggcccgcgcccgccccgcccgcctcccccctcgtgccgctctgccgcggcgcattccgcgcccgcctcgccaccgaatcgggcggaatctcagcgggaccaaaatggggtcgccgggtgcggggagcagcggcggccacgagtgctccttcaagatcctgctcatcggggactcgggcgtcggcaagagcagcctcctcgtcagcttcgtcgccgcctcccacctcgacggcgacatcgcccccaccatcggtgtggattttaaaatcaagttccttacagttggtggaaagaaactaaagttgacaatatgggatactgctggccaggagaggtttaggacaataactagttcttactacagaggtgctcagggaattattttagtatatgatgtcacaaagagagagagtttctcaaatttggctgatgtttggactaaggaaatagaagcaaactcaacaaacaaagactgcataaaaatgcttgttggaaacaaagttgacaaggatgatgaaagaatggtcacagaagaagaaggtcttgcttttgctgaagaatctggttgtctgtttcttgagagcagtgcaaaaacacgagaaaatgttgagaaatgttttgaagaacttgcattgaagatccttgaggtccctagtctcctggaggaagggtcttcttcggttgtcaagaggaaaatcctgaaacagaagcaggaaagtcatgcaaagaacggcagtggatgctgtcaatagatgtgctgatccacgcgacaaggttggctgttttcgtgtgagctgccctgacgttctgctgtacatgagttgtatctacatggtcttgtgagtaaaacagggttaaagaatcagcttgtttggcggggagggggagtgagcataattgatttgtacaaaggacatggcagtttggtgtcattgattttctctct

SEQ ID NO: 4025 - protein, 288 aa, Zea mays subsp. mays
  peptide (1)..(288): Ceres Seq. ID no. 12343134
VCLPLPALALSLPRSKPARQHSSLGSCPPRPHPSSAPLPARARPARLPPRAALPRRIPRPPRHRIGRNLSGTKMGSPGAGSSGGHECSFKILLIGDSGVGKSSLLVSFVAASHLDGDIAPTIGVDFKIKFLTVGGKKLKLTIWDTAGQERFRTITSSYYRGAQGIILVYDVTKRESFSNLADVWTKEIEANSTNKDCIKMLVGNKVDKDDERMVTEEEGLAFAEESGCLFLESSAKTRENVEKCFEELALKILEVPSLLEEGSSSVVKRKILKQKQESHAKNGSGCCQ

SEQ ID NO: 4026 - protein, 215 aa, Zea mays subsp. mays
  peptide (1)..(215): Ceres Seq. ID no. 12343135
MGSPGAGSSGGHECSFKILLIGDSGVGKSSLLVSFVAASHLDGDIAPTIGVDFKIKFLTVGGKKLKLTIWDTAGQERFRTITSSYYRGAQGIILVYDVTKRESFSNLADVWTKEIEANSTNKDCIKMLVGNKVDKDDERMVTEEEGLAFAEESGCLFLESSAKTRENVEKCFEELALKILEVPSLLEEGSSSVVKRKILKQKQESHAKNGSGCCQ

SEQ ID NO: 4027 - DNA, 1452 bp, Zea mays subsp. mays
  misc_feature (1)..(1452): Ceres Seq. ID no. 12404819
  misc_feature (1)..(1452): Ortholog of  Ceres SEQ ID NO 15225507 as cited in SEQ ID NO 55551
  misc_feature (1)..(1452): Ortholog of  Ceres SEQ ID NO 15225677 as cited in SEQ ID NO 0
ataacctcgcgcacacagcccagcacaagcacgcagcagccctccagctccagccaagcaaagcacaggggtccattgcactgcattgtattgcagcatttctctgcttcgcttcgcttgcttcaggaaagcttgagctagctcgaagtagaaggacaagacagcaaagtcacgcaccatgagaaccatcggggcgaggaacacgcacgactcgctctccttctccaggcgccacttcaagtngcccgtcctcggcaagagcaagagccacggcgccgcgacgttcggggacgaggagtacatgaagagctcggaggcggaggacgacgacgagacgaccatggccttctcctccgcctgcccgtccttccactccgatggcttcgtgtcccctccgctgaagccggcgccgtcggnccagcagcagcaggtggcggcggcggcggcggggcagaggaggaggatgaaggtccggactgccgtgtcgcgcctgcgctcggcgctggccaacgccgtggccgggcggcaccgacaggtgggcatgggcgcgcggctcaccggcacgctctacggccaccggcgcggccacgtgcacctggcgttccaggtggacccgcgcgcgtgcccggcgctgctgctggagctggcggcgcccacggcggcgctggtgcgggagatggcctcgggcctggtgcgcatcgcgctggagtgcgaccgcgccagggccagggggtcgcccgccgccgcgctgccgtccccgtccccgggcgccggcaagaggctggtggaggagacggtgtggcgcgcctactgcaacggcaagagctgcgggtacgcggtgcggcgcgagtgcggcgccgcggactggcgcgtgctccgcgcgctcgagcccgtgtccatgggcgccggagtcatccccgccgccagctgcggcggcggcgagggcgacgtcatgtacatgcgcgcgcggttcgagcgcgtcgtggggtctcgcgactcggaggccttctacatgatgaatccggacgncancgncgncgnagncggtcatgtcgggcccgagctcagcgtctacctcctcagagtctgatcggctcggccgccatggcagtggcagtgacatctgcacctcggccctgatcgtttttttctgtgcatgccaagctgtgaaaatggattagtaggcncctaggtgtagctgttagcacttctagggggtgtttgataaagtggctaagtccctaggttcacatcgaatgtttgatgctagattaaagtattaaatatattttaagtataaaaaataattaaatagataagaactgaacggcaacacaaacctattagcctaattagttcgtgatctgcctatacgatggtncaataaacatctgctaatcacgaattaattaggtttaataaattatgtcgctgtttagtcatcatctttgt

SEQ ID NO: 4028 - protein, 303 aa, Zea mays subsp. mays
  peptide (1)..(303): Ceres Seq. ID no. 12404820
  misc_feature (22)..(22): Xaa is any aa, unknown or other
  misc_feature (80)..(80): Xaa is any aa, unknown or other
  misc_feature (284)..(284): Xaa is any aa, unknown or other
  misc_feature (285)..(285): Xaa is any aa, unknown or other
  misc_feature (286)..(286): Xaa is any aa, unknown or other
  misc_feature (287)..(287): Xaa is any aa, unknown or other
  misc_feature (288)..(288): Xaa is any aa, unknown or other
  misc_feature (289)..(289): Xaa is any aa, unknown or other
MRTIGARNTHDSLSFSRRHFKXPVLGKSKSHGAATFGDEEYMKSSEAEDDDETTMAFSSACPSFHSDGFVSPPLKPAPSXQQQQVAAAAAGQRRRMKVRTAVSRLRSALANAVAGRHRQVGMGARLTGTLYGHRRGHVHLAFQVDPRACPALLLELAAPTAALVREMASGLVRIALECDRARARGSPAAALPSPSPGAGKRLVEETVWRAYCNGKSCGYAVRRECGAADWRVLRALEPVSMGAGVIPAASCGGGEGDVMYMRARFERVVGSRDSEAFYMMNPDXXXXXXGHVGPELSVYLLRV

SEQ ID NO: 4029 - protein, 262 aa, Zea mays subsp. mays
  peptide (1)..(262): Ceres Seq. ID no. 12404821
  misc_feature (39)..(39): Xaa is any aa, unknown or other
  misc_feature (243)..(243): Xaa is any aa, unknown or other
  misc_feature (244)..(244): Xaa is any aa, unknown or other
  misc_feature (245)..(245): Xaa is any aa, unknown or other
  misc_feature (246)..(246): Xaa is any aa, unknown or other
  misc_feature (247)..(247): Xaa is any aa, unknown or other
  misc_feature (248)..(248): Xaa is any aa, unknown or other
MKSSEAEDDDETTMAFSSACPSFHSDGFVSPPLKPAPSXQQQQVAAAAAGQRRRMKVRTAVSRLRSALANAVAGRHRQVGMGARLTGTLYGHRRGHVHLAFQVDPRACPALLLELAAPTAALVREMASGLVRIALECDRARARGSPAAALPSPSPGAGKRLVEETVWRAYCNGKSCGYAVRRECGAADWRVLRALEPVSMGAGVIPAASCGGGEGDVMYMRARFERVVGSRDSEAFYMMNPDXXXXXXGHVGPELSVYLLRV

SEQ ID NO: 4030 - protein, 249 aa, Zea mays subsp. mays
  peptide (1)..(249): Ceres Seq. ID no. 12404822
  misc_feature (26)..(26): Xaa is any aa, unknown or other
  misc_feature (230)..(230): Xaa is any aa, unknown or other
  misc_feature (231)..(231): Xaa is any aa, unknown or other
  misc_feature (232)..(232): Xaa is any aa, unknown or other
  misc_feature (233)..(233): Xaa is any aa, unknown or other
  misc_feature (234)..(234): Xaa is any aa, unknown or other
  misc_feature (235)..(235): Xaa is any aa, unknown or other
MAFSSACPSFHSDGFVSPPLKPAPSXQQQQVAAAAAGQRRRMKVRTAVSRLRSALANAVAGRHRQVGMGARLTGTLYGHRRGHVHLAFQVDPRACPALLLELAAPTAALVREMASGLVRIALECDRARARGSPAAALPSPSPGAGKRLVEETVWRAYCNGKSCGYAVRRECGAADWRVLRALEPVSMGAGVIPAASCGGGEGDVMYMRARFERVVGSRDSEAFYMMNPDXXXXXXGHVGPELSVYLLRV

SEQ ID NO: 4031 - DNA, 1133 bp, Zea mays subsp. mays
  misc_feature (1)..(1133): Ceres Seq. ID no. 12409997
  misc_feature (1)..(1133): Ortholog of  Ceres SEQ ID NO 14305682 as cited in SEQ ID NO 59267
  misc_feature (1)..(1133): Ortholog of  Ceres SEQ ID NO 14315060 as cited in SEQ ID NO 60039
  misc_feature (1)..(1133): Ortholog of  Ceres SEQ ID NO 13594430 as cited in SEQ ID NO 60181
  misc_feature (1)..(1133): Ortholog of  Ceres SEQ ID NO 13597809 as cited in SEQ ID NO 64598
  misc_feature (1)..(1133): Ortholog of  Ceres SEQ ID NO 14313544 as cited in SEQ ID NO 68424
  misc_feature (1)..(1133): Ortholog of  Ceres SEQ ID NO 12617960 as cited in SEQ ID NO 69051
  misc_feature (1)..(1133): Ortholog of  Ceres SEQ ID NO 13589401 as cited in SEQ ID NO 0
  misc_feature (1)..(1133): Ortholog of  Ceres SEQ ID NO 15179361 as cited in SEQ ID NO 0
acacggcgtctttgggtgagcacaccgcgcagcaacgagaggggcaaacaagcttgctactgtgatttctcgtccgagcagcggcggaggagagagagagagcatggccgaccacaaggaggagcctgtgccggagtctgtgatggacaagatcaccgagaagttccacggcggggactcgtcgtcgtcgtcgtctgactcggacgacgagaagaaggggtcctcgttggcgtcggcggcggaagccatgaaggccaagatctaccgccttttcggccgggagaggcccgtccactccgtcctcggcggcggcaagcctgccgatcttatcctatggaggaacaggaagatctctggcggggtacttgctggtgccacggccatctggctcctattcgaggtcatggagtaccatctcctcaccttggtgtgccactgtctcatcctctcgctggccatcctcttcctgtggtccaatgcctccactttcatcaacaagtccccaccgaacattcctgaggtcaaaatccctgaggatgtggctgttaatgttgccctgtcactgagatatgagatcaacaggggctttgctaccttaagggagattgggcatggccgtgatctgaagaaattcctaattgttattgcaggtctctggcttctttcagttctcgggagctgctgcaacttcctgacactgttctatattgtctttgtggcactgtacactgtaccagttctgtatgagaaatatgaggacaaggttgatgcttttggtgagaaggctatgactgaactgaagaagtattatgccattttcgatgagaagtgcctatcgaagattccaaagggcccccttaaggataagaagcactagattggtagtaaggtatttgctatgaatcaacatctacattatgtcactagctgtcacctctttctctgaaggatggtgcttggtcctggtctctagttgatagtatataatctgtatgggcaactttggtgtgactgacagtctgctgaaaactgttgatcttgtttttgggtttcagctttcaccatagttgcctggaagcttgaaatatattatgcgctctatcaatgtcatgtgaactttgtcatgtaccttc

SEQ ID NO: 4032 - protein, 257 aa, Zea mays subsp. mays
  peptide (1)..(257): Ceres Seq. ID no. 12409998
MADHKEEPVPESVMDKITEKFHGGDSSSSSSDSDDEKKGSSLASAAEAMKAKIYRLFGRERPVHSVLGGGKPADLILWRNRKISGGVLAGATAIWLLFEVMEYHLLTLVCHCLILSLAILFLWSNASTFINKSPPNIPEVKIPEDVAVNVALSLRYEINRGFATLREIGHGRDLKKFLIVIAGLWLLSVLGSCCNFLTLFYIVFVALYTVPVLYEKYEDKVDAFGEKAMTELKKYYAIFDEKCLSKIPKGPLKDKKH

SEQ ID NO: 4033 - protein, 244 aa, Zea mays subsp. mays
  peptide (1)..(244): Ceres Seq. ID no. 12409999
MDKITEKFHGGDSSSSSSDSDDEKKGSSLASAAEAMKAKIYRLFGRERPVHSVLGGGKPADLILWRNRKISGGVLAGATAIWLLFEVMEYHLLTLVCHCLILSLAILFLWSNASTFINKSPPNIPEVKIPEDVAVNVALSLRYEINRGFATLREIGHGRDLKKFLIVIAGLWLLSVLGSCCNFLTLFYIVFVALYTVPVLYEKYEDKVDAFGEKAMTELKKYYAIFDEKCLSKIPKGPLKDKKH

SEQ ID NO: 4034 - protein, 209 aa, Zea mays subsp. mays
  peptide (1)..(209): Ceres Seq. ID no. 12410000
MKAKIYRLFGRERPVHSVLGGGKPADLILWRNRKISGGVLAGATAIWLLFEVMEYHLLTLVCHCLILSLAILFLWSNASTFINKSPPNIPEVKIPEDVAVNVALSLRYEINRGFATLREIGHGRDLKKFLIVIAGLWLLSVLGSCCNFLTLFYIVFVALYTVPVLYEKYEDKVDAFGEKAMTELKKYYAIFDEKCLSKIPKGPLKDKKH

SEQ ID NO: 4035 - DNA, 1811 bp, Zea mays subsp. mays
  misc_feature (1)..(1811): Ceres Seq. ID no. 12423991
  misc_feature (1)..(1811): Ortholog of  Ceres SEQ ID NO 15227226 as cited in SEQ ID NO 54691
  misc_feature (1)..(1811): Ortholog of  Ceres SEQ ID NO 14303169 as cited in SEQ ID NO 65741
gcacgagaccattacctagaacatcctaatcgaaaaaatgacacgcgggcaccatatgccacctgccgtccctcgcccccaccggcaccgacccccgccttcttcaaaaactttattcgccgaaaccccttgccacctcgccgccaccgcccaacaaacaggcgcgacgacctctactctagcctcgtcgccaccgccgtcaccggtcaccgccgccatataagtaaacgctcgcctcgtcctcctcccagactcgccaccctccgcctccgacacatggcccagccgcacctcgtgctcccctcgccgaggcccctcctccccgccgccgccactccatcgcgccgcgccgtcgccgtccgcgcggcgctctccaccgcttcgccgcccgccaaggccgcggcgggagcggaggcggtgcggtcgatccgcgcgcgccagatcgtggacagccgcgggaaccccaccgtcgaggtcgacctcgtcgccggggacggacgcctccaccgctccgcggtgcccagcggggcgtccacggggatctacgaggcgctcgagctccgcgatggtgacaaggccgtgtacggcggcaagggcgttctccaagctgtgcgcaacatcaacgaggttatcgcgcctaagctcgtgggcgtcgatgtgaggaaccaaagtgatgttgatgcaatcatgctagacattgatggaactcagaacaaatccaagttgggtgccaatgctattctcggagtctccttgagtgtgtgtagggcaggcgctggcgcaaagggggttcctctgtataaacatattcaggagcttgcaggaattaaggagcctgtcatgcctgttcctgctttcaatgtaataaatggaggtagccatgctggcaacaatttggccatgcaggagttcatgcttttacctgttggagcagctacatttgctgaagctcttcgtatgggcagcgaagtttaccatgtcctgaagggcatcattaaggcaaaatatggtcaagatgcatgcaatgtcggagatgaaggaggttttgctcctaatgttcaagacaacagagagggtcttgtcttgcttatggatgccattgagaaggcaggctacactggaatgatcaaaattggaatggatgttgcggcatcagagttccttacaaaggatgggaactatgatctaaactttaagaatcagcctaatgatggagtccatgttctttcagcccagcatctgggtgatctgtacagagattttgtcaaggatttccctattgtatcaattgaggacccttttgatcaggatgactggagttcatgggcatcattgcagtcctcagttggtatccaaattgtgggtgatgatttacttgtcacaaacccaaaacgaattgcagacgctattgacaggaaggcttgcaatgctcttttactaaaggtcaaccagattggtactgtcactgaatcaattcaagctgccctggattcaaaagctgctggttggggtgtgatggtcagccacagaagtggtgaaaccgaagacaacttcatcgcagatttggctgttggcttagcaagtgggcagattaaaactggggctccatgccgcagcgagaggctggccaaatacaatcagcttctgcggattgaagaggggcttggcaacgtgcgctatgcaggggaggcattcaggtctccataagaaatagactttaaatcaccgcgcgtgtgtgagaaagtgccagctttatatggacaagactattcagagaggataatgaatgagagctaataatttttttacac

SEQ ID NO: 4036 - protein, 568 aa, Zea mays subsp. mays
  peptide (1)..(568): Ceres Seq. ID no. 12423992
ARDHYLEHPNRKNDTRAPYATCRPSPPPAPTPAFFKNFIRRNPLPPRRHRPTNRRDDLYSSLVATAVTGHRRHISKRSPRPPPRLATLRLRHMAQPHLVLPSPRPLLPAAATPSRRAVAVRAALSTASPPAKAAAGAEAVRSIRARQIVDSRGNPTVEVDLVAGDGRLHRSAVPSGASTGIYEALELRDGDKAVYGGKGVLQAVRNINEVIAPKLVGVDVRNQSDVDAIMLDIDGTQNKSKLGANAILGVSLSVCRAGAGAKGVPLYKHIQELAGIKEPVMPVPAFNVINGGSHAGNNLAMQEFMLLPVGAATFAEALRMGSEVYHVLKGIIKAKYGQDACNVGDEGGFAPNVQDNREGLVLLMDAIEKAGYTGMIKIGMDVAASEFLTKDGNYDLNFKNQPNDGVHVLSAQHLGDLYRDFVKDFPIVSIEDPFDQDDWSSWASLQSSVGIQIVGDDLLVTNPKRIADAIDRKACNALLLKVNQIGTVTESIQAALDSKAAGWGVMVSHRSGETEDNFIADLAVGLASGQIKTGAPCRSERLAKYNQLLRIEEGLGNVRYAGEAFRSP

SEQ ID NO: 4037 - protein, 476 aa, Zea mays subsp. mays
  peptide (1)..(476): Ceres Seq. ID no. 12423993
MAQPHLVLPSPRPLLPAAATPSRRAVAVRAALSTASPPAKAAAGAEAVRSIRARQIVDSRGNPTVEVDLVAGDGRLHRSAVPSGASTGIYEALELRDGDKAVYGGKGVLQAVRNINEVIAPKLVGVDVRNQSDVDAIMLDIDGTQNKSKLGANAILGVSLSVCRAGAGAKGVPLYKHIQELAGIKEPVMPVPAFNVINGGSHAGNNLAMQEFMLLPVGAATFAEALRMGSEVYHVLKGIIKAKYGQDACNVGDEGGFAPNVQDNREGLVLLMDAIEKAGYTGMIKIGMDVAASEFLTKDGNYDLNFKNQPNDGVHVLSAQHLGDLYRDFVKDFPIVSIEDPFDQDDWSSWASLQSSVGIQIVGDDLLVTNPKRIADAIDRKACNALLLKVNQIGTVTESIQAALDSKAAGWGVMVSHRSGETEDNFIADLAVGLASGQIKTGAPCRSERLAKYNQLLRIEEGLGNVRYAGEAFRSP

SEQ ID NO: 4038 - protein, 339 aa, Zea mays subsp. mays
  peptide (1)..(339): Ceres Seq. ID no. 12423994
MLDIDGTQNKSKLGANAILGVSLSVCRAGAGAKGVPLYKHIQELAGIKEPVMPVPAFNVINGGSHAGNNLAMQEFMLLPVGAATFAEALRMGSEVYHVLKGIIKAKYGQDACNVGDEGGFAPNVQDNREGLVLLMDAIEKAGYTGMIKIGMDVAASEFLTKDGNYDLNFKNQPNDGVHVLSAQHLGDLYRDFVKDFPIVSIEDPFDQDDWSSWASLQSSVGIQIVGDDLLVTNPKRIADAIDRKACNALLLKVNQIGTVTESIQAALDSKAAGWGVMVSHRSGETEDNFIADLAVGLASGQIKTGAPCRSERLAKYNQLLRIEEGLGNVRYAGEAFRSP

SEQ ID NO: 4039 - DNA, 1191 bp, Zea mays subsp. mays
  misc_feature (1)..(1191): Ceres Seq. ID no. 12409992
  misc_feature (1)..(1191): Ortholog of  Ceres SEQ ID NO 13638097 as cited in SEQ ID NO 57043
  misc_feature (1)..(1191): Ortholog of  Ceres SEQ ID NO 13596416 as cited in SEQ ID NO 62177
  misc_feature (1)..(1191): Ortholog of  Ceres SEQ ID NO 13659338 as cited in SEQ ID NO 66875
attcattttttttcttttttggtattttccggacagtggagtggagggcgatagatagggcagcatggcggcaaccttctgcgctggacccgccgcatccgcgggcagtaaaccctagctccgccggctgccgaccccagaacctaactcgggctgccgtgctgtctgcttgctggcggcccagcaggccgactcccgctttcgtctccctccggcgccccaatgccgagctgcggccgctgcgcgtggccgccggctccggcgttgacccgaaggttgtcaacggggaagattttcctcccatgaaggacctaattcagctatacaggacagcttttctagaaggaaatgaggaggttcttggtgtagttgagaaggcaatcactgctgtggaaaaagagaagagtacgatagcttcccaatttgaaagtattacaaccgaaataacttctgggaaggaaaagtttattcgcttaaatgccgacctggagaatttccggaaacagactgaaaaggaccgtgcaaagttaacatcaaatatacgggtggaagttgttcagagtctgttacctctagttgatagttttgagaaaacgaatctagagaacaccccagagactgagaaggagcaaaagatcagcgcaagctatcaaggcatatacaagcagttagttgaaacactaagatatttgggtgtgggagttgtggaaacagttggcaagccatttgatccttcggtccatgaggccatctcacgagaagcatccatgcaattcaaggcagggattgtcatgcatgaagtccgcagagggttccatttgaaggagaggctgctaaggcctgctactgtgaaggtctctactggctctggcaaacaaagtgcaagctcataggcgggggacaaagatgctgctttgtgaatctgatcaaacgaccaacaggaactgataggcacacatttttctgttcataacatgccgaatgtgtttgatctcaaatgagacgggatcagctatgtatggtgttgacagggagcaccagcttgaagttttgctgttgcttgtaatctgctagaattttgtccaccagaagagagagaatgaaacattggacattcataccggatttatattgagttccttgctcacttcattggacatccataccggatttatattgacttccttgccc

SEQ ID NO: 4040 - protein, 296 aa, Zea mays subsp. mays
  peptide (1)..(296): Ceres Seq. ID no. 12409993
SFFFFFGIFRTVEWRAIDRAAWRQPSALDPPHPRAVNPSSAGCRPQNLTRAAVLSACWRPSRPTPAFVSLRRPNAELRPLRVAAGSGVDPKVVNGEDFPPMKDLIQLYRTAFLEGNEEVLGVVEKAITAVEKEKSTIASQFESITTEITSGKEKFIRLNADLENFRKQTEKDRAKLTSNIRVEVVQSLLPLVDSFEKTNLENTPETEKEQKISASYQGIYKQLVETLRYLGVGVVETVGKPFDPSVHEAISREASMQFKAGIVMHEVRRGFHLKERLLRPATVKVSTGSGKQSASS

SEQ ID NO: 4041 - protein, 196 aa, Zea mays subsp. mays
  peptide (1)..(196): Ceres Seq. ID no. 12409994
MKDLIQLYRTAFLEGNEEVLGVVEKAITAVEKEKSTIASQFESITTEITSGKEKFIRLNADLENFRKQTEKDRAKLTSNIRVEVVQSLLPLVDSFEKTNLENTPETEKEQKISASYQGIYKQLVETLRYLGVGVVETVGKPFDPSVHEAISREASMQFKAGIVMHEVRRGFHLKERLLRPATVKVSTGSGKQSASS

SEQ ID NO: 4042 - DNA, 1864 bp, Zea mays subsp. mays
  misc_feature (1)..(1864): Ceres Seq. ID no. 12405693
  misc_feature (1)..(1864): Ortholog of  Ceres SEQ ID NO 13502874 as cited in SEQ ID NO 66298
  misc_feature (1)..(1864): Ortholog of  Ceres SEQ ID NO 12614124 as cited in SEQ ID NO 68392
aaccacgcctcgaaatataaccccccgccacaccgtacgagacgagggcagatatggaagctgatgctgctgctgccagtggcggcctggccctgctgcccgccgtgctgctcctcgtggcgctctccaccctcgtcttctccacatggagcaaccgcaacagcaggctgcccccgaggcccgatggccctcccgctgatcggacacctgcacctcatccgcccgccgccgcacagggccttcgaccgcatcctggcacgctacgggccgctcgtctacctccgcctcgggccctccacgcactgcgtcgtcgcgggcaccgcggacgcgcgcgggacctcctcaagcacgaggccagcatcccggagcggccgctcacggccgtcacgcgccacctcgcctacgacgacgccggcttcgccttcgcgccctacggcccgcactggcgcttcatgaagcgcctctgcatgtcggagctgctgggcccgcggaccgtggaccagctgcgccccgtgcgggaggccgagctggcggccgtgctggaggcggcgcgccaggcggccgccgctcgggagcccatcgacgtcagccgccacctcatcagcatgtccaacaacgccatcatgcgcatggtggccagcgcgctgccgggccacatgacggaggcggccagggactgcgccaagcacgtcgccgagctcgtgggggccttcaacgtcgaggactacgtcggcctctgccgcggctgggacctgcaggggctcacgcggaggacgcgcgaggtgcgtgacaagttcgacgcgctgctggagatcatgatcacgggcaaggaggagagtcgccgtcgtcgccacgccaccaccgacaccggcggcggcaccaaggacctgctggacatcctcatggacgcggcggaggacgccaacgccgaggtcaggctcaccagggagaacatcaaggcgttcgtcctcgacatcttcacggccggctccgacaccaccgccaccagcgtggagtggatgctggcgctgctcatcaaccacccggcctgcatggacaagctgcgcgcggagctggacgccgtggtgggcgcgtcgcgcctggtcggggagcaggacgtcccgcgccttccctacctgcaggccgtcttcaaggagacgctgcggctgcagccccccgcggtgttcgctcagcgggagaccatcgagccggtccacgtccgcggctacgtcatcccgcccaagacctccgtcttcttcaacatcttctccatcggccgcgacccggggctgctgggaggacccgctccagttccggcccgagcgcttcatgcccggcggcgccggcgccggccgtggaccccaaggggcagcacatgcagctcatgccgtttggaagcggccgccgcgcctgccccggcatgggcctagccatgcaggccgtgccggccttcctcgccgcgctggtgcagtgcttccactgggaggtgcccatcccgccgggccaatccactgcgccgcccttgtacatggaggaggcagcggggctcgtcaccgcccggaagaaccatctcctcctcatccccacaccgcgcctcaatccgctaccggcaagagcggctacgtagttagtacctgcgaatccagtctcagttcatcggtccatccaaattcagacgtgtcctccattattgcaagccgcgcactaagatcatatttctgtttgtttatatttctcggtcacacatacgtttgcaatcaccttcaggaaaagtgacctttgtacccgttcgatgttggtacatccagatccgtgtgctcaggaattacgtattactactatatatatactggtccgtttgagt

SEQ ID NO: 4043 - protein, 458 aa, Zea mays subsp. mays
  peptide (1)..(458): Ceres Seq. ID no. 12405694
MEADAAAASGGLALLPAVLLLVALSTLVFSTWSNRNSRLPPRPDGPPADRTPAPHPPAAAQGLRPHPGTLRAARLPPPRALHALRRRGHRGRARDLLKHEASIPERPLTAVTRHLAYDDAGFAFAPYGPHWRFMKRLCMSELLGPRTVDQLRPVREAELAAVLEAARQAAAAREPIDVSRHLISMSNNAIMRMVASALPGHMTEAARDCAKHVAELVGAFNVEDYVGLCRGWDLQGLTRRTREVRDKFDALLEIMITGKEESRRRRHATTDTGGGTKDLLDILMDAAEDANAEVRLTRENIKAFVLDIFTAGSDTTATSVEWMLALLINHPACMDKLRAELDAVVGASRLVGEQDVPRLPYLQAVFKETLRLQPPAVFAQRETIEPVHVRGYVIPPKTSVFFNIFSIGRDPGLLGGPAPVPARALHARRRRRRPWTPRGSTCSSCRLEAAAAPAPAWA

SEQ ID NO: 4044 - protein, 325 aa, Zea mays subsp. mays
  peptide (1)..(325): Ceres Seq. ID no. 12405695
MKRLCMSELLGPRTVDQLRPVREAELAAVLEAARQAAAAREPIDVSRHLISMSNNAIMRMVASALPGHMTEAARDCAKHVAELVGAFNVEDYVGLCRGWDLQGLTRRTREVRDKFDALLEIMITGKEESRRRRHATTDTGGGTKDLLDILMDAAEDANAEVRLTRENIKAFVLDIFTAGSDTTATSVEWMLALLINHPACMDKLRAELDAVVGASRLVGEQDVPRLPYLQAVFKETLRLQPPAVFAQRETIEPVHVRGYVIPPKTSVFFNIFSIGRDPGLLGGPAPVPARALHARRRRRRPWTPRGSTCSSCRLEAAAAPAPAWA

SEQ ID NO: 4045 - protein, 320 aa, Zea mays subsp. mays
  peptide (1)..(320): Ceres Seq. ID no. 12405696
MSELLGPRTVDQLRPVREAELAAVLEAARQAAAAREPIDVSRHLISMSNNAIMRMVASALPGHMTEAARDCAKHVAELVGAFNVEDYVGLCRGWDLQGLTRRTREVRDKFDALLEIMITGKEESRRRRHATTDTGGGTKDLLDILMDAAEDANAEVRLTRENIKAFVLDIFTAGSDTTATSVEWMLALLINHPACMDKLRAELDAVVGASRLVGEQDVPRLPYLQAVFKETLRLQPPAVFAQRETIEPVHVRGYVIPPKTSVFFNIFSIGRDPGLLGGPAPVPARALHARRRRRRPWTPRGSTCSSCRLEAAAAPAPAWA

SEQ ID NO: 4046 - DNA, 1723 bp, Zea mays subsp. mays
  misc_feature (1)..(1723): Ceres Seq. ID no. 12376740
  misc_feature (1)..(1723): Ortholog of  Ceres SEQ ID NO 14310864 as cited in SEQ ID NO 53602
  misc_feature (1)..(1723): Ortholog of  Ceres SEQ ID NO 12597180 as cited in SEQ ID NO 59415
gcacgagaccattacctagaacatcctaatcgaaaaatcgtctgcaactgcatcgctcgctctctcctttcactgggaacatctatcagctcgcgctcattggccatctttggcttccatggagaggctcattgccggcctacttggcttcctattggttgcatcggtaggaagccatgcagctcgtgctccggatcagtactggaagtctgctcttcccaacactcccatgccgacctccctctcccaactcctcgacgccgctccagccggcggcggcacgaccgtcaacgtcggctggggcggtgtttcacgtcgatgctgggcacggtaagcccgggggtacgacggttgacgtaggcaagggcggcgtcggcgtcaacgttaaccctggcaggagcggcaagcccggcggcacgacggttggcgtcgggaagggcggagtcggcgttaacgtcaacccgggatacggaaagcccggcggcaccaccgttggcgtcggaaagggtggcgttggcgttaacgtcaaccccggcaagcccggtggcacaacggtcggcgtcggcaagggcggagtgggcgtcaacgtcaatcccggcaaaccggccggtggtgccggtacaaccgttggcgttggcaaaggcggcgtgggcgtgggcgtcaatcccgggcacggcaagccgggcggcaccacggtcggcgttggcaagggcggggttggcgttcacgtgaacccgggaaagaagcccgtccacgtcaacgtctcccctttcatctacacgtacgccgcgtcggagacgcagctgcacgacgaccccagcgtggcgctcttcttccaggagacggacctccggcccggtaagaagatgaccgtccagttcgccagcaccgggacgaccggcaccaagttcctcccgcggagcgaggccgaggccatcccgttctcctcacagaaggtgcccgagatcctcgcccgcctctcggtggacccggactccgtcgaggcggcggagatggcgcagacgctgcgcgactgcgaggcgcccgcggccaagggcgagaagaaggcgtgcgccacgtcgctggagtccatggtggacttcgccaccgccagcctcgggaccaggcacgtgagggccgtgtcgaccgtcgtggcgaaggagggatcgccgaagcaggagtacacggtgaccggcgtggagcgcgctgccggcggcaccgacgacgacggccgggtcgtggcctgccacgcggagccgtacgcgtacgccgtgttcgcgtgccacctgacgccgcagacgcgggcgtactctgtgtcgatgctcggcagggacggcacggccgtggacgctgtcgcggtgtgccacgccgacacgtccggctggaaccccaagcacgtcgccttccaggtgctcaacgtgaagcccggcaccgtgccggtctgccacttcctgccgcaggaccacgtcgtctggacccgcagcggctgagtctgctggatggccgccgtttgctcgcgtcgcgccgcctggagtgatttgttatgttccagtggcctctaggcatactgtcatattattattataccgaggtatcacgagtttgcttatgtttccagtacttgatgcttgtatggatatggtgtagccagctcagcaagtatcaacccacctgcttaattctgttgtatagttttaaataaacagacaacctctttatgggc

SEQ ID NO: 4047 - protein, 437 aa, Zea mays subsp. mays
  peptide (1)..(437): Ceres Seq. ID no. 12376741
MQLVLRISTGSLLFPTLPCRPPSPNSSTPLQPAAARPSTSAGAVFHVDAGHGKPGGTTVDVGKGGVGVNVNPGRSGKPGGTTVGVGKGGVGVNVNPGYGKPGGTTVGVGKGGVGVNVNPGKPGGTTVGVGKGGVGVNVNPGKPAGGAGTTVGVGKGGVGVGVNPGHGKPGGTTVGVGKGGVGVHVNPGKKPVHVNVSPFIYTYAASETQLHDDPSVALFFQETDLRPGKKMTVQFASTGTTGTKFLPRSEAEAIPFSSQKVPEILARLSVDPDSVEAAEMAQTLRDCEAPAAKGEKKACATSLESMVDFATASLGTRHVRAVSTVVAKEGSPKQEYTVTGVERAAGGTDDDGRVVACHAEPYAYAVFACHLTPQTRAYSVSMLGRDGTAVDAVAVCHADTSGWNPKHVAFQVLNVKPGTVPVCHFLPQDHVVWTRSG

SEQ ID NO: 4048 - DNA, 1384 bp, Zea mays subsp. mays
  misc_feature (1)..(1384): Ceres Seq. ID no. 15180114
  misc_feature (1)..(1384): Ortholog of  Ceres SEQ ID NO 15178310 as cited in SEQ ID NO 1089
  misc_feature (1)..(1384): Ortholog of  Ceres SEQ ID NO 13655640 as cited in SEQ ID NO 63844
  misc_feature (1)..(1384): Ortholog of  Ceres SEQ ID NO 14303173 as cited in SEQ ID NO 66550
caaagatgtctctgtaaacaaaccagataaccttgcttcagcatcaaacaacattcatcccaagcttgtgatcctccacatgaacatggccctctatgtatatgatgatataatgaggatgactgaaaatttgagcgaaaaatacattattggttatggagcctcaagtacagtctacagatgcgacctgaagaactgcaagccaattgcgattaaaaagctgtatgctcactaccctcagagcttgaaggaattcgagactgaacttgagactgttggaagcatcaaacaccggaatcttgtaagccttcaggggtactccctgtcaccatctgggaatctcctcttctatgattacatggaaaatggcagcctctgggacattttacatgcagcttcatcgaagaaaaagaaactcgattgggaggctcgtctcaagattgctctcggtgctgctcaaggcctggcttatcttcaccatgagtgcagtccacgaataatccacagggatgtgaaatcaaagaatatcctcctagacaaagactacgaggctcatcttgctgactttggtattgccaagagtttgtgtgtgtcgaagacgcacacatcaacgtacgtgatgggcaccattggctacattgaccctgagtatgcacggacatcccggatcaacgagaaatcggatgtgtacagctacggcattgtcttgctggagttgcttaccggcaaaaagcctgtcgacgacgagtgcaaccttcaccacttgatcctatccaaagccgcagagaacacggtcatggagacggtcgaccaggacatcaccgacacgtgcaaggacctcggcgaggtcaagaaggtgttccagctggcgctcctttgcagcaagaggcagccgtcggatcgaccgaccatgcacgaggtcgcgcgcgtcctggacagcctcgtctgcccagcaggcccgccgccgaagcaggcgcaggcacaggcacaggcacaggcgtcggataagccgtccaccacggcgccgagctatgtcagcgagtacgtcggcctacgaggcggcggcggcggcagcgccctctcctgcaccaactcgtcgagcgcgtccgacgccgagctcttcatgaagtttggcgaggtgatctcgcggagcacggaatagtccaatagatcgacgatcattttgtgttacagtttacaataggtgtctggccggcgccctgtgatgtgactcgctgtaaatatgccgctgccttctcgttgggactccactaggcactagtagctatttttctccgttatgcacgtctctctctctctttttttgctgggaaactcgaactgtaactaaaggaacggatttatgtgcaggctgtgtttactc

SEQ ID NO: 4049 - protein, 386 aa, Zea mays subsp. mays
  peptide (1)..(386): Ceres Seq. ID no. 15180115
KDVSVNKPDNLASASNNIHPKLVILHMNMALYVYDDIMRMTENLSEKYIIGYGASSTVYRCDLKNCKPIAIKKLYAHYPQSLKEFETELETVGSIKHRNLVSLQGYSLSPSGNLLFYDYMENGSLWDILHAASSKKKKLDWEARLKIALGAAQGLAYLHHECSPRIIHRDVKSKNILLDKDYEAHLADFGIAKSLCVSKTHTSTYVMGTIGYIDPEYARTSRINEKSDVYSYGIVLLELLTGKKPVDDECNLHHLILSKAAENTVMETVDQDITDTCKDLGEVKKVFQLALLCSKRQPSDRPTMHEVARVLDSLVCPAGPPPKQAQAQAQAQASDKPSTTAPSYVSEYVGLRGGGGGSALSCTNSSSASDAELFMKFGEVISRSTE

SEQ ID NO: 4050 - protein, 360 aa, Zea mays subsp. mays
  peptide (1)..(360): Ceres Seq. ID no. 15180116
MNMALYVYDDIMRMTENLSEKYIIGYGASSTVYRCDLKNCKPIAIKKLYAHYPQSLKEFETELETVGSIKHRNLVSLQGYSLSPSGNLLFYDYMENGSLWDILHAASSKKKKLDWEARLKIALGAAQGLAYLHHECSPRIIHRDVKSKNILLDKDYEAHLADFGIAKSLCVSKTHTSTYVMGTIGYIDPEYARTSRINEKSDVYSYGIVLLELLTGKKPVDDECNLHHLILSKAAENTVMETVDQDITDTCKDLGEVKKVFQLALLCSKRQPSDRPTMHEVARVLDSLVCPAGPPPKQAQAQAQAQASDKPSTTAPSYVSEYVGLRGGGGGSALSCTNSSSASDAELFMKFGEVISRSTE

SEQ ID NO: 4051 - protein, 358 aa, Zea mays subsp. mays
  peptide (1)..(358): Ceres Seq. ID no. 15180117
MALYVYDDIMRMTENLSEKYIIGYGASSTVYRCDLKNCKPIAIKKLYAHYPQSLKEFETELETVGSIKHRNLVSLQGYSLSPSGNLLFYDYMENGSLWDILHAASSKKKKLDWEARLKIALGAAQGLAYLHHECSPRIIHRDVKSKNILLDKDYEAHLADFGIAKSLCVSKTHTSTYVMGTIGYIDPEYARTSRINEKSDVYSYGIVLLELLTGKKPVDDECNLHHLILSKAAENTVMETVDQDITDTCKDLGEVKKVFQLALLCSKRQPSDRPTMHEVARVLDSLVCPAGPPPKQAQAQAQAQASDKPSTTAPSYVSEYVGLRGGGGGSALSCTNSSSASDAELFMKFGEVISRSTE

SEQ ID NO: 4052 - DNA, 1856 bp, Zea mays subsp. mays
  misc_feature (1)..(1856): Ceres Seq. ID no. 13635560
  misc_feature (1)..(1856): Ortholog of  Ceres SEQ ID NO 14314404 as cited in SEQ ID NO 57421
  misc_feature (1)..(1856): Ortholog of  Ceres SEQ ID NO 13493536 as cited in SEQ ID NO 58515
  misc_feature (1)..(1856): Ortholog of  Ceres SEQ ID NO 15225741 as cited in SEQ ID NO 59606
  misc_feature (1)..(1856): Ortholog of  Ceres SEQ ID NO 12618461 as cited in SEQ ID NO 64349
gatgatgggagggcgcgctctgctgctgctcctggtctcggcgctgctcgttcagatccgcgcctctgacccgctgctgtacgagccgtttgatgaggacttcgagggtagatggatcgtctccaagaaggatgaataccaaggtgtatggaagcatgccaagagtgatgggcatgaggactatggcctccttgttagtgacaaggcaaggaaatacgccataatcaaggagcttgatgagccagttaccttaaatgatgggacagtggtcctgcagtttgaagtgagacttcagaatggccttgaatgtggaggtgcctacattaagtacatccgccctcaggatgctggatgggatgccaaggagtttgataatgagactccatacactattatgtttggtccagataaatgtgggtcaaccaacaaggttcatttcatccttaagcacaagaatcctaagactggaaagtatgttgagcatcacctcaaattcccaccttctgtcccatacgacaagctctctcatgtctacacagctatcttgaagccagacaatgaggtcagaattttgatcgatggggaagaaaagaagaaggcaaacttcctttctgctgatgactttgagccagcacttatcccatccaagaccattcctgaccctgatgacaagaagccggaggactgggatgagagagctaaaatccctgatccagatgcagtgaagcctgatgattgggatgaggatgcccccatggaaattgtggatgaggaagccaccaagcctgagggatggttggatgatgaacccgaggagattgatgatcctgaggcagccaagcccgaggactgggacgatgaagaggatggtgaatgggaggcaccaaagattgacaaccccaagtgtgaagaggcacctggatgtggcgagtggaagaggccgatgaagcagaatcctgcttacaaaggcaagtggcatgcacctatgattgacaaccccaactacaagggaatctggaagcctcaggagatacccaaccctgagtactttgagcttgacaggcctgattttgatccaattgctgctattgggattgagatctggacaatgcaggatggcatcctgttcgacaatatcttgattgctgatgatgagaaagttgccacctccattctggagaagacatggaagcccaagtatgatgttgagaaggaaaaggagaaggctgaggaggctgctgctggtgcagatggtctttctgacttccagaagaagatttttgacgtcctgtacaagattgctgatattccgttcttggcaccctacaagaccaagattattgatgttatcgagaagggagagaagcagcccaacatcactattggcattttggtctccgttgtcatcgtgttcgttaccgttctcttcaagatcctttttggtggcaagaaaccagtggcacctgtgaaacctgcagctgagggcgnaagtaagcccaaggccgcggagacggacggtgctggaagcagtggtgacaaggatgagaaagaggatgaaaaggacgagacaggcccacgtcggaggacccgaagaggagacatagacctgtttttgacgtgttttagctcttctggcgtctgcttattttgagaactcttaatatttgtgagtgtataataggagcttatgtcacctctgcggcttcccccgctgctgatttgtttttaatggttagaccaggacccttcacgagcgtagaatttagttcttgttggtcatttatgtgctgtgcctgacggtgttcaatcagatagaggtgatggtttttttggtagatcaaatcaaggaatatttc

SEQ ID NO: 4053 - protein, 549 aa, Zea mays subsp. mays
  peptide (1)..(549): Ceres Seq. ID no. 13635561
  misc_feature (496)..(496): Xaa is any aa, unknown or other
MMGGRALLLLLVSALLVQIRASDPLLYEPFDEDFEGRWIVSKKDEYQGVWKHAKSDGHEDYGLLVSDKARKYAIIKELDEPVTLNDGTVVLQFEVRLQNGLECGGAYIKYIRPQDAGWDAKEFDNETPYTIMFGPDKCGSTNKVHFILKHKNPKTGKYVEHHLKFPPSVPYDKLSHVYTAILKPDNEVRILIDGEEKKKANFLSADDFEPALIPSKTIPDPDDKKPEDWDERAKIPDPDAVKPDDWDEDAPMEIVDEEATKPEGWLDDEPEEIDDPEAAKPEDWDDEEDGEWEAPKIDNPKCEEAPGCGEWKRPMKQNPAYKGKWHAPMIDNPNYKGIWKPQEIPNPEYFELDRPDFDPIAAIGIEIWTMQDGILFDNILIADDEKVATSILEKTWKPKYDVEKEKEKAEEAAAGADGLSDFQKKIFDVLYKIADIPFLAPYKTKIIDVIEKGEKQPNITIGILVSVVIVFVTVLFKILFGGKKPVAPVKPAAEGXSKPKAAETDGAGSSGDKDEKEDEKDETGPRRRTRRGDIDLFLTCFSSSGVCLF

SEQ ID NO: 4054 - protein, 548 aa, Zea mays subsp. mays
  peptide (1)..(548): Ceres Seq. ID no. 13635562
  misc_feature (495)..(495): Xaa is any aa, unknown or other
MGGRALLLLLVSALLVQIRASDPLLYEPFDEDFEGRWIVSKKDEYQGVWKHAKSDGHEDYGLLVSDKARKYAIIKELDEPVTLNDGTVVLQFEVRLQNGLECGGAYIKYIRPQDAGWDAKEFDNETPYTIMFGPDKCGSTNKVHFILKHKNPKTGKYVEHHLKFPPSVPYDKLSHVYTAILKPDNEVRILIDGEEKKKANFLSADDFEPALIPSKTIPDPDDKKPEDWDERAKIPDPDAVKPDDWDEDAPMEIVDEEATKPEGWLDDEPEEIDDPEAAKPEDWDDEEDGEWEAPKIDNPKCEEAPGCGEWKRPMKQNPAYKGKWHAPMIDNPNYKGIWKPQEIPNPEYFELDRPDFDPIAAIGIEIWTMQDGILFDNILIADDEKVATSILEKTWKPKYDVEKEKEKAEEAAAGADGLSDFQKKIFDVLYKIADIPFLAPYKTKIIDVIEKGEKQPNITIGILVSVVIVFVTVLFKILFGGKKPVAPVKPAAEGXSKPKAAETDGAGSSGDKDEKEDEKDETGPRRRTRRGDIDLFLTCFSSSGVCLF

SEQ ID NO: 4055 - protein, 418 aa, Zea mays subsp. mays
  peptide (1)..(418): Ceres Seq. ID no. 13635563
  misc_feature (365)..(365): Xaa is any aa, unknown or other
MFGPDKCGSTNKVHFILKHKNPKTGKYVEHHLKFPPSVPYDKLSHVYTAILKPDNEVRILIDGEEKKKANFLSADDFEPALIPSKTIPDPDDKKPEDWDERAKIPDPDAVKPDDWDEDAPMEIVDEEATKPEGWLDDEPEEIDDPEAAKPEDWDDEEDGEWEAPKIDNPKCEEAPGCGEWKRPMKQNPAYKGKWHAPMIDNPNYKGIWKPQEIPNPEYFELDRPDFDPIAAIGIEIWTMQDGILFDNILIADDEKVATSILEKTWKPKYDVEKEKEKAEEAAAGADGLSDFQKKIFDVLYKIADIPFLAPYKTKIIDVIEKGEKQPNITIGILVSVVIVFVTVLFKILFGGKKPVAPVKPAAEGXSKPKAAETDGAGSSGDKDEKEDEKDETGPRRRTRRGDIDLFLTCFSSSGVCLF

SEQ ID NO: 4056 - DNA, 1845 bp, Zea mays subsp. mays
  misc_feature (1)..(1845): Ceres Seq. ID no. 13492086
  misc_feature (1)..(1845): Ortholog of  Ceres SEQ ID NO 13648081 as cited in SEQ ID NO 165
  misc_feature (1)..(1845): Ortholog of  Ceres SEQ ID NO 15224803 as cited in SEQ ID NO 56572
  misc_feature (1)..(1845): Ortholog of  Ceres SEQ ID NO 14308598 as cited in SEQ ID NO 60416
  misc_feature (1)..(1845): Ortholog of  Ceres SEQ ID NO 13502952 as cited in SEQ ID NO 62271
  misc_feature (1)..(1845): Ortholog of  Ceres SEQ ID NO 13502973 as cited in SEQ ID NO 68052
  misc_feature (1)..(1845): Ortholog of  Ceres SEQ ID NO 13596000 as cited in SEQ ID NO 68188
  misc_feature (1)..(1845): Ortholog of  Ceres SEQ ID NO 15179420 as cited in SEQ ID NO 0
atctgctctgctccggtccgttccgctccttcctccccctatctagctagccttcccgttcctgcatcgcggcggagatgggcgcctccaccacgccgctcgcgtcggcggcggcgctgcttctgctgctgctcgcgccgctcgccgcggcggcggacagcatgtcgatcgtctcctacggcgagcggagcgaggaggaggcgcggcggatgtacgccgagtggatggcggcgcacggccggacctacaacgccgtcggcgaggaggagcgcaggttcgaggtgttcagggacaacctccgctacgtcgacgcccacaacgccgccgccgacgcgggcgtccactccttccgcctcgggctcaaccgcttcgccgacctcaccaacgacgagtaccgcgccacctacctcggcgtcaggagcaggccgcagagggagaggaggctcggtgacaggtacctggccggcgacaacgaggacctgccggagtccgtcgactggcgggccaagggcgccgtcgcggagatcaaggaccagggcagctgcgggagttgctgggctttctcaacaatagcggctgtggaaggcatcaaccagattgttactggcgacatgatctccttgtctgagcaggagcttgttgactgtgacacttcatacaaccaggggtgcaatggaggtctgatggactatgcgtttgagttcatcatcaacaatggcggaatcgacaccgaggaggattacccttacaagggcacggacggacggtgtgatgtcaacaggaaaaacgccaaggttgttactatcgacagctatgaagatgtaccagcgaacagtgagaaaagtctgcagaaggcagttgcgaaccagcccatcagtgttgcaattgaggctggtggcagagcatttcagctctacaactcgggtatcttcacaggaacctgtggaacagcgttggaccatggtgtcacggccgtcggctacggcacagagaacggcaaggactactggatcgtgaagaactcttggggcagcagctggggcgagtccggctacgtcaggatggagcgcaacatcaaggcgtccagcggcaagtgtggtatcgccgttgagccgtcgtaccctctgaagaagggcgccaaccccccgaaccctgggccgaccccgccttcccccaccccgccgcccaccgtctgcgacaactactactcgtgccccgacagcaccacctgctgctgcatctacgagtacggcaagtactgcttcgcctggggctgctgcccgctcgagggcgccacctgctgcgacgaccactacagctgctgcccccatgactaccccgtctgcaacgtcaagcagggaacctgcctcatgggcaaggacagcccactgtcactgtcagtgaaggctacgaagcgcaccctggccaagccgcactgggctttctctggcaacacagctgctgatggcatgaagagcagcgcatgagaaaaacgcagcatggcattaggccgtcaacagccagcatgattagagcccccctgcatgcagaatgatcacccggtcccgtagttcacgacgaaagcatggctgggcggccgctgtttacggatttacttatatcactatagtaggtactcctcctgtacataagcctgaaaaaaaaatgggttcagttgtttatggaactctgccaaatttgcttttgcatgccatgtaaaaatccagctagctcttgccaagcttcacctgcgcagttcaacaggactgcgattgatattcggtgtaatggaagtatttatcggaacaatcagcaatgttatgctatattcatttcttggacgtg

SEQ ID NO: 4057 - protein, 469 aa, Zea mays subsp. mays
  peptide (1)..(469): Ceres Seq. ID no. 13492087
MGASTTPLASAAALLLLLLAPLAAAADSMSIVSYGERSEEEARRMYAEWMAAHGRTYNAVGEEERRFEVFRDNLRYVDAHNAAADAGVHSFRLGLNRFADLTNDEYRATYLGVRSRPQRERRLGDRYLAGDNEDLPESVDWRAKGAVAEIKDQGSCGSCWAFSTIAAVEGINQIVTGDMISLSEQELVDCDTSYNQGCNGGLMDYAFEFIINNGGIDTEEDYPYKGTDGRCDVNRKNAKVVTIDSYEDVPANSEKSLQKAVANQPISVAIEAGGRAFQLYNSGIFTGTCGTALDHGVTAVGYGTENGKDYWIVKNSWGSSWGESGYVRMERNIKASSGKCGIAVEPSYPLKKGANPPNPGPTPPSPTPPPTVCDNYYSCPDSTTCCCIYEYGKYCFAWGCCPLEGATCCDDHYSCCPHDYPVCNVKQGTCLMGKDSPLSLSVKATKRTLAKPHWAFSGNTAADGMKSSA

SEQ ID NO: 4058 - protein, 441 aa, Zea mays subsp. mays
  peptide (1)..(441): Ceres Seq. ID no. 13492088
MSIVSYGERSEEEARRMYAEWMAAHGRTYNAVGEEERRFEVFRDNLRYVDAHNAAADAGVHSFRLGLNRFADLTNDEYRATYLGVRSRPQRERRLGDRYLAGDNEDLPESVDWRAKGAVAEIKDQGSCGSCWAFSTIAAVEGINQIVTGDMISLSEQELVDCDTSYNQGCNGGLMDYAFEFIINNGGIDTEEDYPYKGTDGRCDVNRKNAKVVTIDSYEDVPANSEKSLQKAVANQPISVAIEAGGRAFQLYNSGIFTGTCGTALDHGVTAVGYGTENGKDYWIVKNSWGSSWGESGYVRMERNIKASSGKCGIAVEPSYPLKKGANPPNPGPTPPSPTPPPTVCDNYYSCPDSTTCCCIYEYGKYCFAWGCCPLEGATCCDDHYSCCPHDYPVCNVKQGTCLMGKDSPLSLSVKATKRTLAKPHWAFSGNTAADGMKSSA

SEQ ID NO: 4059 - protein, 425 aa, Zea mays subsp. mays
  peptide (1)..(425): Ceres Seq. ID no. 13492089
MYAEWMAAHGRTYNAVGEEERRFEVFRDNLRYVDAHNAAADAGVHSFRLGLNRFADLTNDEYRATYLGVRSRPQRERRLGDRYLAGDNEDLPESVDWRAKGAVAEIKDQGSCGSCWAFSTIAAVEGINQIVTGDMISLSEQELVDCDTSYNQGCNGGLMDYAFEFIINNGGIDTEEDYPYKGTDGRCDVNRKNAKVVTIDSYEDVPANSEKSLQKAVANQPISVAIEAGGRAFQLYNSGIFTGTCGTALDHGVTAVGYGTENGKDYWIVKNSWGSSWGESGYVRMERNIKASSGKCGIAVEPSYPLKKGANPPNPGPTPPSPTPPPTVCDNYYSCPDSTTCCCIYEYGKYCFAWGCCPLEGATCCDDHYSCCPHDYPVCNVKQGTCLMGKDSPLSLSVKATKRTLAKPHWAFSGNTAADGMKSSA

SEQ ID NO: 4060 - DNA, 1434 bp, Zea mays subsp. mays
  misc_feature (1)..(1434): Ceres Seq. ID no. 12345959
  misc_feature (1)..(1434): Ortholog of  Ceres SEQ ID NO 13590776 as cited in SEQ ID NO 64877
  misc_feature (1)..(1434): Ortholog of  Ceres SEQ ID NO 12780534 as cited in SEQ ID NO 65670
  misc_feature (1)..(1434): Ortholog of  Ceres SEQ ID NO 13598301 as cited in SEQ ID NO 68281
gacacacgaaattctcaggtcccggtcccgggtccaggcacccttctcgctcggttgctcgggagctttccccttcctgttcctgaagcttccgacatccgaccgcctcctcctcctcgttctactcgccgccccttctaggatcatccagaggcgtgccggtgaaacgcgagagcggtgaggcatggcgatgcagacgggggtcgcgacctccaaggtcctcatcctcgtcggtgcagggatgacgggctcgatcctgctgcggaatggccgcttatctgatgtgttgggagaactccaggagattatgaagggtgtaaatcaaggaactgcttcgggtccctatgacattgcacttattcaagctcagattcggaatttagcccaagaagtcagagatttgacattgtcaaagcccattaccatactgaatggcaaatctgactcgggaggcagtttatcatcctacatactgccagcagcagcagttggagcaatgggttattgctacatgtggtggaaggggttgtctctctcagatgtcatgtttgtcacaaaacacaacatggcaaatgctgttcagagcatgtcaaagcagttggagcaagtttcatcagcactagctgcaacaaaaagacatctaactcaacggcttgagaatttggatggcaaaatggatgaacaagtagaggtctccaaagctattagaaatgaggtcaatgatgttaaagatgacctgtctcaaattggatttgatgtcgaatcaattcagaaaatggttgctggattggagggaaagatcgagttacttgagaacaaacaggacgtggctaatactggtatctggtacctctgccaagtagcaggcggtttaaaagatggaataaacaccaggtttttccaggaaaccagtgagaagctgaagctctcacattcagctcaacctgaaaacaagccagtgaaggggcttgaatttttttcggaaagcgccatggaacagaaagtagctgactccaaaccaattgcggtgacagtcgacgctgagaagcctgagaaaaccgctgctgtaatgggcaccacagtgcacaggtctatcaggttctcatatcggaaggcaggccttgctttgtgatcaaatcctctccgcttgagatgcacgtggccttcctggttgcttttcttttttggcaacaaccttcctggttgctttgtctgatggtcagaaaacatggaagaataacctgcaactggagtgacagaatttcttttccccgcagtagacaggtgtgcgttatttggtctgatttgaaactatcttcagtccgctatcaatttttttccttggattttgattcattttatgtttcgacttgttgccttgtatactgtaaaggcattggaaagaatacataaaacacgaatgttttttttgcc

SEQ ID NO: 4061 - protein, 315 aa, Zea mays subsp. mays
  peptide (1)..(315): Ceres Seq. ID no. 12345960
MAMQTGVATSKVLILVGAGMTGSILLRNGRLSDVLGELQEIMKGVNQGTASGPYDIALIQAQIRNLAQEVRDLTLSKPITILNGKSDSGGSLSSYILPAAAVGAMGYCYMWWKGLSLSDVMFVTKHNMANAVQSMSKQLEQVSSALAATKRHLTQRLENLDGKMDEQVEVSKAIRNEVNDVKDDLSQIGFDVESIQKMVAGLEGKIELLENKQDVANTGIWYLCQVAGGLKDGINTRFFQETSEKLKLSHSAQPENKPVKGLEFFSESAMEQKVADSKPIAVTVDAEKPEKTAAVMGTTVHRSIRFSYRKAGLAL

SEQ ID NO: 4062 - protein, 313 aa, Zea mays subsp. mays
  peptide (1)..(313): Ceres Seq. ID no. 12345961
MQTGVATSKVLILVGAGMTGSILLRNGRLSDVLGELQEIMKGVNQGTASGPYDIALIQAQIRNLAQEVRDLTLSKPITILNGKSDSGGSLSSYILPAAAVGAMGYCYMWWKGLSLSDVMFVTKHNMANAVQSMSKQLEQVSSALAATKRHLTQRLENLDGKMDEQVEVSKAIRNEVNDVKDDLSQIGFDVESIQKMVAGLEGKIELLENKQDVANTGIWYLCQVAGGLKDGINTRFFQETSEKLKLSHSAQPENKPVKGLEFFSESAMEQKVADSKPIAVTVDAEKPEKTAAVMGTTVHRSIRFSYRKAGLAL

SEQ ID NO: 4063 - protein, 296 aa, Zea mays subsp. mays
  peptide (1)..(296): Ceres Seq. ID no. 12345962
MTGSILLRNGRLSDVLGELQEIMKGVNQGTASGPYDIALIQAQIRNLAQEVRDLTLSKPITILNGKSDSGGSLSSYILPAAAVGAMGYCYMWWKGLSLSDVMFVTKHNMANAVQSMSKQLEQVSSALAATKRHLTQRLENLDGKMDEQVEVSKAIRNEVNDVKDDLSQIGFDVESIQKMVAGLEGKIELLENKQDVANTGIWYLCQVAGGLKDGINTRFFQETSEKLKLSHSAQPENKPVKGLEFFSESAMEQKVADSKPIAVTVDAEKPEKTAAVMGTTVHRSIRFSYRKAGLAL

SEQ ID NO: 4064 - DNA, 1050 bp, Zea mays subsp. mays
  misc_feature (1)..(1050): Ceres Seq. ID no. 12361487
  misc_feature (1)..(1050): Ortholog of  Ceres SEQ ID NO 13661330 as cited in SEQ ID NO 61614
  misc_feature (1)..(1050): Ortholog of  Ceres SEQ ID NO 13596025 as cited in SEQ ID NO 62024
gcacgagaccattacctagaacatcctaatcgaaaaatccaaactcacagcacgctagctcttcagaacttgcggacgaaagactgaccgtgcaccgctagcagatcgatcgaccatggcgtcgtcctctcttctcctcctcgccgccgtcgccctcttcgccgcctccgcagacgcggccaccttcaacgtcatcaaccgctgcaagaacacgctgtggccggccgccctccccggcggcggcgcgcgcctggaccctggcaagacgtggaccgtgcaggtgccggcgggcacggcgcacgcgcgggtgtgggcgcgcacggggtgcagcttcgacggcagcggccgcgggacgtgccagacgggggactgcggcggcgcgctggcgtgcaccgtgtccgggagaacccccgcgacgctgggctgagtacacgctcaacaggaacggcccggactacatcgacatctccctcgtggatggcttcaacgtgcccatgtccttccagtgccgcggcaggggccccagctgcaaggccgacatcaacgcccagtgccccgccgcgctcaaggtgcccggcggctgcgccagcgcctgcgagaagctcggcggcgacacctactgctgccggggccagtacaaggacaagtgcccgcccacggactactccaggttcttcaagaggctgtgcccggacgcctacagctacgccaaggacgaccagaccagcaccttcacctgcccacagggctccaactacgatgtcgtgctctgcccgtgagccacatgttcgagagatcaacgaccatgcattcgcagctcgcaacaagtgcacactagtacaactatacacaagaaataagagtcgcgatatttattattatcgcgcgtggagtagttggtaaataaatcgcttattgcgagtattttggcccatgaataaggccttacttactggccatcatttccgacatatatacgtttgttcatgaataaagaaactttgcaaaacagcacaatatataatttagcacaatatataattttggagc

SEQ ID NO: 4065 - protein, 141 aa, Zea mays subsp. mays
  peptide (1)..(141): Ceres Seq. ID no. 12361488
MASTCPCPSSAAAGAPAARPTSTPSAPPRSRCPAAAPAPARSSAATPTAAGASTRTSARPRTTPGSSRGCARTPTATPRTTRPAPSPAHRAPTTMSCSAREPHVREINDHAFAARNKCTLVQLYTRNKSRDIYYYRAWSSW

SEQ ID NO: 4066 - protein, 103 aa, Zea mays subsp. mays
  peptide (1)..(103): Ceres Seq. ID no. 12361489
MASSSLLLLAAVALFAASADAATFNVINRCKNTLWPAALPGGGARLDPGKTWTVQVPAGTAHARVWARTGCSFDGSGRGTCQTGDCGGALACTVSGRTPATLG

SEQ ID NO: 4067 - protein, 94 aa, Zea mays subsp. mays
  peptide (1)..(94): Ceres Seq. ID no. 12361490
MSFQCRGRGPSCKADINAQCPAALKVPGGCASACEKLGGDTYCCRGQYKDKCPPTDYSRFFKRLCPDAYSYAKDDQTSTFTCPQGSNYDVVLCP

SEQ ID NO: 4068 - DNA, 900 bp, Zea mays subsp. mays
  misc_feature (1)..(900): Ceres Seq. ID no. 12565933
  misc_feature (1)..(900): Ortholog of  Ceres SEQ ID NO 15177004 as cited in SEQ ID NO 57554
  misc_feature (1)..(900): Ortholog of  Ceres SEQ ID NO 13662587 as cited in SEQ ID NO 63275
  misc_feature (1)..(900): Ortholog of  Ceres SEQ ID NO 13599500 as cited in SEQ ID NO 0
aaaggcaccaccaccagctagctctctgtctgctgctcctctcaaaagagtcgcagttcactttgttgtactagagcgctgagcagatctttccttgtttctccattccggtacgaaggggtggggtccaagtgaagggaagggaagggaagagaaggcctgctgcgagcgatgggcatcgtcgacgtcgtctccgagttctgctccttgccgaggactcgccggcatctcaagaagaggaagcagttccagacggtggagatgaaggtgcgcatcgactgcgaagggtgcgagcgcaaggtgaagaaggcgatggagggcatgaagggcgtgagctccgtggaggtggcggccaagcagaacaaggtgacggtcacgggctacgtggacgccgccaaggtcatgcgccgcgtcgcctacaagacgggcaagcgggtggagccctggccctacgtgccctacgagatggtgcagcacccctacgcgccgggcgcctacgacaagaaggcgcccgccggctacgtccgcaacgtcgtcgccgaccccaccgccgcgccgctcgccagggcctcctccaccgaggtccgctacaccgccgccttcagcgacgagaaccccaacgcctgctccgtcatgtagacgtagacccacccacacaccgaccgacccacttgttttctagctattagttactagtagtatagtaggtgcttgcttgggagagttgctcttggaggaggttttgctcttcctgaccctttttctttttctttttttcgttttccggtttcatgtagatgtagtgtgcgttttgatttttgtgaaaaaaaataaactagtttgtaacggtagaccacttgtgcaaactatgatcagaaaaaaaaatcagttcgtccttgc

SEQ ID NO: 4069 - protein, 155 aa, Zea mays subsp. mays
  peptide (1)..(155): Ceres Seq. ID no. 12565934
MGIVDVVSEFCSLPRTRRHLKKRKQFQTVEMKVRIDCEGCERKVKKAMEGMKGVSSVEVAAKQNKVTVTGYVDAAKVMRRVAYKTGKRVEPWPYVPYEMVQHPYAPGAYDKKAPAGYVRNVVADPTAAPLARASSTEVRYTAAFSDENPNACSVM

SEQ ID NO: 4070 - protein, 125 aa, Zea mays subsp. mays
  peptide (1)..(125): Ceres Seq. ID no. 12565935
MKVRIDCEGCERKVKKAMEGMKGVSSVEVAAKQNKVTVTGYVDAAKVMRRVAYKTGKRVEPWPYVPYEMVQHPYAPGAYDKKAPAGYVRNVVADPTAAPLARASSTEVRYTAAFSDENPNACSVM

SEQ ID NO: 4071 - protein, 108 aa, Zea mays subsp. mays
  peptide (1)..(108): Ceres Seq. ID no. 12565936
MEGMKGVSSVEVAAKQNKVTVTGYVDAAKVMRRVAYKTGKRVEPWPYVPYEMVQHPYAPGAYDKKAPAGYVRNVVADPTAAPLARASSTEVRYTAAFSDENPNACSVM

SEQ ID NO: 4072 - DNA, 661 bp, Zea mays subsp. mays
  misc_feature (1)..(661): Ceres Seq. ID no. 12358602
  misc_feature (1)..(661): Ortholog of  Ceres SEQ ID NO 15174240 as cited in SEQ ID NO 61866
  misc_feature (1)..(661): Ortholog of  Ceres SEQ ID NO 13596039 as cited in SEQ ID NO 62117
ctagactgcacccccatcccgcagcagccaaaacctacctagccgccgccgcaggcggccccccatcgccgccaagatgcagatctttgtgaagactctgacggggaagaccatcactttggaggtggagtcctcggacaccattgacaatgtgaaggccaagatccaggacaaggagggcatccccccggaccagcagcggctcatcttcgccggcaagcagctcgaggacggtcgcaccctcgccgactacaacattcagaaggagtccaccctccacctggtgctccgcctccgcggtggcgccaagaagcgtaagaagaagacgtacaccaagcccaagaagatcaagcacaagcacaagaaggtgaagctctccgtgctgcagttctataaggtggacgacgccactggcaaggtgacccgcctccgcaaggagtgccccaacacagagtgcggcgcgggcgtcttcatggccaaccacttcgaccgccactactgcggcaagtgcggcctcacctatgtctacaaccagaaggcgtaattgcttgccccgatttgctttatccgccaacctatcaagcattcagatgttggttactcaaattgtatctcatttagatctgtctgaggttgaaacttaaatggagcagtagtatct

SEQ ID NO: 4073 - protein, 155 aa, Zea mays subsp. mays
  peptide (1)..(155): Ceres Seq. ID no. 12358603
MQIFVKTLTGKTITLEVESSDTIDNVKAKIQDKEGIPPDQQRLIFAGKQLEDGRTLADYNIQKESTLHLVLRLRGGAKKRKKKTYTKPKKIKHKHKKVKLSVLQFYKVDDATGKVTRLRKECPNTECGAGVFMANHFDRHYCGKCGLTYVYNQKA

SEQ ID NO: 4074 - DNA, 984 bp, Zea mays subsp. mays
  misc_feature (1)..(984): Ceres Seq. ID no. 12347902
  misc_feature (1)..(984): Ortholog of  Ceres SEQ ID NO 13581800 as cited in SEQ ID NO 51508
aactcccgcaggccgcagcccagcaccggccgctctacgcctccacgccggcacgtcctcgtttctgtccgaggtcatcgcctccgcaacttcgtggccggtgaggtcgcaccaccatggcgtcgctcctagcccggcaggcagcgcaggcgctccgcgcgaggcaaacggcgcagctcgggccggccgcgtcggcgatgcaagggcacctccgtacctacatgaacgcggggattcccaagcggttcaaagaggatgaggagaaagaacagcttgcaaaagatgtcgcaaaagattggaatgctgttttgaaaggagcatcaatacattgtttttgactgaaatggtccgtggcttgatgctaactctcaagtacttctttgatagaaatgtcacaattaactatccgtttgagaagggtcctctgagcccccgcttccgtggtgagcatgctctcagacgttatgaatctggggangagcgctgcattgcttgtaaactatgcgaagctatatgcccagcgcaggcaattacaattgaggctgaagaacgtgaagatggcagtcgccgaaccacaagatatgatattgacatgaccaaatgcatttactgtgggttctgtcaagaggcttgcccagtcgatgctattgttgaggggcctaactttgagtttgccactgagacacacgaggaactactgtacgacaaggagaaattgcttgaaaatggtgatcgctgggagactgagattgctgagaacttgagatctgagagcctctatcgctgaatctgtcttccattatggttgataaactgggttcttccattttccatattttgctcaactagctgatgaataagcaaacgatgtatcataacttaggtacgatgtttttgtaccttggcaccatctgtgtgttttgttcattgccttgctaaaggtggcaccagatgttctttgatgggaaaattccttctgtagct

SEQ ID NO: 4075 - protein, 147 aa, Zea mays subsp. mays
  peptide (1)..(147): Ceres Seq. ID no. 12347903
  misc_feature (45)..(45): Xaa is any aa, unknown or other
MVRGLMLTLKYFFDRNVTINYPFEKGPLSPRFRGEHALRRYESGXERCIACKLCEAICPAQAITIEAEEREDGSRRTTRYDIDMTKCIYCGFCQEACPVDAIVEGPNFEFATETHEELLYDKEKLLENGDRWETEIAENLRSESLYR

SEQ ID NO: 4076 - protein, 142 aa, Zea mays subsp. mays
  peptide (1)..(142): Ceres Seq. ID no. 12347904
  misc_feature (40)..(40): Xaa is any aa, unknown or other
MLTLKYFFDRNVTINYPFEKGPLSPRFRGEHALRRYESGXERCIACKLCEAICPAQAITIEAEEREDGSRRTTRYDIDMTKCIYCGFCQEACPVDAIVEGPNFEFATETHEELLYDKEKLLENGDRWETEIAENLRSESLYR

SEQ ID NO: 4077 - protein, 85 aa, Zea mays subsp. mays
  peptide (1)..(85): Ceres Seq. ID no. 12347905
TPAGRSPAPAALRLHAGTSSFLSEVIASATSWPVRSHHHGVAPSPAGSAGAPREANGAARAGRVGDARAPPYLHERGDSQAVQRG

SEQ ID NO: 4078 - DNA, 998 bp, Zea mays subsp. mays
  misc_feature (1)..(998): Ceres Seq. ID no. 12343213
  misc_feature (1)..(998): Ortholog of  Ceres SEQ ID NO 14301396 as cited in SEQ ID NO 51789
  misc_feature (1)..(998): Ortholog of  Ceres SEQ ID NO 12610031 as cited in SEQ ID NO 55811
  misc_feature (1)..(998): Ortholog of  Ceres SEQ ID NO 12610896 as cited in SEQ ID NO 55861
  misc_feature (1)..(998): Ortholog of  Ceres SEQ ID NO 12619664 as cited in SEQ ID NO 66048
  misc_feature (1)..(998): Ortholog of  Ceres SEQ ID NO 12635952 as cited in SEQ ID NO 0
aacagtgaaccaaacaaaagcctcgagccagtgtggtgtggggtcgcgtgctctcttctatcctgctctgctagtgtcaggattccgccctatccatcccatcaacctcagctaaggtccccagcggcggcgaggcgatggcggcgcctgtgacggtgtacggaccgatgctctcaccagctgtggcccgcgtggcggcctgcctcctggagaaggacgtgccgttccagatcgagccggtggacatgtccaagggcgagcacaagtcgccgtccttcctcaagctccagcccttcggacaggtccctgccttcaaggaccacctcacaaccgtctttgagtcaagggctatttgccgttacatatgcgaccagtatgcggactctggtaatcaggccctcttcggcaagaaagaagacggcgcggttggccgcgctgccattgaacagtggatagagtctgaaggccagagctttaacccaccgagcttggctattatcttccagctcgcatttgcaccgatgatgggccggaccactgacctggctgtggttgagcagaatgaagcgaagcttgcgaaggtgcttgatgtgtatgaccaacggctgggggagagccagtattttgctggtgatgatttctcccctggccgaccttgtgcacttgcccaatgcagatttccttgtgaacagaaccagcaaggctggcttgatcaccgagagaaagaatcttgctagatggtgggatgatgtctcgtcccgacctgcatggaaaaaggtcactgagatgcagagcacgccgaggccctcttagagcttttttttgggtttctttgagcagcttctgatggcaattagttgcattctccttgttttgtcatcaagtccttgtctgtaccgtttcctgttctcttatttatcggtcttaattcttgatctatgtatggtttggatctgttcttctggtcctttagtttatataagtacctacaattcttc

SEQ ID NO: 4079 - protein, 199 aa, Zea mays subsp. mays
  peptide (1)..(199): Ceres Seq. ID no. 12343214
MAAPVTVYGPMLSPAVARVAACLLEKDVPFQIEPVDMSKGEHKSPSFLKLQPFGQVPAFKDHLTTVFESRAICRYICDQYADSGNQALFGKKEDGAVGRAAIEQWIESEGQSFNPPSLAIIFQLAFAPMMGRTTDLAVVEQNEAKLAKVLDVYDQRLGESQYFAGDDFSPGRPCALAQCRFPCEQNQQGWLDHREKESC

SEQ ID NO: 4080 - protein, 189 aa, Zea mays subsp. mays
  peptide (1)..(189): Ceres Seq. ID no. 12343215
MLSPAVARVAACLLEKDVPFQIEPVDMSKGEHKSPSFLKLQPFGQVPAFKDHLTTVFESRAICRYICDQYADSGNQALFGKKEDGAVGRAAIEQWIESEGQSFNPPSLAIIFQLAFAPMMGRTTDLAVVEQNEAKLAKVLDVYDQRLGESQYFAGDDFSPGRPCALAQCRFPCEQNQQGWLDHREKESC

SEQ ID NO: 4081 - protein, 163 aa, Zea mays subsp. mays
  peptide (1)..(163): Ceres Seq. ID no. 12343216
MSKGEHKSPSFLKLQPFGQVPAFKDHLTTVFESRAICRYICDQYADSGNQALFGKKEDGAVGRAAIEQWIESEGQSFNPPSLAIIFQLAFAPMMGRTTDLAVVEQNEAKLAKVLDVYDQRLGESQYFAGDDFSPGRPCALAQCRFPCEQNQQGWLDHREKESC

SEQ ID NO: 4082 - DNA, 757 bp, Zea mays subsp. mays
  misc_feature (1)..(757): Ceres Seq. ID no. 12579198
  misc_feature (1)..(757): Ortholog of  Ceres SEQ ID NO 12587363 as cited in SEQ ID NO 62244
aattccgtttgtttccgacggcacaaggaaaaaaaaagaccagactgagggctcctctcccgttccgatcgccaattcgccttccaccgcctgcaaccctttcttcccttctcggtcatcgtgacggcatcacgcgcgcgctctcctcttccacgagtccgtcagcctgctaagtcttaagatggcgtcaagcaatggtcagacagaagctccagcaccatctgtccccaaaaatcctgctatggcatcatgccggaagaagaaaacagatgatgctaccttccttgaagatctgaaagaccacatggatgagttcattcacgcctccatggatgagcacaagagctgctttaagaagacaattcagaagatgtttgggatgtcgaaggctgttgcagagagatccgcggcggaagcaaacaaagctgaagttgaaagtgctttgccacttcagaccagtgtctcgcagtagaatttcatgcagtagaatttcatgttggtagtttcttgctcgtgccaatagttttatataagggtttttgttgctgtgttttctgaaacgcataagcgtgtcagtagcatgttttcataaccggattgtagtgcttcattatctatagttttctgtacgtgtaaaatagaccagcgtaacagcgtagtttgcttcattctccgaagtattgtatggctgtacacccaggcatctgggcatcatgaacccaactgattggctaaatgaaataaatctcctccatcc

SEQ ID NO: 4083 - protein, 96 aa, Zea mays subsp. mays
  peptide (1)..(96): Ceres Seq. ID no. 12579199
MASSNGQTEAPAPSVPKNPAMASCRKKKTDDATFLEDLKDHMDEFIHASMDEHKSCFKKTIQKMFGMSKAVAERSAAEANKAEVESALPLQTSVSQ

SEQ ID NO: 4084 - protein, 76 aa, Zea mays subsp. mays
  peptide (1)..(76): Ceres Seq. ID no. 12579200
MASCRKKKTDDATFLEDLKDHMDEFIHASMDEHKSCFKKTIQKMFGMSKAVAERSAAEANKAEVESALPLQTSVSQ

SEQ ID NO: 4085 - protein, 64 aa, Zea mays subsp. mays
  peptide (1)..(64): Ceres Seq. ID no. 12579201
MSSFTPPWMSTRAALRRQFRRCLGCRRLLQRDPRRKQTKLKLKVLCHFRPVSRSRISCSRISCW

SEQ ID NO: 4086 - DNA, 980 bp, Zea mays subsp. mays
  misc_feature (1)..(980): Ceres Seq. ID no. 12348303
  misc_feature (1)..(980): Ortholog of  Ceres SEQ ID NO 12624943 as cited in SEQ ID NO 67802
aaccccccaactccgttcattgcggcaggccggcagccaaatcgagatctcgcccgtgctgaatcccaccactctcgccgacccggccgcagcaagcgcagcgcatcgacaggagccgaagaaccgaagaggagatggcgtcggcgctgtcctccctgcgctacggcgacagcctctcggtggtgggcatctccgccgcgacggccgtgctctgcgaggccatgtcctggctcctcatctaccgcaccgccacctacaactccctccgcgcctccatcgagcgccactcccgcaagctagacgccatgaagtccggctccacctccgcctcctccggcaccgccgcctcctccgcgcagcccgcatcgtcgcgggctaagaagatggaccgcgtcgagaccagcctcaaggacgctgcgcgggagctctcgctcgccaagctcaagtcgggcgccgtcgtcgctgtcatgctcttcgtcgtcttcggcctgctcaactccctcttcgagggccgcaccgtcgccaagctgcccttcgcgcccatcccgctcgtccagcggatgagccaccgcggactgcccgggaacgatcccaccgactgctccatggttttcctctacttcctctgctccatgagcatccgaaccaacctgcagaaactgcttggcttnncgccgccacgcgcggctgctgcagccggcggtggcctcttccccatgcccgatccgaaagttaattgaggctgatttccaagacgagtgaatccgaaccaaagatagcaatagtcgcccgggaaagactctgtgcgactgcaccgatatccgtacccaattcattttccacagctcaccggtttgttgttgcgcaccggtgattgcaaacctgaaggttggcttatttattgcattgactgaaacaacgaacatgaattacctgctgggaggcagagaaatgtgcagcctaatttttttcggcctctg

SEQ ID NO: 4087 - protein, 201 aa, Zea mays subsp. mays
  peptide (1)..(201): Ceres Seq. ID no. 12348304
  misc_feature (179)..(179): Xaa is any aa, unknown or other
  misc_feature (180)..(180): Xaa is any aa, unknown or other
MASALSSLRYGDSLSVVGISAATAVLCEAMSWLLIYRTATYNSLRASIERHSRKLDAMKSGSTSASSGTAASSAQPASSRAKKMDRVETSLKDAARELSLAKLKSGAVVAVMLFVVFGLLNSLFEGRTVAKLPFAPIPLVQRMSHRGLPGNDPTDCSMVFLYFLCSMSIRTNLQKLLGXXPPRAAAAAGGGLFPMPDPKVN

SEQ ID NO: 4088 - protein, 172 aa, Zea mays subsp. mays
  peptide (1)..(172): Ceres Seq. ID no. 12348305
  misc_feature (150)..(150): Xaa is any aa, unknown or other
  misc_feature (151)..(151): Xaa is any aa, unknown or other
MSWLLIYRTATYNSLRASIERHSRKLDAMKSGSTSASSGTAASSAQPASSRAKKMDRVETSLKDAARELSLAKLKSGAVVAVMLFVVFGLLNSLFEGRTVAKLPFAPIPLVQRMSHRGLPGNDPTDCSMVFLYFLCSMSIRTNLQKLLGXXPPRAAAAAGGGLFPMPDPKVN

SEQ ID NO: 4089 - protein, 144 aa, Zea mays subsp. mays
  peptide (1)..(144): Ceres Seq. ID no. 12348306
  misc_feature (122)..(122): Xaa is any aa, unknown or other
  misc_feature (123)..(123): Xaa is any aa, unknown or other
MKSGSTSASSGTAASSAQPASSRAKKMDRVETSLKDAARELSLAKLKSGAVVAVMLFVVFGLLNSLFEGRTVAKLPFAPIPLVQRMSHRGLPGNDPTDCSMVFLYFLCSMSIRTNLQKLLGXXPPRAAAAAGGGLFPMPDPKVN

SEQ ID NO: 4090 - DNA, 1062 bp, Zea mays subsp. mays
  misc_feature (1)..(1062): Ceres Seq. ID no. 12340757
  misc_feature (1)..(1062): Ortholog of  Ceres SEQ ID NO 12616101 as cited in SEQ ID NO 63367
acacactactttccctcgtgcggccgccgccctacaacaggtgccccaggtcttcgctgcgccattcgccagcgacgagcacccaacaggctcagaaacatcgctgacatccacatgcaccacagtagttcagtagagtagctgttggaacccacacaccggcgatggcaactgctcctgtgacatcctccatggctacgaactccacctgtgtgcggctgcctagcatgcccctgaggcgtgcacccgccatcgtctcctttgcctctcgtccatggtcaaccgcaatgacctcatgtactggattgtcgcggcactctgatgtggttgccgccgcggggcaccagaagttgatggggtctttgaacaacaacgagggactcatgtttggggtggttgtggcacggttcaacgaggtcgtgacaaatttgttactacagggtgccctggaaactttcgagcgatactctgttaaagcagaaaatataacagttgttagtgttcctggaagctttgaagttcctataacggcacaaaagcttgggaaatctggaaaatttgatgcaattctgtgcattggagctgtgattagaggtgacacaacccactatgatgccgttgcaaactcagctgcatcaggtgtactcaatgctggattatctgctggtgttccttgtgtatttggtgttctaacctgtgaagacatggatcaggcactgaaccgtgctggtggcaaggctggaaacaaaggagctgaagctgctcttactgccattgagatggcctcgctgttccggcatcacttaggctgacaccttgtgtattctgattttctatacacgaggcgtcagcatttcctcctatcaagagttttggctaatagagagcttttctgccgcggctagtataatttatttccaagtttgttggttcggtgcggattggttgctttccttctgagacctgaaaagctcacaagacatgtctgtaaacctgacatcgtgaataattgtctccacgaacgaaatatggtcatgaataaagctgcacaagtgttttgtc

SEQ ID NO: 4091 - protein, 215 aa, Zea mays subsp. mays
  peptide (1)..(215): Ceres Seq. ID no. 12340758
MATAPVTSSMATNSTCVRLPSMPLRRAPAIVSFASRPWSTAMTSCTGLSRHSDVVAAAGHQKLMGSLNNNEGLMFGVVVARFNEVVTNLLLQGALETFERYSVKAENITVVSVPGSFEVPITAQKLGKSGKFDAILCIGAVIRGDTTHYDAVANSAASGVLNAGLSAGVPCVFGVLTCEDMDQALNRAGGKAGNKGAEAALTAIEMASLFRHHLG

SEQ ID NO: 4092 - protein, 206 aa, Zea mays subsp. mays
  peptide (1)..(206): Ceres Seq. ID no. 12340759
MATNSTCVRLPSMPLRRAPAIVSFASRPWSTAMTSCTGLSRHSDVVAAAGHQKLMGSLNNNEGLMFGVVVARFNEVVTNLLLQGALETFERYSVKAENITVVSVPGSFEVPITAQKLGKSGKFDAILCIGAVIRGDTTHYDAVANSAASGVLNAGLSAGVPCVFGVLTCEDMDQALNRAGGKAGNKGAEAALTAIEMASLFRHHLG

SEQ ID NO: 4093 - protein, 194 aa, Zea mays subsp. mays
  peptide (1)..(194): Ceres Seq. ID no. 12340760
MPLRRAPAIVSFASRPWSTAMTSCTGLSRHSDVVAAAGHQKLMGSLNNNEGLMFGVVVARFNEVVTNLLLQGALETFERYSVKAENITVVSVPGSFEVPITAQKLGKSGKFDAILCIGAVIRGDTTHYDAVANSAASGVLNAGLSAGVPCVFGVLTCEDMDQALNRAGGKAGNKGAEAALTAIEMASLFRHHLG

SEQ ID NO: 4094 - DNA, 786 bp, Zea mays subsp. mays
  misc_feature (1)..(786): Ceres Seq. ID no. 12365367
  misc_feature (1)..(786): Ortholog of  Ceres SEQ ID NO 13594962 as cited in SEQ ID NO 56140
  misc_feature (1)..(786): Ortholog of  Ceres SEQ ID NO 13598378 as cited in SEQ ID NO 62631
gtcaactgatcaagccaaagccgaacaccaccacaaggcagcagccgaacaccaaggcagcagccgccaccacttcattgcgcgaatcggagcccgtggccgtcgcctccgccctcgcgattcgccgccgttgcccacgagcgaggcttcctcctcttcgtcgccgccgtcgcaggaggggaaagaggataaactgccatggcgggcaggctcctcgcgaatctaatcgtcatgggcggaaccgtggttggcagggccatgctccaggcctaccgccaggccatcgtcaatgcaaacaaaactggagctgcccaagaagctataaatggtattagacgggctagcaaggccatgactgagcaagaagcccggcaaattcttggtatcagtgaaaattcgacgtgggaagagattgtccagaagtacgacacaatgtttgagaggaataacaagaacggcagcttctatctccagtcaaaggttcatagagcgaaagaatgcctggaacctttatatcaaaagcctgatgtactgaactgagattttgcagacgccctagcttctgtttgaagcggtatgcctaattgatcgatttattagtgtgcccagagatcaacgttcagtttattgatcggtttgccaatgcgcccagagatcaacgttcagttttgagttatgtgttgggcgcatcaggttggttcgttgtaatgccagaataatgtttaacaaacatactgaattttggctgtttctcattggcaacgcctcagtcactggttttaattc

SEQ ID NO: 4095 - protein, 113 aa, Zea mays subsp. mays
  peptide (1)..(113): Ceres Seq. ID no. 12365368
MAGRLLANLIVMGGTVVGRAMLQAYRQAIVNANKTGAAQEAINGIRRASKAMTEQEARQILGISENSTWEEIVQKYDTMFERNNKNGSFYLQSKVHRAKECLEPLYQKPDVLN

SEQ ID NO: 4096 - protein, 110 aa, Zea mays subsp. mays
  peptide (1)..(110): Ceres Seq. ID no. 12365369
QLIKPKPNTTTRQQPNTKAAAATTSLRESEPVAVASALAIRRRCPRARLPPLRRRRRRRGKRINCHGGQAPRESNRHGRNRGWQGHAPGLPPGHRQCKQNWSCPRSYKWY

SEQ ID NO: 4097 - protein, 102 aa, Zea mays subsp. mays
  peptide (1)..(102): Ceres Seq. ID no. 12365370
MGGTVVGRAMLQAYRQAIVNANKTGAAQEAINGIRRASKAMTEQEARQILGISENSTWEEIVQKYDTMFERNNKNGSFYLQSKVHRAKECLEPLYQKPDVLN

SEQ ID NO: 4098 - DNA, 449 bp, Zea mays subsp. mays
  misc_feature (1)..(449): Ceres Seq. ID no. 12595631
  misc_feature (1)..(449): Ortholog of  Ceres SEQ ID NO 12621592 as cited in SEQ ID NO 67016
aaaaagcggcgtgatgcagttcctccgaggcagcggcggcggggcgggggcggtgggttcccgggggtggcgtgggaggtgttgcggcggcacttctctaagaagcggtccgttgcacgtgaggcggatcaaccccaaggtgcccaaggaggaggccgtcgccatttccggccgactcctccagatcctctccgaccatgggcccctcaccgtcggcaacacctggaaccacgccaaggatgctggcatcgctggtctgaacagcaagacgcacatgaagatcctgctgaaatggatnacggggaaaatgtcgtnaagctgaccctgcgtgcacgtgggcaacgcgaanaagttcctctactccccgtccactgaaagcagcagcagcgccggcgcatcaccgtcatccacatcggcctcgcagtgacggtcaatcgccgttaagcctt

SEQ ID NO: 4099 - protein, 124 aa, Zea mays subsp. mays
  peptide (1)..(124): Ceres Seq. ID no. 12595632
  misc_feature (100)..(100): Xaa is any aa, unknown or other
  misc_feature (105)..(105): Xaa is any aa, unknown or other
  misc_feature (117)..(117): Xaa is any aa, unknown or other
KKRRDAVPPRQRRRGGGGGFPGVAWEVLRRHFSKKRSVAREADQPQGAQGGGRRHFRPTPPDPLRPWAPHRRQHLEPRQGCWHRWSEQQDAHEDPAEMDXGENVXKLTLRARGQREXVPLLPVH

SEQ ID NO: 4100 - protein, 106 aa, Zea mays subsp. mays
  peptide (1)..(106): Ceres Seq. ID no. 12595633
  misc_feature (99)..(99): Xaa is any aa, unknown or other
  misc_feature (105)..(105): Xaa is any aa, unknown or other
KSGVMQFLRGSGGGAGAVGSRGWRGRCCGGTSLRSGPLHVRRINPKVPKEEAVAISGRLLQILSDHGPLTVGNTWNHAKDAGIAGLNSKTHMKILLKWXTGKMSXS

SEQ ID NO: 4101 - protein, 102 aa, Zea mays subsp. mays
  peptide (1)..(102): Ceres Seq. ID no. 12595634
  misc_feature (95)..(95): Xaa is any aa, unknown or other
  misc_feature (101)..(101): Xaa is any aa, unknown or other
MQFLRGSGGGAGAVGSRGWRGRCCGGTSLRSGPLHVRRINPKVPKEEAVAISGRLLQILSDHGPLTVGNTWNHAKDAGIAGLNSKTHMKILLKWXTGKMSXS

SEQ ID NO: 4102 - DNA, 666 bp, Zea mays subsp. mays
  misc_feature (1)..(666): Ceres Seq. ID no. 12401661
  misc_feature (1)..(666): Ortholog of  Ceres SEQ ID NO 14312408 as cited in SEQ ID NO 55042
cgggccacctcgagctgcgcaaccgcgaccccgacgacaacccgctggtgacgttcaactacttctcgcaccccgaggacctccgccgctgcgtggccggcttgtcggtcatcgagcgcgtcatccactcccaggccttcaagaacttcacgtaccccgacttctccatggagacgctgctcaacatgtcgacggggttccccgtcaacctgctgccccggcacgacaacgactccacgtcgcttgagatgttctgcaaggacaccgtcatgaccatctggcactaccacggtggctgccaggtcggcagggtcgtcgacgctgaataccgagtgctcggcatcgacgcgctgcgcgtcattgacggctccactttcaacgcctcgccaggaaccaacccgcaggcaaccgtcatgatgctcggcaggtatatgggagtcagaatcacaaacgaaaggttggcagctgaaggattagagggaacaaaaccgtgatgatcctataatccaagacagtaggcgaggcgtattaagaatctctattgaactatgtaatgctggattcaatattgttggtgtgattctgatattgataggttgcacatattgtcggagttgtatcatgttgtttgttgttactatgtggactattatgagtgaaatctgc

SEQ ID NO: 4103 - protein, 163 aa, Zea mays subsp. mays
  peptide (1)..(163): Ceres Seq. ID no. 12401662
GHLELRNRDPDDNPLVTFNYFSHPEDLRRCVAGLSVIERVIHSQAFKNFTYPDFSMETLLNMSTGFPVNLLPRHDNDSTSLEMFCKDTVMTIWHYHGGCQVGRVVDAEYRVLGIDALRVIDGSTFNASPGTNPQATVMMLGRYMGVRITNERLAAEGLEGTKP

SEQ ID NO: 4104 - protein, 108 aa, Zea mays subsp. mays
  peptide (1)..(108): Ceres Seq. ID no. 12401663
METLLNMSTGFPVNLLPRHDNDSTSLEMFCKDTVMTIWHYHGGCQVGRVVDAEYRVLGIDALRVIDGSTFNASPGTNPQATVMMLGRYMGVRITNERLAAEGLEGTKP

SEQ ID NO: 4105 - protein, 102 aa, Zea mays subsp. mays
  peptide (1)..(102): Ceres Seq. ID no. 12401664
MSTGFPVNLLPRHDNDSTSLEMFCKDTVMTIWHYHGGCQVGRVVDAEYRVLGIDALRVIDGSTFNASPGTNPQATVMMLGRYMGVRITNERLAAEGLEGTKP

SEQ ID NO: 4106 - DNA, 1316 bp, Zea mays subsp. mays
  misc_feature (1)..(1316): Ceres Seq. ID no. 12358113
  misc_feature (1)..(1316): Ortholog of  Ceres SEQ ID NO 14314050 as cited in SEQ ID NO 59952
  misc_feature (1)..(1316): Ortholog of  Ceres SEQ ID NO 13596474 as cited in SEQ ID NO 62169
  misc_feature (1)..(1316): Ortholog of  Ceres SEQ ID NO 13598714 as cited in SEQ ID NO 62656
  misc_feature (1)..(1316): Ortholog of  Ceres SEQ ID NO 15225685 as cited in SEQ ID NO 63616
  misc_feature (1)..(1316): Ortholog of  Ceres SEQ ID NO 13597519 as cited in SEQ ID NO 64759
  misc_feature (1)..(1316): Ortholog of  Ceres SEQ ID NO 14302388 as cited in SEQ ID NO 65655
  misc_feature (1)..(1316): Ortholog of  Ceres SEQ ID NO 13595926 as cited in SEQ ID NO 67778
  misc_feature (1)..(1316): Ortholog of  Ceres SEQ ID NO 13587054 as cited in SEQ ID NO 0
gtgtgccccgtctcggaacagcgcggaccaccagagcgtgcgcgtccgtgccccacccctccctctctatccatggcggtcccccgcgggtgcctcgggctccccctggtcgccgtgctcctcgcgtccctctgccgcggccaggcggcggtgagggagctcaaggtcgggtactacgccgagacgtgcccggaggccgaggacatcgtccgtgagaccatggcgcgcgcgcgcgcacgcgaggcccgcagcgtcgcctccgtcatgcgcctccagttccacgactgcttcgtcaacgggtgcgacggctcggtgctgatggacgccacgccgacgatgcccggcgagaaggatgcgctctccaacatcaactccctgcgctcgttcgaggtcgtcgacgagatcaaggacgcgctggaggagcgctgccccggagtggtctcctgcgccgacatcgtcatcattgccgcccgcgacgccgtcgtcctgaccggtgggcctaactgggaggtgcggctcgggcgcgaggacagcatgacggcgagccaggaggacgcggacaacatcatgccgagcccgcgcgcaaacgcgagcgctctcatccggctcttcgcggggctcaacctcagcgtcaccgacctggtcgcgctctcgggctcgcactccatcggcgaggcccgctgcttctccatcgtcttccgcctctacaaccagtctggatccggccgccccgacccgcacatggacaccgcctaccgccgctcgctcgacgcactctgccccaagggcggcgacgaggaggtcacgggaggcctggacgccaccccacgcatcttcgacaaccagtacttcgaggacctcgtcgcgctccgcggcttcctcaactccgaccagacgctcttctctgacaacaccaggacccgtcgggtcgtcgagcggctcagcaaggaccaggacgccttcttcagggccttcatcgaggggatgataaagatgggggagctccaaaaccccaggaaaggggagatacggcgcaactgtcgcgttgctaacaactcgccgtggcaaccaaggacggggatggcgtccggacagtcgacatctgagctccggtgatgaggttggtgtttcagaagaaatcgagccctgatatggtactaatatgttgacatgcattgttgtttttttggtcgtgtgtaagttttgcacctacctatggctgtggtgcccgagctgcgctcattgctgacgtggggaataattgagacattgtgccttagctccaataacgttcaatatatttatcctttatatcg

SEQ ID NO: 4107 - protein, 371 aa, Zea mays subsp. mays
  peptide (1)..(371): Ceres Seq. ID no. 12358114
VCPVSEQRGPPERARPCPTPPSLSMAVPRGCLGLPLVAVLLASLCRGQAAVRELKVGYYAETCPEAEDIVRETMARARAREARSVASVMRLQFHDCFVNGCDGSVLMDATPTMPGEKDALSNINSLRSFEVVDEIKDALEERCPGVVSCADIVIIAARDAVVLTGGPNWEVRLGREDSMTASQEDADNIMPSPRANASALIRLFAGLNLSVTDLVALSGSHSIGEARCFSIVFRLYNQSGSGRPDPHMDTAYRRSLDALCPKGGDEEVTGGLDATPRIFDNQYFEDLVALRGFLNSDQTLFSDNTRTRRVVERLSKDQDAFFRAFIEGMIKMGELQNPRKGEIRRNCRVANNSPWQPRTGMASGQSTSELR

SEQ ID NO: 4108 - protein, 347 aa, Zea mays subsp. mays
  peptide (1)..(347): Ceres Seq. ID no. 12358115
MAVPRGCLGLPLVAVLLASLCRGQAAVRELKVGYYAETCPEAEDIVRETMARARAREARSVASVMRLQFHDCFVNGCDGSVLMDATPTMPGEKDALSNINSLRSFEVVDEIKDALEERCPGVVSCADIVIIAARDAVVLTGGPNWEVRLGREDSMTASQEDADNIMPSPRANASALIRLFAGLNLSVTDLVALSGSHSIGEARCFSIVFRLYNQSGSGRPDPHMDTAYRRSLDALCPKGGDEEVTGGLDATPRIFDNQYFEDLVALRGFLNSDQTLFSDNTRTRRVVERLSKDQDAFFRAFIEGMIKMGELQNPRKGEIRRNCRVANNSPWQPRTGMASGQSTSELR

SEQ ID NO: 4109 - protein, 298 aa, Zea mays subsp. mays
  peptide (1)..(298): Ceres Seq. ID no. 12358116
MARARAREARSVASVMRLQFHDCFVNGCDGSVLMDATPTMPGEKDALSNINSLRSFEVVDEIKDALEERCPGVVSCADIVIIAARDAVVLTGGPNWEVRLGREDSMTASQEDADNIMPSPRANASALIRLFAGLNLSVTDLVALSGSHSIGEARCFSIVFRLYNQSGSGRPDPHMDTAYRRSLDALCPKGGDEEVTGGLDATPRIFDNQYFEDLVALRGFLNSDQTLFSDNTRTRRVVERLSKDQDAFFRAFIEGMIKMGELQNPRKGEIRRNCRVANNSPWQPRTGMASGQSTSELR

SEQ ID NO: 4110 - DNA, 1144 bp, Zea mays subsp. mays
  misc_feature (1)..(1144): Ceres Seq. ID no. 12340765
  misc_feature (1)..(1144): Ortholog of  Ceres SEQ ID NO 15176317 as cited in SEQ ID NO 52865
  misc_feature (1)..(1144): Ortholog of  Ceres SEQ ID NO 13518893 as cited in SEQ ID NO 58108
  misc_feature (1)..(1144): Ortholog of  Ceres SEQ ID NO 12617152 as cited in SEQ ID NO 63555
aaatcgagctcggaggcgaatctctcgctaactgtcatcaatggcggccgagcccaagatcctagagctctccaacggcaagatcaccgcgaggatctccaactggggcgccaccatcacctccctcctcgtccccgacgcccaggggagtgtcgctgatgtggtgctcggattcgatggcttggatccgtacgtgaaaggcatgtcaccttattttggctgcatagttggccgtgtcgcgaataggatcaaggatgggaagtttacactaaacggacttgagtattcattacctgtcaacaatggacctaacagccttcatggtgggttgaagggatttgataaggtcgtgtgggatgtcgtggagcacaaagatggcgaatgcccttcaataacttttcagtatcacagcaaggacggggaagaaggctatccaggcgatgtaaccattcgagcaacatactctcttcctgaagctactactctaaggcttgacatggaagctacaccagagaacaaagcaactcctataagcctggcgcagcacacctactggaacctcgcaggtcacgcctgcggcgacatcttaaaccactcgctgcagatctggggcaagcacatcactccggtcgacgagaacacaattcccaccggcgagataatgcccgtcgatggcaccccttttgacttcacgacggagcgcaggattggcgagcgcatcgacggtgttcctggagggtatgatcataactacgtgctggactgtggcgacgagaaggacggcctgaagcgtgcggccaggctgaaagatccgtcgagcttgcggaccctggacctgtggactgacgcacccggcatgcagctgtacactgccaactacgtggatggcatcggtggcaaggcgggcgctgtctacgcgaagcatgctggagtgtgcttggaaacccaggggttcccgaatgccatcaaccagcctgagtttccctctgtggttgttcggcccggtgagaagtataagcatactatgctgtttgagttctcgggatgttgaatagtgactggacagcataaattgatgtaaaacatgttgaatgaataaacaagcagaaggataagctgtgataataatgcactagtttgctcc

SEQ ID NO: 4111 - protein, 336 aa, Zea mays subsp. mays
  peptide (1)..(336): Ceres Seq. ID no. 12340766
MAAEPKILELSNGKITARISNWGATITSLLVPDAQGSVADVVLGFDGLDPYVKGMSPYFGCIVGRVANRIKDGKFTLNGLEYSLPVNNGPNSLHGGLKGFDKVVWDVVEHKDGECPSITFQYHSKDGEEGYPGDVTIRATYSLPEATTLRLDMEATPENKATPISLAQHTYWNLAGHACGDILNHSLQIWGKHITPVDENTIPTGEIMPVDGTPFDFTTERRIGERIDGVPGGYDHNYVLDCGDEKDGLKRAARLKDPSSLRTLDLWTDAPGMQLYTANYVDGIGGKAGAVYAKHAGVCLETQGFPNAINQPEFPSVVVRPGEKYKHTMLFEFSGC

SEQ ID NO: 4112 - protein, 282 aa, Zea mays subsp. mays
  peptide (1)..(282): Ceres Seq. ID no. 12340767
MSPYFGCIVGRVANRIKDGKFTLNGLEYSLPVNNGPNSLHGGLKGFDKVVWDVVEHKDGECPSITFQYHSKDGEEGYPGDVTIRATYSLPEATTLRLDMEATPENKATPISLAQHTYWNLAGHACGDILNHSLQIWGKHITPVDENTIPTGEIMPVDGTPFDFTTERRIGERIDGVPGGYDHNYVLDCGDEKDGLKRAARLKDPSSLRTLDLWTDAPGMQLYTANYVDGIGGKAGAVYAKHAGVCLETQGFPNAINQPEFPSVVVRPGEKYKHTMLFEFSGC

SEQ ID NO: 4113 - protein, 184 aa, Zea mays subsp. mays
  peptide (1)..(184): Ceres Seq. ID no. 12340768
MEATPENKATPISLAQHTYWNLAGHACGDILNHSLQIWGKHITPVDENTIPTGEIMPVDGTPFDFTTERRIGERIDGVPGGYDHNYVLDCGDEKDGLKRAARLKDPSSLRTLDLWTDAPGMQLYTANYVDGIGGKAGAVYAKHAGVCLETQGFPNAINQPEFPSVVVRPGEKYKHTMLFEFSGC

SEQ ID NO: 4114 - DNA, 838 bp, Zea mays subsp. mays
  misc_feature (1)..(838): Ceres Seq. ID no. 12401478
  misc_feature (1)..(838): Ortholog of  Ceres SEQ ID NO 13594189 as cited in SEQ ID NO 58890
accctctccacttccgtttccggatcccgtttccagctccgatccaacccagcatctgtaccgcgccgcgcgagcacgtccggcgccggtgcggcaggcgaaatccgagagcactcctcccccgctacgccgcaccgcccatggccgcagctagccgcagatagagagaggcgcaggcgagggcgtgcagatccagatccggtgggcgggaaggacttgatcgcccccaccaccatggccggcccggtgtcggcgctcttcctgctggacatgaagggccgcgttctcgtctggcgcgactaccgcggcgatgtctccgcgctccaggccgagcgcttcttcaccaagctcctcgacaaggagggcgattcggaagtgcactcgcctgtggtctacgacgacgctggcgtcacttacatgttcatccagcacaacaatgtcttcctcctcaccgccgctcgccagaactgtaacgcggcccagcatcctcctcttcctccaccgtgtaatagatgtgtttaagcactacttcgaggagctggaggaggagtcgctcagagataacttcgtcgttgtgtatgagttgctcgatgagatgatggattttgggtacccacaatacacggaggcgaagatattgagtgagttcatcaagacagatgcatacaggatggaggtcacacagcgtccacccatggccgtgacaaatgctgtgtcatggaggagcgaggggatccggtacaagaagaatgaagtcttcttggatgtagtggagagtgttaacattctagttaacagcaatggccagattgtgagatcagatgtggttggggcactg

SEQ ID NO: 4115 - protein, 176 aa, Zea mays subsp. mays
  peptide (1)..(176): Ceres Seq. ID no. 12401479
MSPRSRPSASSPSSSTRRAIRKCTRLWSTTTLASLTCSSSTTMSSSSPPLARTVTRPSILLFLHRVIDVFKHYFEELEEESLRDNFVVVYELLDEMMDFGYPQYTEAKILSEFIKTDAYRMEVTQRPPMAVTNAVSWRSEGIRYKKNEVFLDVVESVNILVNSNGQIVRSDVVGAL

SEQ ID NO: 4116 - protein, 173 aa, Zea mays subsp. mays
  peptide (1)..(173): Ceres Seq. ID no. 12401480
TLSTSVSGSRFQLRSNPASVPRRASTSGAGAAGEIREHSSPATPHRPWPQLAADRERRRRGRADPDPVGGKDLIAPTTMAGPVSALFLLDMKGRVLVWRDYRGDVSALQAERFFTKLLDKEGDSEVHSPVVYDDAGVTYMFIQHNNVFLLTAARQNCNAAQHPPLPPPCNRCV

SEQ ID NO: 4117 - protein, 134 aa, Zea mays subsp. mays
  peptide (1)..(134): Ceres Seq. ID no. 12401481
MSSSSPPLARTVTRPSILLFLHRVIDVFKHYFEELEEESLRDNFVVVYELLDEMMDFGYPQYTEAKILSEFIKTDAYRMEVTQRPPMAVTNAVSWRSEGIRYKKNEVFLDVVESVNILVNSNGQIVRSDVVGAL

SEQ ID NO: 4118 - DNA, 787 bp, Zea mays subsp. mays
  misc_feature (1)..(787): Ceres Seq. ID no. 13498073
  misc_feature (1)..(787): Ortholog of  Ceres SEQ ID NO 12624607 as cited in SEQ ID NO 61454
cttgggttaagctctagtgctagatcgttcgttttggtctgcactctgcacagtgcacagacccttcccccgtgttcccgaatcccgaatcgcgacccaaacagagaggccaggagcggaggactatggccgtagccagacatggcgnccgcngctaccgcctcctcctgcgggcccgttggcagcccgccggctcgggggcgcggtgcatccacgagggcccggacaccatcgaggagctgctggaccggcacctcgtgaagaagcccgcggngngcccggacgaggagtcggcggaggcgcggcggcggctgacgagctcccggcgggaggcgctggccctgtaccgggacatcctccgggcggcgcggctcttcgcgtggaccgacgaccgcggggtgccgtggcgggaggtntgcgcgccaacgccaggcgcgagttcgaggatgcccgcggggagcgcgacccggaggtggtggcgcgcctcctcatcggcggccgcgacgccgtgcaacaggcgctcgaccgccttgccgacgcctcacgccgcgcgatcgagaccgaggaggccaagcgccgtggcggagcgtagatttggagtcgggtattccaaacttacgcgtcatgtgctagcatttgcttaatcttgttgtaagcgacgatctctaattctcaatgtctggtataaaaatggtttcaaggattaggctagctcaagcagtactactatgcatgtttgatttttcacttcacaagaatctgagagagaaacacttcaatttcttgc

SEQ ID NO: 4119 - protein, 172 aa, Zea mays subsp. mays
  peptide (1)..(172): Ceres Seq. ID no. 13498074
  misc_feature (8)..(8): Xaa is any aa, unknown or other
  misc_feature (10)..(10): Xaa is any aa, unknown or other
  misc_feature (50)..(50): Xaa is any aa, unknown or other
  misc_feature (51)..(51): Xaa is any aa, unknown or other
  misc_feature (97)..(97): Xaa is any aa, unknown or other
MAVARHGXRXYRLLLRARWQPAGSGARCIHEGPDTIEELLDRHLVKKPAXXPDEESAEARRRLTSSRREALALYRDILRAARLFAWTDDRGVPWREXCAPTPGASSRMPAGSATRRWWRASSSAAATPCNRRSTALPTPHAARSRPRRPSAVAERRFGVGYSKLTRHVLAFA

SEQ ID NO: 4120 - DNA, 1441 bp, Zea mays subsp. mays
  misc_feature (1)..(1441): Ceres Seq. ID no. 12636899
  misc_feature (1)..(1441): Ortholog of  Ceres SEQ ID NO 15169372 as cited in SEQ ID NO 58778
gaacacgggcacacggatcgtcggctcacggcctcgtcacgcccaccctctccctcttcgggttccaggcttccaaagttgtcagagacggcgagagtagggggtttccaggaagcttcgccagggcgccggtaagttgactggatttgctgctagcagtcaggcaagctcgagttttgccatttgagaaggagagggaaaatgatgacctcgtggcttctgggccgccggggcccctccggcttctcctggagttccaccgccgaccaagtcacgcagggcatctccgccgccggcctcaccgccatcgtcactggggcgtccagcggcatcggcgcggagacggcgcgaacgctggcgctgcgcggggcccacgtcatcatggccgtcaggagccttcccgctgcccaggccgtcaaggacgccgtcctcgcccaggcgccgggggccaagctcgacgtcatggagctcgacctctcgtccatggcctctgtccgcgctttcgcgtcccaattcatcgacaggggtctccccctcaacatccttatcaacaatgcaggagtaatggcaataccttttgcgctttcaaaggatggaattgagatgcagtttgcaactaatcatgttgggcatttcctgctcacacaccttctattggataccatgaagaggacctctcatgaatcaaatttggaaggaagaattgtcaacgtgtcatcagaggggcacagacttgcatatcgggaaggaatccgttttgacaagatcaacgatgaatcagtgtatagtagcattggtgcatatgggcaatcaaagcttgcaaacatattgcatgctaatgaacttgccaggcgatttgaggaagataatgtcaacataactgcaaattctcttcatcctggttccattatcacgaaccttcttcgctaccacagtatcctagatgttctccatcggacgctgggtaaattggtgctgaaaaatgctgagcagggtgcggcaactacatgctatttggcactccacccgcatgtgaagggcgtgtccgggaagtacttctgcgactgtaacctgtacgagccaagcgcgaacgccaaggacatggagttggccaagaggctctgggacttcggcgtcgagctcatcacctagctcatgcttcttgttgttagcgacttgttttcagacatggatgtaatgtaaatcccttgacagatggtaaattctgtaggccctcgaggagctcctgtgtggtaaactcattcacctcaatctatctacgtgtattaaggtggattagggtgtaaattaaattaatttacactccaatcgccctcgaggagctccggtgtggataatgctttggttggatattttagtattcacctgaatttacgtgtattaagatgaattagggtgtaaattaaattaattacactcc

SEQ ID NO: 4121 - protein, 316 aa, Zea mays subsp. mays
  peptide (1)..(316): Ceres Seq. ID no. 12636900
MMTSWLLGRRGPSGFSWSSTADQVTQGISAAGLTAIVTGASSGIGAETARTLALRGAHVIMAVRSLPAAQAVKDAVLAQAPGAKLDVMELDLSSMASVRAFASQFIDRGLPLNILINNAGVMAIPFALSKDGIEMQFATNHVGHFLLTHLLLDTMKRTSHESNLEGRIVNVSSEGHRLAYREGIRFDKINDESVYSSIGAYGQSKLANILHANELARRFEEDNVNITANSLHPGSIITNLLRYHSILDVLHRTLGKLVLKNAEQGAATTCYLALHPHVKGVSGKYFCDCNLYEPSANAKDMELAKRLWDFGVELIT

SEQ ID NO: 4122 - protein, 315 aa, Zea mays subsp. mays
  peptide (1)..(315): Ceres Seq. ID no. 12636901
MTSWLLGRRGPSGFSWSSTADQVTQGISAAGLTAIVTGASSGIGAETARTLALRGAHVIMAVRSLPAAQAVKDAVLAQAPGAKLDVMELDLSSMASVRAFASQFIDRGLPLNILINNAGVMAIPFALSKDGIEMQFATNHVGHFLLTHLLLDTMKRTSHESNLEGRIVNVSSEGHRLAYREGIRFDKINDESVYSSIGAYGQSKLANILHANELARRFEEDNVNITANSLHPGSIITNLLRYHSILDVLHRTLGKLVLKNAEQGAATTCYLALHPHVKGVSGKYFCDCNLYEPSANAKDMELAKRLWDFGVELIT

SEQ ID NO: 4123 - protein, 256 aa, Zea mays subsp. mays
  peptide (1)..(256): Ceres Seq. ID no. 12636902
MAVRSLPAAQAVKDAVLAQAPGAKLDVMELDLSSMASVRAFASQFIDRGLPLNILINNAGVMAIPFALSKDGIEMQFATNHVGHFLLTHLLLDTMKRTSHESNLEGRIVNVSSEGHRLAYREGIRFDKINDESVYSSIGAYGQSKLANILHANELARRFEEDNVNITANSLHPGSIITNLLRYHSILDVLHRTLGKLVLKNAEQGAATTCYLALHPHVKGVSGKYFCDCNLYEPSANAKDMELAKRLWDFGVELIT

SEQ ID NO: 4124 - DNA, 1245 bp, Zea mays subsp. mays
  misc_feature (1)..(1245): Ceres Seq. ID no. 12344687
  misc_feature (1)..(1245): Ortholog of  Ceres SEQ ID NO 13597538 as cited in SEQ ID NO 64966
cttccttcacttctctgcttccgacctcgtagcgaatcggaccggggggctagggttccggtgcgcctctgcaatcggacgcgaggctaggctgggcatggagggaaccgctgcggcccggaagaggtcccggccggagacggcgaacggggctgccgccgccgggaagcgctccaaagacacggagtcatttcaaactggtctatcaagcaaatcgaagccttgcaccaagtttttcagtacgattgggtgcccgtttggcgagggatgtcattttctgcactttgtccctggtggttacccggcagttgcaaaaatgctgaatctaagtagctctgctgtatctgcgccatcaagaactcatgtggatcatgccgctcttaccggtgcctctcatccagcttctacggtcaagacacgcatgtgcaccaagtacaacactacagaaggctgcaagttcggtgataagtgccatttcgctcatagcgaaagagagcttgcgaagccagcctacatgtctcaagaaggacctcctatgggtggtcgatatggacgagctgaacctatgcaaccagctgccatgggccctccagcaggaaactttggtgcctcggcgactgccaagatcagtgtggacgcctctctggccggtggcataatcggcaagggtggggtcaacactaagcagataagtagaattacaggcgtcaagctctccatccgcgaccacgagtctaaccccaacctaaagaacatcgagctggaaggcaattttgaccagatcaagcaagccagcgacttggtgcgtgatctcatcgcaaccatcagcgcaagcatgccagcgaaaaatccatctgctgccgcggcaccagcaggaggaggccgaggcggtggtccagggggcaagagcagcaactacaagacgaagctgtgcgagaacttcttgaagggtgcctgtacttttggtgaccggtgccacttcgcccatggcgagacggagcagcggagaggtgctgcatgagagtcgaggtgctctaggcaatgagatgccatgtgctccctccttttgctactgtgaattttcgccttgcagcgctaggcggttggactgttgtgttgtgttgcgacgtcaatggattaaactctagatttcagctttctttttttaacatataagttcgagaaaacgttaaactgtcgtgcagcttgcattttgttggtcggtaagctagcagctggcctccc

SEQ ID NO: 4125 - protein, 339 aa, Zea mays subsp. mays
  peptide (1)..(339): Ceres Seq. ID no. 12344688
FLHFSASDLVANRTGGLGFRCASAIGREARLGMEGTAAARKRSRPETANGAAAAGKRSKDTESFQTGLSSKSKPCTKFFSTIGCPFGEGCHFLHFVPGGYPAVAKMLNLSSSAVSAPSRTHVDHAALTGASHPASTVKTRMCTKYNTTEGCKFGDKCHFAHSERELAKPAYMSQEGPPMGGRYGRAEPMQPAAMGPPAGNFGASATAKISVDASLAGGIIGKGGVNTKQISRITGVKLSIRDHESNPNLKNIELEGNFDQIKQASDLVRDLIATISASMPAKNPSAAAAPAGGGRGGGPGGKSSNYKTKLCENFLKGACTFGDRCHFAHGETEQRRGAA

SEQ ID NO: 4126 - protein, 307 aa, Zea mays subsp. mays
  peptide (1)..(307): Ceres Seq. ID no. 12344689
MEGTAAARKRSRPETANGAAAAGKRSKDTESFQTGLSSKSKPCTKFFSTIGCPFGEGCHFLHFVPGGYPAVAKMLNLSSSAVSAPSRTHVDHAALTGASHPASTVKTRMCTKYNTTEGCKFGDKCHFAHSERELAKPAYMSQEGPPMGGRYGRAEPMQPAAMGPPAGNFGASATAKISVDASLAGGIIGKGGVNTKQISRITGVKLSIRDHESNPNLKNIELEGNFDQIKQASDLVRDLIATISASMPAKNPSAAAAPAGGGRGGGPGGKSSNYKTKLCENFLKGACTFGDRCHFAHGETEQRRGAA

SEQ ID NO: 4127 - protein, 234 aa, Zea mays subsp. mays
  peptide (1)..(234): Ceres Seq. ID no. 12344690
MLNLSSSAVSAPSRTHVDHAALTGASHPASTVKTRMCTKYNTTEGCKFGDKCHFAHSERELAKPAYMSQEGPPMGGRYGRAEPMQPAAMGPPAGNFGASATAKISVDASLAGGIIGKGGVNTKQISRITGVKLSIRDHESNPNLKNIELEGNFDQIKQASDLVRDLIATISASMPAKNPSAAAAPAGGGRGGGPGGKSSNYKTKLCENFLKGACTFGDRCHFAHGETEQRRGAA

SEQ ID NO: 4128 - DNA, 989 bp, Zea mays subsp. mays
  misc_feature (1)..(989): Ceres Seq. ID no. 12414145
  misc_feature (1)..(989): Ortholog of  Ceres SEQ ID NO 12634327 as cited in SEQ ID NO 0
aacgaccatgatttggtaaagaaagcacaaagcaggaggaagccggcggtgtaggcgacccatggctccacagacgaggagagagaggttggcgggggaggcgcggccgagctcgtcggggctaacaccggcgaagccgggggcggtcgaggtgcagcgccgacgggcgggcagcggttggacgagccgtcggatctccatctacgcctcccgagtctacttcctcctcatcatgctccagatcccgctcttcagggtcccttgtagagctggcacatgcacaactcctattcaagtaacatcatctcagttggtctcaaatgatatattcccagcagctgttgtgaaggccatgctctaccctggagctaccgtgagcagcctaactaaaagcaagacatttccgagttggaatgacctgtttgacatgtacaacctgacagaagcaaaaaatgcttctgcagtagttgatctccagcgtctagagatacttgccggaagctacttctgtgttgctggagcgctcattggcatcataaatcctgggaggatgactttgtttggtacccttttgattatctggggtatggtgaaagaagcactatttgggaagccagtgaacagtgatctgactcaatcaactcatgtctacccaaccattttgattgcacttatctgtgcattcatgtcgataacttacaacgtaaagaagacagcaacaagtagtactcctgtttctatcgctaagccactgataagttctgccaagtcaaaactgaagtagacttacaagtttaatccttgtaactcttttgaaatatttatttatgtgcaaaaaaacaggtttgaggatgacctgatgatgcttttggtgtatatctgactttcaatactgtaacattcagttttctttattgtattaacaattcgcaaggtcacaccgtctgtaatgtttacaaaaaaaaacagataaatcttggttttctctc

SEQ ID NO: 4129 - protein, 240 aa, Zea mays subsp. mays
  peptide (1)..(240): Ceres Seq. ID no. 12414146
MAPQTRRERLAGEARPSSSGLTPAKPGAVEVQRRRAGSGWTSRRISIYASRVYFLLIMLQIPLFRVPCRAGTCTTPIQVTSSQLVSNDIFPAAVVKAMLYPGATVSSLTKSKTFPSWNDLFDMYNLTEAKNASAVVDLQRLEILAGSYFCVAGALIGIINPGRMTLFGTLLIIWGMVKEALFGKPVNSDLTQSTHVYPTILIALICAFMSITYNVKKTATSSTPVSIAKPLISSAKSKLK

SEQ ID NO: 4130 - protein, 183 aa, Zea mays subsp. mays
  peptide (1)..(183): Ceres Seq. ID no. 12414147
MLQIPLFRVPCRAGTCTTPIQVTSSQLVSNDIFPAAVVKAMLYPGATVSSLTKSKTFPSWNDLFDMYNLTEAKNASAVVDLQRLEILAGSYFCVAGALIGIINPGRMTLFGTLLIIWGMVKEALFGKPVNSDLTQSTHVYPTILIALICAFMSITYNVKKTATSSTPVSIAKPLISSAKSKLK

SEQ ID NO: 4131 - protein, 143 aa, Zea mays subsp. mays
  peptide (1)..(143): Ceres Seq. ID no. 12414148
MLYPGATVSSLTKSKTFPSWNDLFDMYNLTEAKNASAVVDLQRLEILAGSYFCVAGALIGIINPGRMTLFGTLLIIWGMVKEALFGKPVNSDLTQSTHVYPTILIALICAFMSITYNVKKTATSSTPVSIAKPLISSAKSKLK

SEQ ID NO: 4132 - DNA, 993 bp, Zea mays subsp. mays
  misc_feature (1)..(993): Ceres Seq. ID no. 12455252
  misc_feature (1)..(993): Ortholog of  Ceres SEQ ID NO 13623723 as cited in SEQ ID NO 0
  misc_feature (1)..(993): Ortholog of  Ceres SEQ ID NO 15179986 as cited in SEQ ID NO 0
aaaactcatcgccctccccacagccagaaccctagcctcgtcgccatggcctcctccttgctccgctccggccaccgcctctttctccgacgccaccgcctacccgcggcattctccaccgctacggccgaggagctaatcgacgtacgcaagcttcccaccaactacgacccctccaccttcgacccgtcctccccgtcccgcccgctgccgtccgaccgcgtgtggcgcctcgtcgaggatgtctcctccctcaccctcgcggagaccgcggctctctcctctctcctcctccgccgcctcgacataccctccgcaccacccatcgccatcctcaactccgccgcggggctgggcggcgccgccacggccggcgcggcgggggagaaggcgggggcggcggcggcggcggcggccgagaagaccgtcttcgagctgcggctggagggctacgacgctgcgagcaagatcaaggtgatcaaggagatccggtcgttcaccgacctggggctgaaggaggccaaggagctggtggagaaggcgcctgcggtgatcaagggcggcctatccaaggacgaagccaaggcgatcatcgagcggatgaaggcagttggcgccaaggtcgtcatggactgatcagaacaagcctttttcaacggtgaaatcctgcaactgcgaatctatgcttcgtttcagatcaactttaagtgcaaggatggacgggtggattgtggacagttcctgtatgaacttgcggaaatttgatgtggcacagcgctaataggttttcaagcacgttaatcaaatgaacattgatcctgcaatgctatagggtattggcatcaaacgctcgtcattatgttcgaatttgtgacctttcaattgtgggaagttaaaatgacctagttagttattttgttcatcacagggtcttgtttgagactggatgtccatatggatacaataacattttgctcttgtttctgtgaattt

SEQ ID NO: 4133 - protein, 211 aa, Zea mays subsp. mays
  peptide (1)..(211): Ceres Seq. ID no. 12455253
KTHRPPHSQNPSLVAMASSLLRSGHRLFLRRHRLPAAFSTATAEELIDVRKLPTNYDPSTFDPSSPSRPLPSDRVWRLVEDVSSLTLAETAALSSLLLRRLDIPSAPPIAILNSAAGLGGAATAGAAGEKAGAAAAAAAEKTVFELRLEGYDAASKIKVIKEIRSFTDLGLKEAKELVEKAPAVIKGGLSKDEAKAIIERMKAVGAKVVMD

SEQ ID NO: 4134 - protein, 196 aa, Zea mays subsp. mays
  peptide (1)..(196): Ceres Seq. ID no. 12455254
MASSLLRSGHRLFLRRHRLPAAFSTATAEELIDVRKLPTNYDPSTFDPSSPSRPLPSDRVWRLVEDVSSLTLAETAALSSLLLRRLDIPSAPPIAILNSAAGLGGAATAGAAGEKAGAAAAAAAEKTVFELRLEGYDAASKIKVIKEIRSFTDLGLKEAKELVEKAPAVIKGGLSKDEAKAIIERMKAVGAKVVMD

SEQ ID NO: 4135 - DNA, 1753 bp, Zea mays subsp. mays
  misc_feature (1)..(1753): Ceres Seq. ID no. 12405941
  misc_feature (1)..(1753): Ortholog of  Ceres SEQ ID NO 15170151 as cited in SEQ ID NO 53069
  misc_feature (1)..(1753): Ortholog of  Ceres SEQ ID NO 13594209 as cited in SEQ ID NO 59089
  misc_feature (1)..(1753): Ortholog of  Ceres SEQ ID NO 14313084 as cited in SEQ ID NO 59183
  misc_feature (1)..(1753): Ortholog of  Ceres SEQ ID NO 14316039 as cited in SEQ ID NO 62062
  misc_feature (1)..(1753): Ortholog of  Ceres SEQ ID NO 14308041 as cited in SEQ ID NO 62601
  misc_feature (1)..(1753): Ortholog of  Ceres SEQ ID NO 14307995 as cited in SEQ ID NO 63970
  misc_feature (1)..(1753): Ortholog of  Ceres SEQ ID NO 14302228 as cited in SEQ ID NO 65061
  misc_feature (1)..(1753): Ortholog of  Ceres SEQ ID NO 15176783 as cited in SEQ ID NO 65590
  misc_feature (1)..(1753): Ortholog of  Ceres SEQ ID NO 15176091 as cited in SEQ ID NO 65733
  misc_feature (1)..(1753): Ortholog of  Ceres SEQ ID NO 14308007 as cited in SEQ ID NO 65760
  misc_feature (1)..(1753): Ortholog of  Ceres SEQ ID NO 14308027 as cited in SEQ ID NO 65826
  misc_feature (1)..(1753): Ortholog of  Ceres SEQ ID NO 15169585 as cited in SEQ ID NO 66076
  misc_feature (1)..(1753): Ortholog of  Ceres SEQ ID NO 13502874 as cited in SEQ ID NO 66298
  misc_feature (1)..(1753): Ortholog of  Ceres SEQ ID NO 14307944 as cited in SEQ ID NO 66503
  misc_feature (1)..(1753): Ortholog of  Ceres SEQ ID NO 15169631 as cited in SEQ ID NO 67173
  misc_feature (1)..(1753): Ortholog of  Ceres SEQ ID NO 12614124 as cited in SEQ ID NO 68392
  misc_feature (1)..(1753): Ortholog of  Ceres SEQ ID NO 15176087 as cited in SEQ ID NO 68692
  misc_feature (1)..(1753): Ortholog of  Ceres SEQ ID NO 12638136 as cited in SEQ ID NO 0
agcaatagactggtcaccactcacgagagcagaaaacaaacaatgcctccttacctgctcgctgccggcgcgcttatcgtcttcctgtacatcatcaagaaccgcaggagcagaaagctcccgccatccccgccgtcgctaccgctgatcggccaccttcacctcatcggccgcgtcgcgcaccgatccttgctagagctgcaggttcgctatggcggcggcggcggtctcctcttcctgcaactcgggcgcagaccgaccttggtcgtgtccactgcggccgcggccgcggatctgttcaagaaccacgacctcgctttcgcctcccgcccacgcagcgtgggaggggataagctgatgtatgagtgcagcaacgtgtcgttcgcgccttacggcgagaactggcgccggggcaagaagatcgctgtggtccacctcctctctccacggcgcgtggaatcgttcgcgcccgtaagggccgccgaggtagccgcgctcgtcgcacggacacgccgcaccgcggaggctggggaggccgtggagttgagggagctcctgaacggctacgccaacgcggtggccacccgcgcggccaccggtgccgctggggcgacagcagagaagctgaaagagctgatggggaactccgagcccgaggcgctgatggcgggcttccaacccgaagacgtgctgccggacgcaccggcgaggttcgtgagatgggtgacgggcctcaataagaagctcgaagacttggtggagtcgtgggacaagttcctgtccgatatagtggccgcacacaaggagaaggggggtggcgacgcagaggaggatgaggacttcttggatgtcttgcttcggctgcgggaagaaggcgcagatgggctcgagctcacagacgatcgcatcaaagctaccgtcaaggacatgatagcggctgcaactgaaacatcgtcccaaacgctggaatggaccatggccgaactcattgccaacccgcgggtgatgagcaagctccaaggcgagatagcgcgagtcgtcagcgccgatcagacgaccatcgctgaaccggacctgaacaaaatggagtacctgagggcagtgttcaaagaggtgcttcggctccacccaccagcgccgctcctcgtcccgcacgaatcaacaacgcccgcggttgtgcagggctacgagatcccggccaagacggctctcttcgtcaacgtgtgggccatcgggcgggaccctgctgtgtgggacgcaccggacgagttccgcccagagcggttcgtgggcggcagtccctcggtggacttcagaggtactactaccagctcatcccgttcggcgccggccggaggatctgccccggcatcaacttcgcgctgccggtcttggagctcgcgcttgtcagccttctgcaccacttcgaatgggagctccccgccggcgtgggaaaagcggacctcgacgtgggcgaggcgccggggatgacgacgccgcggcggattccgctcgtccttgtccccaagtgcaggacgctcgttcagccagcgctgcagtagcgcgaggaatttcatgtgtctccatgcagtggcggaaccagaaatatttaagagcttgggtaaaaaataatacttatactgtaaatatgtagctttgtctaatttttacctgtgtttaactatattttactacttgttgtatgtgtataagttcactagcaataatggaggagcctatgctcttgcccccg

SEQ ID NO: 4136 - protein, 496 aa, Zea mays subsp. mays
  peptide (1)..(496): Ceres Seq. ID no. 12405942
SNRLVTTHESRKQTMPPYLLAAGALIVFLYIIKNRRSRKLPPSPPSLPLIGHLHLIGRVAHRSLLELQVRYGGGGGLLFLQLGRRPTLVVSTAAAAADLFKNHDLAFASRPRSVGGDKLMYECSNVSFAPYGENWRRGKKIAVVHLLSPRRVESFAPVRAAEVAALVARTRRTAEAGEAVELRELLNGYANAVATRAATGAAGATAEKLKELMGNSEPEALMAGFQPEDVLPDAPARFVRWVTGLNKKLEDLVESWDKFLSDIVAAHKEKGGGDAEEDEDFLDVLLRLREEGADGLELTDDRIKATVKDMIAAATETSSQTLEWTMAELIANPRVMSKLQGEIARVVSADQTTIAEPDLNKMEYLRAVFKEVLRLHPPAPLLVPHESTTPAVVQGYEIPAKTALFVNVWAIGRDPAVWDAPDEFRPERFVGGSPSVDFRGTTTSSSRSAPAGGSAPASTSRCRSWSSRLSAFCTTSNGSSPPAWEKRTSTWARRRG

SEQ ID NO: 4137 - protein, 482 aa, Zea mays subsp. mays
  peptide (1)..(482): Ceres Seq. ID no. 12405943
MPPYLLAAGALIVFLYIIKNRRSRKLPPSPPSLPLIGHLHLIGRVAHRSLLELQVRYGGGGGLLFLQLGRRPTLVVSTAAAAADLFKNHDLAFASRPRSVGGDKLMYECSNVSFAPYGENWRRGKKIAVVHLLSPRRVESFAPVRAAEVAALVARTRRTAEAGEAVELRELLNGYANAVATRAATGAAGATAEKLKELMGNSEPEALMAGFQPEDVLPDAPARFVRWVTGLNKKLEDLVESWDKFLSDIVAAHKEKGGGDAEEDEDFLDVLLRLREEGADGLELTDDRIKATVKDMIAAATETSSQTLEWTMAELIANPRVMSKLQGEIARVVSADQTTIAEPDLNKMEYLRAVFKEVLRLHPPAPLLVPHESTTPAVVQGYEIPAKTALFVNVWAIGRDPAVWDAPDEFRPERFVGGSPSVDFRGTTTSSSRSAPAGGSAPASTSRCRSWSSRLSAFCTTSNGSSPPAWEKRTSTWARRRG

SEQ ID NO: 4138 - protein, 377 aa, Zea mays subsp. mays
  peptide (1)..(377): Ceres Seq. ID no. 12405944
MYECSNVSFAPYGENWRRGKKIAVVHLLSPRRVESFAPVRAAEVAALVARTRRTAEAGEAVELRELLNGYANAVATRAATGAAGATAEKLKELMGNSEPEALMAGFQPEDVLPDAPARFVRWVTGLNKKLEDLVESWDKFLSDIVAAHKEKGGGDAEEDEDFLDVLLRLREEGADGLELTDDRIKATVKDMIAAATETSSQTLEWTMAELIANPRVMSKLQGEIARVVSADQTTIAEPDLNKMEYLRAVFKEVLRLHPPAPLLVPHESTTPAVVQGYEIPAKTALFVNVWAIGRDPAVWDAPDEFRPERFVGGSPSVDFRGTTTSSSRSAPAGGSAPASTSRCRSWSSRLSAFCTTSNGSSPPAWEKRTSTWARRRG

SEQ ID NO: 4139 - DNA, 1657 bp, Zea mays subsp. mays
  misc_feature (1)..(1657): Ceres Seq. ID no. 12356149
  misc_feature (1)..(1657): Ortholog of  Ceres SEQ ID NO 13595414 as cited in SEQ ID NO 56539
  misc_feature (1)..(1657): Ortholog of  Ceres SEQ ID NO 14314396 as cited in SEQ ID NO 60048
aattaattactttccccccaaaaaaaagccccccaccgcctcgacctcgattcctccgcccccatcgccgtcgtctcctcctccgcctccctgtctgtccgctccgcacctcccctaaaaaacccccccggccattgccgcaccgagctccccttcctcaaatgccccaggcccggacgcctcgacgcccagctccgtgctcgcatggctagcggcgtcctccatcgctccgcctccctatgtctccgcccggccgccggctcctccgccgactccggccggggccacggcgcggttatgatcggtgattcgaggacgcgcgttgctgctctgcggctgggaggatctagccggagagagttattatctgtcacaatggcctccagagatcacactggcttgacccgacaacttcttgattttcaacatgatacaatagatgaggtaggcgcaggacatgacccattcattgatttgaaagcgagattcatggactttaaacagagaaactatgtggaaaaattttcaaattaccaaacccttgctgagcagcaaacaccaaagttcatggtggttgcttgtgctgactccagggtctgccctaccgctgttttggggtttcagcctggggaagcatttacagttcgtaatgtggcaaatttggtaccaccatatgagcatggggggacagagactagtgcagcactagagtttgctgtcaataccctccaggtagaaaatgtactggtgataggccacagtaggtgtgggggcatccaggcactaatgagcatgaaagatgattcgacctccggaagcttcattaaaaactgggtttcaattgggaagagcgcaaggttaagcacgaaagctgcagctggaaatatgagttttgacatacagtgcaaacattgtgaaaaggaatcaataaatagttctctgttgaacttgttaacatacccattgattgagaagagggtgaatgaaggcactttgaatcttcatggaggctactacaacttcgtcgattgcacatttgagaaatggacattgttgtaccgtgaagggttggaaggtggaagcaagtatgccataaagaaccggtccacctggtgttgaccaacgaaggtcgtgtttacttgggtaaatttcactctgccccccgctgttcagcatggtttcgctttgccactacgttgtccatttcccattgcacctttgctccattgtggcatcgatgttctccgggtcccggtatcaaataactgtggcaaggctgttggcatgccagcttgaactgcgtgttgtagtgtcgcatacacatgcgcaggcacgtctgcatcgtagcagttatttgatacaggaactttttgatactgtagaagcacaataccacaatggagtgaggtgcaacgcgcgatggacaatatggttgcaaggtgaaagtctgtggaactgccgggggcaaagtgaattttatccaactatctgtaatatgtgtgctgttttccggttgaaactattaagaaaaaaataggaataagctgcaggatcggtcgtaatgcgtgtaattgtcgccacatttggcattaccttgctattgtaacatttgtaccatttgttgtatcattataactgagatatatacggtctcgcc

SEQ ID NO: 4140 - protein, 304 aa, Zea mays subsp. mays
  peptide (1)..(304): Ceres Seq. ID no. 12356150
MASGVLHRSASLCLRPAAGSSADSGRGHGAVMIGDSRTRVAALRLGGSSRRELLSVTMASRDHTGLTRQLLDFQHDTIDEVGAGHDPFIDLKARFMDFKQRNYVEKFSNYQTLAEQQTPKFMVVACADSRVCPTAVLGFQPGEAFTVRNVANLVPPYEHGGTETSAALEFAVNTLQVENVLVIGHSRCGGIQALMSMKDDSTSGSFIKNWVSIGKSARLSTKAAAGNMSFDIQCKHCEKESINSSLLNLLTYPLIEKRVNEGTLNLHGGYYNFVDCTFEKWTLLYREGLEGGSKYAIKNRSTWC

SEQ ID NO: 4141 - protein, 273 aa, Zea mays subsp. mays
  peptide (1)..(273): Ceres Seq. ID no. 12356151
MIGDSRTRVAALRLGGSSRRELLSVTMASRDHTGLTRQLLDFQHDTIDEVGAGHDPFIDLKARFMDFKQRNYVEKFSNYQTLAEQQTPKFMVVACADSRVCPTAVLGFQPGEAFTVRNVANLVPPYEHGGTETSAALEFAVNTLQVENVLVIGHSRCGGIQALMSMKDDSTSGSFIKNWVSIGKSARLSTKAAAGNMSFDIQCKHCEKESINSSLLNLLTYPLIEKRVNEGTLNLHGGYYNFVDCTFEKWTLLYREGLEGGSKYAIKNRSTWC

SEQ ID NO: 4142 - protein, 247 aa, Zea mays subsp. mays
  peptide (1)..(247): Ceres Seq. ID no. 12356152
MASRDHTGLTRQLLDFQHDTIDEVGAGHDPFIDLKARFMDFKQRNYVEKFSNYQTLAEQQTPKFMVVACADSRVCPTAVLGFQPGEAFTVRNVANLVPPYEHGGTETSAALEFAVNTLQVENVLVIGHSRCGGIQALMSMKDDSTSGSFIKNWVSIGKSARLSTKAAAGNMSFDIQCKHCEKESINSSLLNLLTYPLIEKRVNEGTLNLHGGYYNFVDCTFEKWTLLYREGLEGGSKYAIKNRSTWC

SEQ ID NO: 4143 - DNA, 1271 bp, Zea mays subsp. mays
  misc_feature (1)..(1271): Ceres Seq. ID no. 12414141
  misc_feature (1)..(1271): Ortholog of  Ceres SEQ ID NO 13597931 as cited in SEQ ID NO 64485
aaaacttcctccccaaacaaccggcggcggcgcgagggcttcgctttgctgccatggctctcgtcgccggctcctacgagcgcttcatctggggcttctcactcaaaaccctgacaaccccctccgccaccggcgcctcgccctccgagaccctgaccctcgcgccgctcttctcgtacccggcccacacgggcccggtgcgctgcgtggccgcggcgccgcgggcggggctggtggcctccggcggcgcggacaactccgtccgcctctacgacctcccttccgccgcggacctcggcccgctcctggacccctcggccgccgtctccgcactcgccttctactcccggggccccgtgccgcggaacctcctggccgcctgcgacgacggctcgctccacatctacgacgccgacggcttcgcgctgctctccacgctccgcgccttcccgcgccacgaggccgccgaggcgctcgccgtgcacccgtcgggccgggtcgcgctcgccgtcggccgcgcgggggcgcttgccatgctcaacctcgtccgcggccgacgcagcttcgcatgccgcctcgagcaccctgcgtccgcgatcgcctacgctgaggacagggatggcggggaccgattcgtgatggctgccgagaacaaggtcagcgtgcacgactccgtggatgccagggttattcatgatatggactgtggcaagaaggtgctcgccatggcgcccgcaaagagtggggtcctttacactggtggcgaggaccgttgtattactgcatgggatctgtccagcggcaaggtctcctcacgcattgagggtgcccatgcaactcgtgtaaaaggggttgttgtttttggtaatagcaatgatggatcacagctctccaatctaatttcttctgcttcgtccgatggtgtcataaggatatgggacattcgaacaatcgggaacggaaagcctactccattagcagaggctaatacaaaagcaaggctaacttgtcttgctggaacgtcactgaaatgactcaaggaacctacagtttgctaggcgtctgattctgcattgttagctgaattagaaaacctggacatgaaagaagaaattgaaggtgaaagatctggcacgcgagcattatctgtgtgcgtttggaacgtatccatccattatgtacaccgacatagttttggcttagtgtctgagctgcataacttatttatatttgattgcgcgacaagttttgcaatgagaaccgttttcagt

SEQ ID NO: 4144 - protein, 343 aa, Zea mays subsp. mays
  peptide (1)..(343): Ceres Seq. ID no. 12414142
NFLPKQPAAARGLRFAAMALVAGSYERFIWGFSLKTLTTPSATGASPSETLTLAPLFSYPAHTGPVRCVAAAPRAGLVASGGADNSVRLYDLPSAADLGPLLDPSAAVSALAFYSRGPVPRNLLAACDDGSLHIYDADGFALLSTLRAFPRHEAAEALAVHPSGRVALAVGRAGALAMLNLVRGRRSFACRLEHPASAIAYAEDRDGGDRFVMAAENKVSVHDSVDARVIHDMDCGKKVLAMAPAKSGVLYTGGEDRCITAWDLSSGKVSSRIEGAHATRVKGVVVFGNSNDGSQLSNLISSASSDGVIRIWDIRTIGNGKPTPLAEANTKARLTCLAGTSLK

SEQ ID NO: 4145 - protein, 326 aa, Zea mays subsp. mays
  peptide (1)..(326): Ceres Seq. ID no. 12414143
MALVAGSYERFIWGFSLKTLTTPSATGASPSETLTLAPLFSYPAHTGPVRCVAAAPRAGLVASGGADNSVRLYDLPSAADLGPLLDPSAAVSALAFYSRGPVPRNLLAACDDGSLHIYDADGFALLSTLRAFPRHEAAEALAVHPSGRVALAVGRAGALAMLNLVRGRRSFACRLEHPASAIAYAEDRDGGDRFVMAAENKVSVHDSVDARVIHDMDCGKKVLAMAPAKSGVLYTGGEDRCITAWDLSSGKVSSRIEGAHATRVKGVVVFGNSNDGSQLSNLISSASSDGVIRIWDIRTIGNGKPTPLAEANTKARLTCLAGTSLK

SEQ ID NO: 4146 - protein, 202 aa, Zea mays subsp. mays
  peptide (1)..(202): Ceres Seq. ID no. 12414144
KLPPQTTGGGARASLCCHGSRRRLLRALHLGLLTQNPDNPLRHRRLALRDPDPRAALLVPGPHGPGALRGRGAAGGAGGLRRRGQLRPPLRPPFRRGPRPAPGPLGRRLRTRLLLPGPRAAEPPGRLRRRLAPHLRRRRLRAALHAPRLPAPRGRRGARRAPVGPGRARRRPRGGACHAQPRPRPTQLRMPPRAPCVRDRLR

SEQ ID NO: 4147 - DNA, 1404 bp, Zea mays subsp. mays
  misc_feature (1)..(1404): Ceres Seq. ID no. 12405937
  misc_feature (1)..(1404): Ortholog of  Ceres SEQ ID NO 15224520 as cited in SEQ ID NO 58188
  misc_feature (1)..(1404): Ortholog of  Ceres SEQ ID NO 12777206 as cited in SEQ ID NO 60246
acctttcgccgattccaccggccaccgtgccttcctccaccaccagccgcggcacacccgcggaaccgccgctcgagctcgcgcctgaaccccccaaactctgccaaatttcgccaaatccagccggtcggaccccgcaacacatcgccaaaaccaaccgggccggccgacacaagccgcagcccgtggcgatggacctggcgtcgagcgaccttgcggcgctgggcgcggcggagctggtccgcgtctcggcgtcgatcccgcgcgcggctccccgcaccttcgcgctgctcaccgcctgctctcgtcttcccgctctccttcgccgtgctcgcgcactccctcttcacccaccccatcctgctccgcatccagcgcgccacccactccgagctagcgcagtggctcaggctcttcgcctaccagttcctctacctcatcgtcctcttcaccttctccctcctctccaccgccgccgccgtcttcaccgtcgcctccctctacgccaacaagcccgcgtccatctcctcctcgctcaccgcgctgccccccatcctgccccgcctcctccgcaccttcctctgggtctcccttctcatgctcgcctaccacctcgtcttcgcgctcaccgtcctcctgctcatcgtcgtcttcatccccaacgcgtccgagtccgagtccgcgccgccctccctcgccttcgtactcttcctcgtcgtcgtcgtcttcgtcttcctcgggatccacgtctacatctccgcgctgtggcacctcgccagcgtcatctccgtgctcgagccgctctgcggactcgccgccatggccaagagcaaggatctgctccagggccgcaccggcaccgcagccacgcttgtcgtctcctacttcgcggtctgcggcgtcacctccgtgctgttccgtgccgccgtcgttaaggggcgcgccgaggaggggagcttcggtctggccttgcccgggcggctgcttgtcggcgccgtgctgctgtgcgttcttgtctgtgtcaatttgctgggactgctcgtgcagagcgtcttctactacgcctgcaaggccttccacaaccagcagattgaccggactgcgttgtatgagcaccttggagggtaccttggggagtacgtgccactcaagagcaatatccagatggagaacctttgagattggagcataggacaagggtaagttactcacctcattgcttcatactagcagtttcatgtggatctttatcagaatatgagtatggcttacaaggggctatctggtcttgttgattctagtaccatgtagtagtttataatctgtataagtggtaatgcacagtatggaaccaatctgtggaatggaagtatggaacagagatgcatgaacaaggttgccttt

SEQ ID NO: 4148 - protein, 392 aa, Zea mays subsp. mays
  peptide (1)..(392): Ceres Seq. ID no. 12405938
TFRRFHRPPCLPPPPAAAHPRNRRSSSRLNPPNSAKFRQIQPVGPRNTSPKPTGPADTSRSPWRWTWRRATLRRWARRSWSASRRRSRARLPAPSRCSPPALVFPLSFAVLAHSLFTHPILLRIQRATHSELAQWLRLFAYQFLYLIVLFTFSLLSTAAAVFTVASLYANKPASISSSLTALPPILPRLLRTFLWVSLLMLAYHLVFALTVLLLIVVFIPNASESESAPPSLAFVLFLVVVVFVFLGIHVYISALWHLASVISVLEPLCGLAAMAKSKDLLQGRTGTAATLVVSYFAVCGVTSVLFRAAVVKGRAEEGSFGLALPGRLLVGAVLLCVLVCVNLLGLLVQSVFYYACKAFHNQQIDRTALYEHLGGYLGEYVPLKSNIQMENL

SEQ ID NO: 4149 - protein, 310 aa, Zea mays subsp. mays
  peptide (1)..(310): Ceres Seq. ID no. 12405939
LSPIPPATVPSSTTSRGTPAEPPLELAPEPPKLCQISPNPAGRTPQHIAKTNRAGRHKPQPVAMDLASSDLAALGAAELVRVSASIPRAAPRTFALLTACSRLPALLRRARALPLHPPHPAPHPARHPLRASAVAQALRLPVPLPHRPLHLLPPLHRRRRLHRRLPLRQQARVHLLLAHRAAPHPAPPPPHLPLGLPSHARLPPRLRAHRPPAHRRLHPQRVRVRVRAALPRLRTLPRRRRLRLPRDPRLHLRAVAPRQRHLRARAALRTRRHGQEQGSAPGPHRHRSHACRLLLRGLRRHLRAVPCRRR

SEQ ID NO: 4150 - protein, 247 aa, Zea mays subsp. mays
  peptide (1)..(247): Ceres Seq. ID no. 12405940
MDLASSDLAALGAAELVRVSASIPRAAPRTFALLTACSRLPALLRRARALPLHPPHPAPHPARHPLRASAVAQALRLPVPLPHRPLHLLPPLHRRRRLHRRLPLRQQARVHLLLAHRAAPHPAPPPPHLPLGLPSHARLPPRLRAHRPPAHRRLHPQRVRVRVRAALPRLRTLPRRRRLRLPRDPRLHLRAVAPRQRHLRARAALRTRRHGQEQGSAPGPHRHRSHACRLLLRGLRRHLRAVPCRRR

SEQ ID NO: 4151 - DNA, 1016 bp, Zea mays subsp. mays
  misc_feature (1)..(1016): Ceres Seq. ID no. 13501199
  misc_feature (1)..(1016): Ortholog of  Ceres SEQ ID NO 14312228 as cited in SEQ ID NO 59237
cataggttgctaggctcggccgtgtagagcagcaagagcacgccgcgccaagcaacaaagagggaccccgcttccatggaggtggtgggcggcgtgtcgctgaggccgtcgccagcgccggcgcgtatccggactaccctgccacccgtcgacgtaggcggacgcttccttctccgccgggtcgcggggcgccagccggcgaggcgcgcgctggtcgtggaggcccggggcggcaggggctggtcggagcggcagatgcagcagcagcgccgcgcgccgctgctgccgaaaatcgaggacgacggcaacccgcgattcgtcatcttcatccgcaccgccaatgtctacttctggtacccgctcaacatcatcacgggcggtacgacggcgaagatcatgctcgccgccaaggacaacttcctcggcaagtacatctacaaggacacgctcgccaggaacctcgccgccgtcatttacaaagacgaggacgtgatcatagacacagcgaaagagcagtaccgtgtgctcaagaccgaaaatcagtttcggtatggctacaaagttgtggagaaagggaacataaggtctgctctgacgacaagcaatgtgatcgaacttccaaagaaggacgagctcaaaaccgtggttgacaaggtgaaggacttctttggcgacgtgactgccggcgccaaagaatcctttgcgcagataacagggtctgctgtcagcaaggaggaagaggaagcagagagcaaagagaagttccgctccaagagacgaaagaagcagcggaagtcgaaggagggcctcaagacggagaaatgattcagtcagtcacacaagtaaagcaccggctgtagtttcgctatcgatgtccgagaactgttctgtaatttctccagcttccttttttttgtttgttttgtaaaaagacgtcgtgtaacttcattgcgactaacgtgtgctatgccttctcagtaaatctcacaaaatgtgaaggtactccctacgttctc

SEQ ID NO: 4152 - protein, 249 aa, Zea mays subsp. mays
  peptide (1)..(249): Ceres Seq. ID no. 13501200
MEVVGGVSLRPSPAPARIRTTLPPVDVGGRFLLRRVAGRQPARRALVVEARGGRGWSERQMQQQRRAPLLPKIEDDGNPRFVIFIRTANVYFWYPLNIITGGTTAKIMLAAKDNFLGKYIYKDTLARNLAAVIYKDEDVIIDTAKEQYRVLKTENQFRYGYKVVEKGNIRSALTTSNVIELPKKDELKTVVDKVKDFFGDVTAGAKESFAQITGSAVSKEEEEAESKEKFRSKRRKKQRKSKEGLKTEK

SEQ ID NO: 4153 - protein, 189 aa, Zea mays subsp. mays
  peptide (1)..(189): Ceres Seq. ID no. 13501201
MQQQRRAPLLPKIEDDGNPRFVIFIRTANVYFWYPLNIITGGTTAKIMLAAKDNFLGKYIYKDTLARNLAAVIYKDEDVIIDTAKEQYRVLKTENQFRYGYKVVEKGNIRSALTTSNVIELPKKDELKTVVDKVKDFFGDVTAGAKESFAQITGSAVSKEEEEAESKEKFRSKRRKKQRKSKEGLKTEK

SEQ ID NO: 4154 - protein, 142 aa, Zea mays subsp. mays
  peptide (1)..(142): Ceres Seq. ID no. 13501202
MLAAKDNFLGKYIYKDTLARNLAAVIYKDEDVIIDTAKEQYRVLKTENQFRYGYKVVEKGNIRSALTTSNVIELPKKDELKTVVDKVKDFFGDVTAGAKESFAQITGSAVSKEEEEAESKEKFRSKRRKKQRKSKEGLKTEK

SEQ ID NO: 4155 - DNA, 1521 bp, Zea mays subsp. mays
  misc_feature (1)..(1521): Ceres Seq. ID no. 13495297
  misc_feature (1)..(1521): Ortholog of  Ceres SEQ ID NO 12617253 as cited in SEQ ID NO 64065
acggaagaagcgttttgccagtccatccacccaagcgaggcgaccgaggctggcctcttcgcctatcacccgaaacaagattagattagagatagcaaaaggcgaagcgacgggtaaccgccaccaccaaatcgctaccgccaatccgccatgatgctcccgacggccaccgcgacggccgtcttcctcaccgcggcgccttcctctttctccacccgccgtcggcgcagtcgcgccatcttcgcatccctttcgccgtccttctcctcctcggaggagccgctgctggtgcgcgcggcgcggggcgaggacggcctcccacgcccgcccgcgtggatgatgcggcaggcagggcggtacatggcggagtaccaggcgctggccaagcgccacccctcgttccgggagcgctccgagaacacggacctcatcgtcgagatcacgctgcagccgtggcgtgccttcgcgcccgacggcgtcatcctgttctcggacatactcacgcccctgccggccatcggggtgccgttcgatatctcggactccaaggggcccgtgatccaatcgccagtacggtccaaagagcaggtgagggagctcgtccccatcgaccttgatatgctccagttcgtcggggagtcactaaagattctgcgaaatgagattgatggaaaagctgctttgctaggatttgtgggggccccatggacaattgcaacttacattgttgaaggggggatgaccaatacgtacacaaatataaagagcatgtgccatacagctccagatgtcttgaagggtcttctctctcaccttgcacaggccatatctgactatatcatttaccaagttaactcgggggcccagtgtatacagatatttgattcatggggtggacagcttccacctcatgtgtgggagcagtggtcaaaaccatatatcaaacagattgtgagtaggattaagaaagagtgccctaatgtaccccttgtgttgtatataaatggaaatggaggtttacttgagcgcatgaagaacacaggagctgatgttattgggcttgactggacagtggacatgactgatggaaggaggcgccttggtaatggcattagtgtacaagggaatgtggatccagcatttttgttctcaccattaccagtactgactgatgaaattcatagggttgtgaaagcagctggtccaaaaggtcatatacttaatctgggctgtacttcagaaaacacccgaagaagctgtagcacatttctttgatgtcacaaggcgcttgagatatgacacccttttccaaggttctgttgctgaagaattgcatcacgttgcttgacaacggcaatgacattcccatttttcatcaagtggtgtatttgatctgtcatatcatcttagagtcgtagtagattcctagtgttgcctgcattctacctttcaagagagactcattttcttaagcctgtatatgtattgcagagataccggcggcaaatctagtgcaatttt

SEQ ID NO: 4156 - protein, 374 aa, Zea mays subsp. mays
  peptide (1)..(374): Ceres Seq. ID no. 13495298
MMLPTATATAVFLTAAPSSFSTRRRRSRAIFASLSPSFSSSEEPLLVRAARGEDGLPRPPAWMMRQAGRYMAEYQALAKRHPSFRERSENTDLIVEITLQPWRAFAPDGVILFSDILTPLPAIGVPFDISDSKGPVIQSPVRSKEQVRELVPIDLDMLQFVGESLKILRNEIDGKAALLGFVGAPWTIATYIVEGGMTNTYTNIKSMCHTAPDVLKGLLSHLAQAISDYIIYQVNSGAQCIQIFDSWGGQLPPHVWEQWSKPYIKQIVSRIKKECPNVPLVLYINGNGGLLERMKNTGADVIGLDWTVDMTDGRRRLGNGISVQGNVDPAFLFSPLPVLTDEIHRVVKAAGPKGHILNLGCTSENTRRSCSTFL

SEQ ID NO: 4157 - protein, 373 aa, Zea mays subsp. mays
  peptide (1)..(373): Ceres Seq. ID no. 13495299
MLPTATATAVFLTAAPSSFSTRRRRSRAIFASLSPSFSSSEEPLLVRAARGEDGLPRPPAWMMRQAGRYMAEYQALAKRHPSFRERSENTDLIVEITLQPWRAFAPDGVILFSDILTPLPAIGVPFDISDSKGPVIQSPVRSKEQVRELVPIDLDMLQFVGESLKILRNEIDGKAALLGFVGAPWTIATYIVEGGMTNTYTNIKSMCHTAPDVLKGLLSHLAQAISDYIIYQVNSGAQCIQIFDSWGGQLPPHVWEQWSKPYIKQIVSRIKKECPNVPLVLYINGNGGLLERMKNTGADVIGLDWTVDMTDGRRRLGNGISVQGNVDPAFLFSPLPVLTDEIHRVVKAAGPKGHILNLGCTSENTRRSCSTFL

SEQ ID NO: 4158 - protein, 312 aa, Zea mays subsp. mays
  peptide (1)..(312): Ceres Seq. ID no. 13495300
MMRQAGRYMAEYQALAKRHPSFRERSENTDLIVEITLQPWRAFAPDGVILFSDILTPLPAIGVPFDISDSKGPVIQSPVRSKEQVRELVPIDLDMLQFVGESLKILRNEIDGKAALLGFVGAPWTIATYIVEGGMTNTYTNIKSMCHTAPDVLKGLLSHLAQAISDYIIYQVNSGAQCIQIFDSWGGQLPPHVWEQWSKPYIKQIVSRIKKECPNVPLVLYINGNGGLLERMKNTGADVIGLDWTVDMTDGRRRLGNGISVQGNVDPAFLFSPLPVLTDEIHRVVKAAGPKGHILNLGCTSENTRRSCSTFL

SEQ ID NO: 4159 - DNA, 655 bp, Zea mays subsp. mays
  misc_feature (1)..(655): Ceres Seq. ID no. 12404480
  misc_feature (1)..(655): Ortholog of  Ceres SEQ ID NO 13596030 as cited in SEQ ID NO 62043
acatcctaatcgaaaactcgatgtagtggattcagtttgtgcaaaaaatggaggaaaaccattttcagatcaaatgttcactagcatcaaggaggtgcatgatagagaaaaagaggtgcatacctcgggatattcagatgagcagatatctgaattgaaaaaggagattcatagaactagggatgaacagcttgcgcacataaccaacatggtcgaggaaaagttaaactgcactgtggagaagttgcaacagcagctcatggaagaacagaacgcaaggctggaagctgagaaggtggcgtacgaagctaggctgaaatcagaagcggagatccagaagctcaaggagagcctcaaagctcaaatggaaaatgatgagttccggaggatggcgcagagccagggcagtaaatgtgctatcctataggcattagtacttgctagaaattggtggagctatcgtgctgacgcgtctcttgtacgtagtactttctctgttccaaaaatatatagttcaatacaccttagtagagatgactacgagagtatccaaacaagacctcgtcggacatgttagcctgaagcttgcttatggacatattggatatagtttttgggtgagaacttttgaacaacttccttgtttttttctctc

SEQ ID NO: 4160 - protein, 141 aa, Zea mays subsp. mays
  peptide (1)..(141): Ceres Seq. ID no. 12404481
HPNRKLDVVDSVCAKNGGKPFSDQMFTSIKEVHDREKEVHTSGYSDEQISELKKEIHRTRDEQLAHITNMVEEKLNCTVEKLQQQLMEEQNARLEAEKVAYEARLKSEAEIQKLKESLKAQMENDEFRRMAQSQGSKCAIL

SEQ ID NO: 4161 - protein, 117 aa, Zea mays subsp. mays
  peptide (1)..(117): Ceres Seq. ID no. 12404482
MFTSIKEVHDREKEVHTSGYSDEQISELKKEIHRTRDEQLAHITNMVEEKLNCTVEKLQQQLMEEQNARLEAEKVAYEARLKSEAEIQKLKESLKAQMENDEFRRMAQSQGSKCAIL

SEQ ID NO: 4162 - protein, 72 aa, Zea mays subsp. mays
  peptide (1)..(72): Ceres Seq. ID no. 12404483
MVEEKLNCTVEKLQQQLMEEQNARLEAEKVAYEARLKSEAEIQKLKESLKAQMENDEFRRMAQSQGSKCAIL

SEQ ID NO: 4163 - DNA, 684 bp, Zea mays subsp. mays
  misc_feature (1)..(684): Ceres Seq. ID no. 12345970
  misc_feature (1)..(684): Ortholog of  Ceres SEQ ID NO 13662587 as cited in SEQ ID NO 63275
  misc_feature (1)..(684): Ortholog of  Ceres SEQ ID NO 13599500 as cited in SEQ ID NO 0
attggacggatcgagctggtactggcacactcgatccaatattttagctagctagcaagcaaagcaagccttgagcttgagcggcggctagcgcaatgggaggcgtggcgtcggagctggtaggagccagcagggagaggcagagcaggaagaggaagcagttccacacggtggagctcaagatcaggatggactgcgacggctgcgagctcaaggtcaggaacacccttgcccgcatgagaggggtggagtcggtggagatcaaccggaagcagcagaaggtgacggtgaaggggttcgtggaggcgcagcgggtgcttaggcgcacccagtccacggggaagcgcgtcgagctgtggccctacgtgccctacaccaacctctacgtcgcgccgccggtgtacgacaagagggcgccgccgggccacgtccgcagggtcgacgcactcatcgcgcccgccgccggccaggaagagcacctcgccacgctcttcagcgacgataaccccaacgcctgctcccttatgtgatgcctcatgctagctagagccgcctgctccccggccttatgcgatgctagctgcttgcttcatccacgctgtactagcgatgtacatgcattgtttgcatgaaaacgaactgatgctccgtagttacgcagtaatataataatctctatctttt

SEQ ID NO: 4164 - protein, 144 aa, Zea mays subsp. mays
  peptide (1)..(144): Ceres Seq. ID no. 12345971
MGGVASELVGASRERQSRKRKQFHTVELKIRMDCDGCELKVRNTLARMRGVESVEINRKQQKVTVKGFVEAQRVLRRTQSTGKRVELWPYVPYTNLYVAPPVYDKRAPPGHVRRVDALIAPAAGQEEHLATLFSDDNPNACSLM

SEQ ID NO: 4165 - protein, 113 aa, Zea mays subsp. mays
  peptide (1)..(113): Ceres Seq. ID no. 12345972
MDCDGCELKVRNTLARMRGVESVEINRKQQKVTVKGFVEAQRVLRRTQSTGKRVELWPYVPYTNLYVAPPVYDKRAPPGHVRRVDALIAPAAGQEEHLATLFSDDNPNACSLM

SEQ ID NO: 4166 - protein, 97 aa, Zea mays subsp. mays
  peptide (1)..(97): Ceres Seq. ID no. 12345973
MRGVESVEINRKQQKVTVKGFVEAQRVLRRTQSTGKRVELWPYVPYTNLYVAPPVYDKRAPPGHVRRVDALIAPAAGQEEHLATLFSDDNPNACSLM

SEQ ID NO: 4167 - DNA, 1198 bp, Zea mays subsp. mays
  misc_feature (1)..(1198): Ceres Seq. ID no. 12349951
  misc_feature (1)..(1198): Ortholog of  Ceres SEQ ID NO 13662489 as cited in SEQ ID NO 62586
  misc_feature (1)..(1198): Ortholog of  Ceres SEQ ID NO 13597061 as cited in SEQ ID NO 69012
actctaggctaaacttcactgacgctacggaaggggtctcgaagagctgccaagacccacctgccacctccgatggacttcgccggccgggtatccttcctgctcttcttcctggtcgctggcactgtagcaaacgaccagatcttcaccacttcaggtttgccatttgggcgaagttcgcgtgagccaaggtaccgcgtcgagttccatcctgttgattcgccattccatccagataatggtcaggaatcggtaccaatggctagtcatgaggggaagcgttataagtgctttctaccagttgaagaaactaaaaccatgaagtcaatgctcccacaaaatgcgactaatattataatagaaagtgaaaggcgaattaagccaaaggagccggatgagttacttgaggttctcaaggatcagtgtttctacaggcacgaaggttggtggtcgtatgaattctgttattatgggaaaatcagacaggtccatgtagaggacagtaaggttatccaagaatttgttctaggcgaattcgatgatgacgcaactgctgcataccatgaaaatagcacctctgagttaactgacgatgaccatcacgtgaaagatatatctaagaggtatcatgttcacttgtatacaaatgggactgtatgtgatctcacagatattccccgggagacagaggttagatttgtctgctcggagcctactgtgctgattagttcagtcaaggagatctcttcctgcaaatatgttgtaacaattcaaagcccgatgctttgcaaaaacccgttgttccagcaagaaaaacgaacccttcccatccattgcaatgaattacctgctaaagcagaatccggtgctgaggatggtttgcttccaaaagaagcgcagatttccatcatccccgatcaggatgagctgcatggttttccagcttatgctacttgatataatgatatgccttcaatatttatttctggtgtagaaaaagcacagttttggaggcccagtggcaactgagcaacgcgatgtattactctctccgttcttttttatttgccgtggtttagtttaaaaattacgacaaatattggagaacggacccatagatcctacagcagcggctccttgtaaagcaggttgagacgatcattctgcagtgctaattatttaggaggattacgaaggt

SEQ ID NO: 4168 - protein, 294 aa, Zea mays subsp. mays
  peptide (1)..(294): Ceres Seq. ID no. 12349952
MDFAGRVSFLLFFLVAGTVANDQIFTTSGLPFGRSSREPRYRVEFHPVDSPFHPDNGQESVPMASHEGKRYKCFLPVEETKTMKSMLPQNATNIIIESERRIKPKEPDELLEVLKDQCFYRHEGWWSYEFCYYGKIRQVHVEDSKVIQEFVLGEFDDDATAAYHENSTSELTDDDHHVKDISKRYHVHLYTNGTVCDLTDIPRETEVRFVCSEPTVLISSVKEISSCKYVVTIQSPMLCKNPLFQQEKRTLPIHCNELPAKAESGAEDGLLPKEAQISIIPDQDELHGFPAYAT

SEQ ID NO: 4169 - protein, 232 aa, Zea mays subsp. mays
  peptide (1)..(232): Ceres Seq. ID no. 12349953
MASHEGKRYKCFLPVEETKTMKSMLPQNATNIIIESERRIKPKEPDELLEVLKDQCFYRHEGWWSYEFCYYGKIRQVHVEDSKVIQEFVLGEFDDDATAAYHENSTSELTDDDHHVKDISKRYHVHLYTNGTVCDLTDIPRETEVRFVCSEPTVLISSVKEISSCKYVVTIQSPMLCKNPLFQQEKRTLPIHCNELPAKAESGAEDGLLPKEAQISIIPDQDELHGFPAYAT

SEQ ID NO: 4170 - protein, 212 aa, Zea mays subsp. mays
  peptide (1)..(212): Ceres Seq. ID no. 12349954
MKSMLPQNATNIIIESERRIKPKEPDELLEVLKDQCFYRHEGWWSYEFCYYGKIRQVHVEDSKVIQEFVLGEFDDDATAAYHENSTSELTDDDHHVKDISKRYHVHLYTNGTVCDLTDIPRETEVRFVCSEPTVLISSVKEISSCKYVVTIQSPMLCKNPLFQQEKRTLPIHCNELPAKAESGAEDGLLPKEAQISIIPDQDELHGFPAYAT

SEQ ID NO: 4171 - DNA, 1041 bp, Zea mays subsp. mays
  misc_feature (1)..(1041): Ceres Seq. ID no. 12340753
  misc_feature (1)..(1041): Ortholog of  Ceres SEQ ID NO 12614309 as cited in SEQ ID NO 68804
agtggctgcacctcggtcccagctgtcagcgaacggcaacgaggcaaacacatgacgcctctcttctcttccgtgtagatctcgcttagaattcgtgtaccagaaaccccggccctaaccgcgcccgcaccctcgcccttggctcgccggagattaacgctacagccgtaatcacgtaaattccttttcatggagggtgtgggcgcgcggctagggcgcacttcggcgcgctacgggccggcgacgacgttcacgggccatgtcaggaagtggcgcaaggagtgggtaccagtggtcgccgccgccgccgccgccgccgccaacgccaacaccagcgccaacggtggcacgacgtcctccacggggatgggatctggcggaggatcccgcgggaataatcttctcctgtttaagtggaccccggtgaacggggctaacgggggaggaggggatggggagcagcagcagcaggctgagacggccacgagacgccggcggtatgtgccggtttctttaatggaagagcaaaggcaagaatctaccaaatctgatgatgagaacaaggctaatgatggagatccatcttcgaatgaaactgagccatcaaatggaaagactgatatcaatgatacacctatggatgaatctcaggcaacagatgaggatggtcgagattctggtaaaaacggcggtggaacagacctaaatttgaatttaggtttgaaagacccggatggtgataatgaagttgagacatcagagaaacatgtagcggcaaacaatccgcagacagagaatagatccaagaggaaatccgtaacccctgaccttgagatgacaatgtaacccagaaatttcatttgtcttaattttactatttgccatgagcccatgaggtgtgtaacttgggtacgttctcatcgtagaaacatttaagtaaaatcgattacaggacatacaatagtgtgaactgaagaaacctttttttactcgaacatggagaattgtctaaagtcattgtcaaatataatttaattttcc

SEQ ID NO: 4172 - protein, 218 aa, Zea mays subsp. mays
  peptide (1)..(218): Ceres Seq. ID no. 12340754
MEGVGARLGRTSARYGPATTFTGHVRKWRKEWVPVVAAAAAAAANANTSANGGTTSSTGMGSGGGSRGNNLLLFKWTPVNGANGGGGDGEQQQQAETATRRRRYVPVSLMEEQRQESTKSDDENKANDGDPSSNETEPSNGKTDINDTPMDESQATDEDGRDSGKNGGGTDLNLNLGLKDPDGDNEVETSEKHVAANNPQTENRSKRKSVTPDLEMTM

SEQ ID NO: 4173 - protein, 159 aa, Zea mays subsp. mays
  peptide (1)..(159): Ceres Seq. ID no. 12340755
MGSGGGSRGNNLLLFKWTPVNGANGGGGDGEQQQQAETATRRRRYVPVSLMEEQRQESTKSDDENKANDGDPSSNETEPSNGKTDINDTPMDESQATDEDGRDSGKNGGGTDLNLNLGLKDPDGDNEVETSEKHVAANNPQTENRSKRKSVTPDLEMTM

SEQ ID NO: 4174 - protein, 109 aa, Zea mays subsp. mays
  peptide (1)..(109): Ceres Seq. ID no. 12340756
MEEQRQESTKSDDENKANDGDPSSNETEPSNGKTDINDTPMDESQATDEDGRDSGKNGGGTDLNLNLGLKDPDGDNEVETSEKHVAANNPQTENRSKRKSVTPDLEMTM

SEQ ID NO: 4175 - DNA, 781 bp, Zea mays subsp. mays
  misc_feature (1)..(781): Ceres Seq. ID no. 12356172
  misc_feature (1)..(781): Ortholog of  Ceres SEQ ID NO 15224680 as cited in SEQ ID NO 59829
  misc_feature (1)..(781): Ortholog of  Ceres SEQ ID NO 13594273 as cited in SEQ ID NO 60013
gcacagcacagaccggaagcacagcgcccagtcgcccacccacccgctgcgtcccgctcaccaagtcaccagccttgctgcgcgcgtcctcccacccgccgcccgtagccatgtcggtgacgctgcacacgaacctgggcgacatcaagtgcgaggtgttctgcgaccaggtgccccgcacggcggagaacttactggccctctgcgccagcggctactacgacggcaccgtgttccaccgaaacatcaagggcttcatgatccagggcggcgaccccaccggctccggcaagggcggctcctccatctggggcaccaagttcgcggacgagttcagggagtccctcaagcacaacgcacgggggatcatgtcgatggccaacaacgggcccaacaccaacggcagccagttcttcatcacctacgccaagcagccgcacctcaacggccactacaccgtcttcgccaaggtcatccacggcttcgaggtcctcgacctcatggagaaggcgcagaccggccccggggacaggccgctcgccgagatcaggctcaaccgcgtcaccatccacgccaacccgctagccctctgaactactactgccttccacctgctcctgcagtcctgtcccgtggccttattataattactattattactcatggaaatcaggatgaggagagtaatttcgcgaggacacttttgattgattttgaaacatggatctgtagctctctaaacacttgtagttgtagaactctaaaaaaactttagattccc

SEQ ID NO: 4176 - protein, 257 aa, Zea mays subsp. mays
  peptide (1)..(257): Ceres Seq. ID no. 12356173
HSTDRKHSAQSPTHPLRPAHQVTSLAARVLPPAARSHVGDAAHEPGRHQVRGVLRPGAPHGGELTGPLRQRLLRRHRVPPKHQGLHDPGRRPHRLRQGRLLHLGHQVRGRVQGVPQAQRTGDHVDGQQRAQHQRQPVLHHLRQAAAPQRPLHRLRQGHPRLRGPRPHGEGADRPRGQAARRDQAQPRHHPRQPASPLNYYCLPPAPAVLSRGLIIITIITHGNQDEESNFARTLLIDFETWICSSLNTCSCRTLKKL

SEQ ID NO: 4177 - protein, 196 aa, Zea mays subsp. mays
  peptide (1)..(196): Ceres Seq. ID no. 12356174
TAQTGSTAPSRPPTRCVPLTKSPALLRASSHPPPVAMSVTLHTNLGDIKCEVFCDQVPRTAENLLALCASGYYDGTVFHRNIKGFMIQGGDPTGSGKGGSSIWGTKFADEFRESLKHNARGIMSMANNGPNTNGSQFFITYAKQPHLNGHYTVFAKVIHGFEVLDLMEKAQTGPGDRPLAEIRLNRVTIHANPLAL

SEQ ID NO: 4178 - protein, 160 aa, Zea mays subsp. mays
  peptide (1)..(160): Ceres Seq. ID no. 12356175
MSVTLHTNLGDIKCEVFCDQVPRTAENLLALCASGYYDGTVFHRNIKGFMIQGGDPTGSGKGGSSIWGTKFADEFRESLKHNARGIMSMANNGPNTNGSQFFITYAKQPHLNGHYTVFAKVIHGFEVLDLMEKAQTGPGDRPLAEIRLNRVTIHANPLAL

SEQ ID NO: 4179 - DNA, 1133 bp, Zea mays subsp. mays
  misc_feature (1)..(1133): Ceres Seq. ID no. 12404468
  misc_feature (1)..(1133): Ortholog of  Ceres SEQ ID NO 14307589 as cited in SEQ ID NO 20466
  misc_feature (1)..(1133): Ortholog of  Ceres SEQ ID NO 14313599 as cited in SEQ ID NO 54989
  misc_feature (1)..(1133): Ortholog of  Ceres SEQ ID NO 15176204 as cited in SEQ ID NO 55608
  misc_feature (1)..(1133): Ortholog of  Ceres SEQ ID NO 15225111 as cited in SEQ ID NO 58444
  misc_feature (1)..(1133): Ortholog of  Ceres SEQ ID NO 14313064 as cited in SEQ ID NO 59543
  misc_feature (1)..(1133): Ortholog of  Ceres SEQ ID NO 12611159 as cited in SEQ ID NO 59821
  misc_feature (1)..(1133): Ortholog of  Ceres SEQ ID NO 13584238 as cited in SEQ ID NO 64216
  misc_feature (1)..(1133): Ortholog of  Ceres SEQ ID NO 13661001 as cited in SEQ ID NO 67531
  misc_feature (1)..(1133): Ortholog of  Ceres SEQ ID NO 15178920 as cited in SEQ ID NO 0
aagtaggcaactaagacaaagtggcgaactcttctctgtactagctttcttcttcttcctcctcttcctcctcccaaacagactggatttcatcaagataatcctgaaactggagccaacaagcagacagagaaagaagagcaagaagaccggctcccagccgatacaaggtaggagtgagcagcgttagatcagttttcatctcaggatcgatatggtgacagtgagagaggagactcgcaaggggccatggacagagcaggaggacctgcaactggtatgcactgtccgtctgttcggtgaacgtcgttgggatttcattgccaaagtatcagggctcaaccggacaggcaagagctgccggctgcgctgggtcaactacctccaccctggcctcaagcgtgggcgcatgtctccccatgaagagcgactcatcctagagctgcacgctcggtggggaaacaggtggtccaggatagcacgccgcttgccagggcgcactgacaatgagatcaagaactactggaggacacacatgagaaagaaggcacaggagaggaagaggaacatgtctccatcgtcgtcctcgtcttcgctgacttaccagtcaggctacccagatactccatcaaccattggagttgagggacaggagcttcatggtggcagtggctgcatcacaagcatcctgaagggcacccctccggacatggatggctatcccatggaccagatatggatggaaattgaggcgccacagatgccctcggaggagagctttgttggggggaaccataatgtgtgcagcagccttgccaccccgctgccaccaccaactgtctgggaatactacccagaggcctgctggaaggttgacgatgagatcaagatggcaccacaatttcaatttggttatagtgaaggagttgggcccctgcttctgatgccataaatattgggtcagattactaagttatacacctacctagcagaagtgaagtgcttttgtagaaacaagctttagcatggatctgaatatttatctccgcgcttagaattgcaggtctatggatctatgcatggttgctatgtatctatctagtgtgcaagacaagatcatcttaatttgtcct

SEQ ID NO: 4180 - protein, 245 aa, Zea mays subsp. mays
  peptide (1)..(245): Ceres Seq. ID no. 12404469
MVTVREETRKGPWTEQEDLQLVCTVRLFGERRWDFIAKVSGLNRTGKSCRLRWVNYLHPGLKRGRMSPHEERLILELHARWGNRWSRIARRLPGRTDNEIKNYWRTHMRKKAQERKRNMSPSSSSSSLTYQSGYPDTPSTIGVEGQELHGGSGCITSILKGTPPDMDGYPMDQIWMEIEAPQMPSEESFVGGNHNVCSSLATPLPPPTVWEYYPEACWKVDDEIKMAPQFQFGYSEGVGPLLLMP

SEQ ID NO: 4181 - protein, 180 aa, Zea mays subsp. mays
  peptide (1)..(180): Ceres Seq. ID no. 12404470
MSPHEERLILELHARWGNRWSRIARRLPGRTDNEIKNYWRTHMRKKAQERKRNMSPSSSSSSLTYQSGYPDTPSTIGVEGQELHGGSGCITSILKGTPPDMDGYPMDQIWMEIEAPQMPSEESFVGGNHNVCSSLATPLPPPTVWEYYPEACWKVDDEIKMAPQFQFGYSEGVGPLLLMP

SEQ ID NO: 4182 - protein, 138 aa, Zea mays subsp. mays
  peptide (1)..(138): Ceres Seq. ID no. 12404471
MRKKAQERKRNMSPSSSSSSLTYQSGYPDTPSTIGVEGQELHGGSGCITSILKGTPPDMDGYPMDQIWMEIEAPQMPSEESFVGGNHNVCSSLATPLPPPTVWEYYPEACWKVDDEIKMAPQFQFGYSEGVGPLLLMP

SEQ ID NO: 4183 - DNA, 958 bp, Zea mays subsp. mays
  misc_feature (1)..(958): Ceres Seq. ID no. 13571162
  misc_feature (1)..(958): Ortholog of  Ceres SEQ ID NO 15179952 as cited in SEQ ID NO 1063
aaaatttcccccccaatttccctccaccgaagcatcacccaatcagatccgatttcgtagagatgaagccggcagtagaggcggaggctgacgagcgagcggcggaggagatggcacctaagaaggcagcggctgccaagaaagcggccgaggaagttgaggtggaggaggtggtggacggggacgaggcggtcgatggggagggcgacggtgacgaggacgacgatggggaaggcggtgacgaggaggatgatgatgaggaggtggatggggaggagaaggaggcggcaggggttgtggagatctccgacgaagacgacgacgacggtgacggggaggcggacgacgacgacgacgatgacggggatgacgacgacgacgacgacgaggactcagacgacgaggaagaggtcgacggtgaagacgatcaggaggaggagctgggaaccgagtatctggttcagcctcttgggcgggctgaagacgaagagcactcgagcgactttgaaccggaagaaaacggtgagggtgccgacgatgaggagatcgatgaagaggacgatgacggtgaggactctgtgaaggcgcagacctctacgaagaggaagaggtcaggcgacgaagaagaagaagacgacgacgatggggatgatgatggtgacgatgatgacgatgggaggccaccatcaaagcgatagtatggttagctctagttttgtagctgtgtccttgggtgtttggtaggtaggtagtgctgctgatgttggtttagaagaactcatcatcacctgggatatgtgtgtgatttggcttggccgatggatgaatgatgaaggtcttgtacttgttgctgcttctttcatgttgatgaactcgcactgattcactgtacatgctagcttctaattgtctgtctagacagctttatgggtttaactagaatcggatttttttccct

SEQ ID NO: 4184 - protein, 231 aa, Zea mays subsp. mays
  peptide (1)..(231): Ceres Seq. ID no. 13571163
NFPPNFPPPKHHPIRSDFVEMKPAVEAEADERAAEEMAPKKAAAAKKAAEEVEVEEVVDGDEAVDGEGDGDEDDDGEGGDEEDDDEEVDGEEKEAAGVVEISDEDDDDGDGEADDDDDDDGDDDDDDDEDSDDEEEVDGEDDQEEELGTEYLVQPLGRAEDEEHSSDFEPEENGEGADDEEIDEEDDDGEDSVKAQTSTKRKRSGDEEEEDDDDGDDDGDDDDDGRPPSKR

SEQ ID NO: 4185 - protein, 211 aa, Zea mays subsp. mays
  peptide (1)..(211): Ceres Seq. ID no. 13571164
MKPAVEAEADERAAEEMAPKKAAAAKKAAEEVEVEEVVDGDEAVDGEGDGDEDDDGEGGDEEDDDEEVDGEEKEAAGVVEISDEDDDDGDGEADDDDDDDGDDDDDDDEDSDDEEEVDGEDDQEEELGTEYLVQPLGRAEDEEHSSDFEPEENGEGADDEEIDEEDDDGEDSVKAQTSTKRKRSGDEEEEDDDDGDDDGDDDDDGRPPSKR

SEQ ID NO: 4186 - protein, 195 aa, Zea mays subsp. mays
  peptide (1)..(195): Ceres Seq. ID no. 13571165
MAPKKAAAAKKAAEEVEVEEVVDGDEAVDGEGDGDEDDDGEGGDEEDDDEEVDGEEKEAAGVVEISDEDDDDGDGEADDDDDDDGDDDDDDDEDSDDEEEVDGEDDQEEELGTEYLVQPLGRAEDEEHSSDFEPEENGEGADDEEIDEEDDDGEDSVKAQTSTKRKRSGDEEEEDDDDGDDDGDDDDDGRPPSKR

SEQ ID NO: 4187 - DNA, 1252 bp, Zea mays subsp. mays
  misc_feature (1)..(1252): Ceres Seq. ID no. 12365355
  misc_feature (1)..(1252): Ortholog of  Ceres SEQ ID NO 12474685 as cited in SEQ ID NO 88
  misc_feature (1)..(1252): Ortholog of  Ceres SEQ ID NO 13638574 as cited in SEQ ID NO 51223
  misc_feature (1)..(1252): Ortholog of  Ceres SEQ ID NO 14311531 as cited in SEQ ID NO 51466
  misc_feature (1)..(1252): Ortholog of  Ceres SEQ ID NO 15170465 as cited in SEQ ID NO 52798
  misc_feature (1)..(1252): Ortholog of  Ceres SEQ ID NO 15177112 as cited in SEQ ID NO 55956
  misc_feature (1)..(1252): Ortholog of  Ceres SEQ ID NO 12610790 as cited in SEQ ID NO 56123
  misc_feature (1)..(1252): Ortholog of  Ceres SEQ ID NO 14315399 as cited in SEQ ID NO 57112
  misc_feature (1)..(1252): Ortholog of  Ceres SEQ ID NO 13596388 as cited in SEQ ID NO 62129
  misc_feature (1)..(1252): Ortholog of  Ceres SEQ ID NO 13655636 as cited in SEQ ID NO 63519
  misc_feature (1)..(1252): Ortholog of  Ceres SEQ ID NO 13655896 as cited in SEQ ID NO 64970
aaggctctggctcgcgcacccctgtccctgttcgatccgcaccgcacacctagacgcacctccaactgcagcgcgccatacttgaccgcatcagcatggcatccacgggaacgacggcggcggcggcggcggtggcggtgccggaggtgaccctgcggtcgggcaacgggaagccgatgccgatggtgggcatgggcacggcgtcgttccccgtggtgcacgaggccgtcagggacgccgtgctggcggccatcgaggtggggttccgccacttcgacacggccttcctgtacggcaccgagaagccgctcggcgacgccgtggccgaggcgctgcggcgcggcctcctgcggtcccgggaggagctcttcgtcacgtccaagctgtggtgctcgcagacccacgcggacctcgtgctgccgtccctgcgggaaactctcgagaacctgcagatggagtacgtggacctgtacctgatccactggccggtgtccctcaggccggccggcgggccgcccaagttcccgaacaggaaggaggacgcggtgccgctggacgtggcgggcgtgtggcgcgccatggaggagtgccagcggctgggcctcgccagggcgatcggcgtcagcaacttcaccaccaggcacctggacaaggtcctggccatcgccgcggtcccgcccgcggtgaaccaggtggagctgaacccggcgtggcagcagcggacgctgcgggcgtactgcgtcgaccggggcgtccacgtcgccgcctactcgccgctgggagggcagaactgggacgggcggggcagcgccgtgctcgactcggaggtgctcgcggagatagccagggcgagggggaagaccgtggcacaggtggcgctgcgatggatacatgagcagggagtgacgtgcatcgtcaagagctacaacagggagaggctgaagcagaacctcgagatattcgactgggagctgaccgacgacgaccggctcaagatcaaccacatcccgcagaggaaggttgtcgaggccagcggcttgttctcgcaggagggtgagttcacctctgttgatcccgcggaactgaatactgtggaggaatgggaactggactggaaaatggcccccgcctgtcggtgttgctccgtataggaaccgaataacaacgatcgccctcggtgtttcgagctatagttacagtatggttccgtaaactttgtatgaattttctgatctaaataaagtgggttttt

SEQ ID NO: 4188 - protein, 351 aa, Zea mays subsp. mays
  peptide (1)..(351): Ceres Seq. ID no. 12365356
MASTGTTAAAAAVAVPEVTLRSGNGKPMPMVGMGTASFPVVHEAVRDAVLAAIEVGFRHFDTAFLYGTEKPLGDAVAEALRRGLLRSREELFVTSKLWCSQTHADLVLPSLRETLENLQMEYVDLYLIHWPVSLRPAGGPPKFPNRKEDAVPLDVAGVWRAMEECQRLGLARAIGVSNFTTRHLDKVLAIAAVPPAVNQVELNPAWQQRTLRAYCVDRGVHVAAYSPLGGQNWDGRGSAVLDSEVLAEIARARGKTVAQVALRWIHEQGVTCIVKSYNRERLKQNLEIFDWELTDDDRLKINHIPQRKVVEASGLFSQEGEFTSVDPAELNTVEEWELDWKMAPACRCCSV

SEQ ID NO: 4189 - protein, 324 aa, Zea mays subsp. mays
  peptide (1)..(324): Ceres Seq. ID no. 12365357
MPMVGMGTASFPVVHEAVRDAVLAAIEVGFRHFDTAFLYGTEKPLGDAVAEALRRGLLRSREELFVTSKLWCSQTHADLVLPSLRETLENLQMEYVDLYLIHWPVSLRPAGGPPKFPNRKEDAVPLDVAGVWRAMEECQRLGLARAIGVSNFTTRHLDKVLAIAAVPPAVNQVELNPAWQQRTLRAYCVDRGVHVAAYSPLGGQNWDGRGSAVLDSEVLAEIARARGKTVAQVALRWIHEQGVTCIVKSYNRERLKQNLEIFDWELTDDDRLKINHIPQRKVVEASGLFSQEGEFTSVDPAELNTVEEWELDWKMAPACRCCSV

SEQ ID NO: 4190 - protein, 322 aa, Zea mays subsp. mays
  peptide (1)..(322): Ceres Seq. ID no. 12365358
MVGMGTASFPVVHEAVRDAVLAAIEVGFRHFDTAFLYGTEKPLGDAVAEALRRGLLRSREELFVTSKLWCSQTHADLVLPSLRETLENLQMEYVDLYLIHWPVSLRPAGGPPKFPNRKEDAVPLDVAGVWRAMEECQRLGLARAIGVSNFTTRHLDKVLAIAAVPPAVNQVELNPAWQQRTLRAYCVDRGVHVAAYSPLGGQNWDGRGSAVLDSEVLAEIARARGKTVAQVALRWIHEQGVTCIVKSYNRERLKQNLEIFDWELTDDDRLKINHIPQRKVVEASGLFSQEGEFTSVDPAELNTVEEWELDWKMAPACRCCSV

SEQ ID NO: 4191 - DNA, 1100 bp, Zea mays subsp. mays
  misc_feature (1)..(1100): Ceres Seq. ID no. 13571176
  misc_feature (1)..(1100): Ortholog of  Ceres SEQ ID NO 15180167 as cited in SEQ ID NO 0
aacaggtgtcccagccgcgcgccgcacgccctgttgccttctctcgacttcgagagcaccgccgcacggcataacgctcgcacggccgagccccgacattctaccgcactccctccgctgcacccctttccattctaccgccggcgacgccaaagttcttgggcctcctcatcggcgacttttccgccggcgacaggaaacaacgaaccaaaccacttctctgtcgagaggcgtcgcgctcctctcttcgccctctgctgttatttttcttaacccggctttctctcgattgctgcgtaaagttgaagatgaggaagctcaagttccatgagcagaagctcctcaagaggcacaatttcttggagtacaagagggagggcggccaccgcgaggcgctcgtcacacagcgctaccgcctcgtggagagggacgactacaagaagtacaatgggatatgcttaatggtgcaaaagctcgttaacatcataaagcagatggacccaagagaccctttcagaatccagatgacagacttgattctcgataagctgtataatatgggtgtaatttcaacaaaanagagcttgttaaagtgtgagaaactttcagtgagcgccttntgcaggcggagacttgcaacagttatggtgaagctcaagtttgcagagcaccttaaggaggctgtgacgtacatcgaacaggggcatgtgcgtgtcggtccagatgcagtcacggacccagcctttcttgtgaccagaaacatggaggacttcatcacctgggtggattcctcaaagatcaagaggaaggtcatggagtacaatgatgcattagatgattatgatgccatgttntgagaaaataattctgcagaaatttatgtgcccgtcagtaatgtaatnttaagcctgccacatatgggtcttttntgaacaaatctgtgggagttgtcttntgcagggctacttgcatttgtattgcacctgcagatgtgatgcaattttgtggttggttgaaggcacattataaattcatatctgatgtagttgtgcaattgtctttgttaaagagcgggtttgcccggatttcccctagtctgc

SEQ ID NO: 4192 - protein, 182 aa, Zea mays subsp. mays
  peptide (1)..(182): Ceres Seq. ID no. 13571177
  misc_feature (91)..(91): Xaa is any aa, unknown or other
  misc_feature (104)..(104): Xaa is any aa, unknown or other
  misc_feature (182)..(182): Xaa is any aa, unknown or other
MRKLKFHEQKLLKRHNFLEYKREGGHREALVTQRYRLVERDDYKKYNGICLMVQKLVNIIKQMDPRDPFRIQMTDLILDKLYNMGVISTKXSLLKCEKLSVSAXCRRRLATVMVKLKFAEHLKEAVTYIEQGHVRVGPDAVTDPAFLVTRNMEDFITWVDSSKIKRKVMEYNDALDDYDAMX

SEQ ID NO: 4193 - protein, 131 aa, Zea mays subsp. mays
  peptide (1)..(131): Ceres Seq. ID no. 13571178
  misc_feature (40)..(40): Xaa is any aa, unknown or other
  misc_feature (53)..(53): Xaa is any aa, unknown or other
  misc_feature (131)..(131): Xaa is any aa, unknown or other
MVQKLVNIIKQMDPRDPFRIQMTDLILDKLYNMGVISTKXSLLKCEKLSVSAXCRRRLATVMVKLKFAEHLKEAVTYIEQGHVRVGPDAVTDPAFLVTRNMEDFITWVDSSKIKRKVMEYNDALDDYDAMX

SEQ ID NO: 4194 - protein, 120 aa, Zea mays subsp. mays
  peptide (1)..(120): Ceres Seq. ID no. 13571179
  misc_feature (29)..(29): Xaa is any aa, unknown or other
  misc_feature (42)..(42): Xaa is any aa, unknown or other
  misc_feature (120)..(120): Xaa is any aa, unknown or other
MDPRDPFRIQMTDLILDKLYNMGVISTKXSLLKCEKLSVSAXCRRRLATVMVKLKFAEHLKEAVTYIEQGHVRVGPDAVTDPAFLVTRNMEDFITWVDSSKIKRKVMEYNDALDDYDAMX

SEQ ID NO: 4195 - DNA, 1949 bp, Zea mays subsp. mays
  misc_feature (1)..(1949): Ceres Seq. ID no. 12352261
  misc_feature (1)..(1949): Ortholog of  Ceres SEQ ID NO 15171626 as cited in SEQ ID NO 57201
atcacacagcgccaccgcgtggttcgttaggaaaggaaatcgattcccccgcatccgatctcttcggtgctagagaaatatagggccgccgcctcctcctcattcggtgaaaggtgggcggttagggttgggagatctcttgactcacgacacgagcagcagaattcgtcgagggccgctggttgctgcgagaggtccgggccttcgtgggatcttgaaaattgaatgttctaatggagtccaagggtggcaagaagaagtctagcagtagtcgttcctccctgatgtacgaagctccccttggctacagcatcgaggatatccgccctgcaggcggcatcaagaagttctccgctgcttactcgaactgcgcgaggaagccatcctgatatctctgtcgtcatccccatcctagtagcgtagaaaccacctgcattttcattttgatctccctaatccctccggctagctgctttccagtgaccaaaagatatcaaagaccacttcccgtcttcctcccgtggctgtctgtcatctggctctgaaacgatggcagtcctgcaagttgctgctgctgcccctccccctgtctctgtgattgggttcgagggatttgagaagcgccttgagatcagcttctctgaggcacctgtcttggctgaccccagcggaaggggactgcgtgcgctctcgcgtgcccagatcgactctgttcttgaccttgctcggtgcaccattgtgtccgagctctcaaacgaggacttcgactcttatgtcttatctgagtcgagcctgtttgtctacccatacaagattgtgatcaagacctgtggaactacaaagcttctgctcgctattccgaggatccttgaacttgctgaagagctcctgttgccactcgctgcagttaaatactcccgtggaacgttcatattccctgaagcacagccttccccacacaagaacttcgctgacgaggttgccttcctgaatcgcttcttcggtggcctcaagtccggtggcaatgcttatgtgattggtgactctgcgaagcccgggcagaagtggcacgtctactacgccgctgagcaccctgaggagcctgttgttactctagagatgtgcatgactgggctggacaagaagaaagcttctgtcttcttcaagaccactgctgatggttactcgctgtgcgccaaggagatgaccaagctctctggtatctcggacatcatcccagagatggagatctgtgacttcgacttcgagccctgtggctactccatgaatgctgttcatggccctgctttgtcgaccattcatgtgaccccagaggacggcttcagctatgcaagctacgaggtcatgggctttaacccgggctctttctcttatggtgacctggttaagagggtgctgaggtgctttggtccaactgagttctctgttgccgtgaccatcttcggtgatcgggacaatgcgaagacctgggggacgaaactggatgctgaggcctatgcttgcagcaacatggttgagcaggtgctgccgtttggtggcttgctcatctatcagagcttcactgttatgggcgaaacgacccatgggtcgccgaggtcagtcctgcatgacttcgctggtgacattgtcaagaatcgctcagagagtgatgctccctgatgggaagctgatgctgtggatgagagcgaggaaagagaggtaaagaagatgaaatgctgatgcggtcgacgatagatcagattcagagttgctgccactggttatcttgtgaagcagccaagcctaattatttatgccacataacctttgctattgtaatgtgccacatgcttatatttgcaataaacagctctaggtggtcagctttgtctgccgcaatgagcagtgtatcgatattgtggtttaaattgttggatctaaataaagtc

SEQ ID NO: 4196 - protein, 376 aa, Zea mays subsp. mays
  peptide (1)..(376): Ceres Seq. ID no. 12352262
MAVLQVAAAAPPPVSVIGFEGFEKRLEISFSEAPVLADPSGRGLRALSRAQIDSVLDLARCTIVSELSNEDFDSYVLSESSLFVYPYKIVIKTCGTTKLLLAIPRILELAEELLLPLAAVKYSRGTFIFPEAQPSPHKNFADEVAFLNRFFGGLKSGGNAYVIGDSAKPGQKWHVYYAAEHPEEPVVTLEMCMTGLDKKKASVFFKTTADGYSLCAKEMTKLSGISDIIPEMEICDFDFEPCGYSMNAVHGPALSTIHVTPEDGFSYASYEVMGFNPGSFSYGDLVKRVLRCFGPTEFSVAVTIFGDRDNAKTWGTKLDAEAYACSNMVEQVLPFGGLLIYQSFTVMGETTHGSPRSVLHDFAGDIVKNRSESDAP

SEQ ID NO: 4197 - DNA, 1447 bp, Zea mays subsp. mays
  misc_feature (1)..(1447): Ceres Seq. ID no. 12373744
  misc_feature (1)..(1447): Ortholog of  Ceres SEQ ID NO 15224418 as cited in SEQ ID NO 51528
  misc_feature (1)..(1447): Ortholog of  Ceres SEQ ID NO 13593846 as cited in SEQ ID NO 53152
  misc_feature (1)..(1447): Ortholog of  Ceres SEQ ID NO 15175169 as cited in SEQ ID NO 0
ctgtttcaatttgtactctctaggtatgggccattttggacatgcaccaccctgattttcgttgctgcatctattgctacttttgtcacctacctatcccacaaatggcacaagaaggaatggaactatgatatcaacttggttacctggtctgctgggttattctatggctacgtgacatttgttcctcttcttttatatgttattctcaagtacttctcagcacctgctggtttggtgcaattgtggtgcctatatggatattctctgttcatattcattccagcatcggtaaggttcttactaaaatgcatgcacatatacttgggaatttcagctctattagtctacaattttgtgccactggtctacagctaaagttgtttaaaatttggccttttctgtgggaaatgttcactcgattctaacacctgtaaaggcagcagcaaggttgagtttaaagaatttgcactgattttgtatgaaaactggaaccaattaattccaagagtcattattactaccacttaccaatataatttgtttgctaggtacccttttactgctacatattatagttacatgattttacaaggcatatagttgtgcagtatgttagtaggcttcatgattaaacctgtttcatatggtcaaatacttttctatggatcatttgtcaaaagaaaaaaaatctttactatttttacttccatataaccaatatcggtcatttactggtcctctattgacaaaatactactacctccatgccaaattatgagatgttttggcatttctaggtacataacttttattttacactatatctagatacatagtaataatgatgtatttgggaaaactaaaacgtcttataatttggaaatgagggactagtatattatctgttcaaatgatttggaatatttctacactgctttagcatttgaagttgactggaagttctttctcctttgtgttacagcttctgtctattgtgccaatagaaatattcagatgggtgattgctggtgttgctggtttcatgtctgctactttcgttgctgtaaatctccgcgcacacattgtaaattccggcgagcgatggttcctgatcgttgctgggatattcttgttgcagttggggcttgctttttgctgaaactatatttcttcacgataactgtatagggttatttacatctaatgatcgtactagtcaagaatacacaattttccatgtggaatcacttccatgttcattgaacattgatgtaatttttccatgtatacatctttcttacacgtagaattgagaagcccctgaaattgaattacagcagccaaacaagtactgtgattgatatgggtgaagagtctgatctgtagtctattctgtgttccgctgcttgaggtgaataatgaatgagaaatcgctgtgttctcc

SEQ ID NO: 4198 - protein, 125 aa, Zea mays subsp. mays
  peptide (1)..(125): Ceres Seq. ID no. 12373745
LFQFVLSRYGPFWTCTTLIFVAASIATFVTYLSHKWHKKEWNYDINLVTWSAGLFYGYVTFVPLLLYVILKYFSAPAGLVQLWCLYGYSLFIFIPASVRFLLKCMHIYLGISALLVYNFVPLVYS

SEQ ID NO: 4199 - DNA, 1903 bp, Zea mays subsp. mays
  misc_feature (1)..(1903): Ceres Seq. ID no. 12344698
  misc_feature (1)..(1903): Ortholog of  Ceres SEQ ID NO 14302588 as cited in SEQ ID NO 0
accagctgcctgtgcagcagtccaattcctcttgctggagcataccagaagcagaatcgggtgagaggaaatgggatcaacaagaacgtctcatccatctttcccggtcctcctgctcttcctcctcgctaccgccgccgccgccggaagcaacaaggctgaggaggtggacgacctccagtaccttattgacaactccgaagacatcccacccaacgaccctgacgggtggcctgagggcggcggcggcggcgactacgacgacgaccttctcttccaagatcaggaccaggacctcccagactacgagccgcagatcgacgagacccacgtcgtggtcctcaccgccgccaacttctcctccttcctcgccgccacccgccatgtcatggttgagttctacgccccctggtgtggccactgccgcgagctcgcccctgaatacgccgccgccgccgcgcatctcgccgtccaccacaaccagaccgatctcgctcttgccaaggccgacgccaccgaggaaaccgacctagcccagaggtacgacgtccagggcttccccactatcatcctcttcatcgacggcgtccccaaggactacaacggcgcgaggaccaaggacgccatcgtcgactggatcaacaagaagctcggcccggccgtgcaagatgtcaccagcgtccacgaggccgagaggatactcaccggggatgacaaagccgtcattgccttcctcgacactctaaccggtgctcacagtgacgagcttgctgctgcttcaaggctggaagatagcatcaacttttatcaaacttcgattcctgatgttgctaagcttttccatatcgacccagcagcaaagcgtccatccatagtattactgaagaaagaggaggagaagttgaccttctatgatggaaagtttaaagcatcagccattgctgattttgtgtctgctaacaagcttcctttggttaccacactaactcaagaaacttccccttctatttttggcaatgcaatcaagaagcagattttactatttgctgttgcaagtgaatcctcaaaatttctgtccatctttaaggaagcagcaaagccatttaagggaaagctattatttgtctttgtggagcgagacaatgatgaagttggtgaaccagttgccaactactttggtcttactggacaagagaccacagttcttgcttacactggtaatgaagatgctaggaaatttttccttgatggcgaggtgtcacttgaagccattaaggacttcgctgaaggtttcttggaagacaaacttacaccattctacaagtctgaaccagtacctgaatctaatgatggggatgtcaaaattgttgttggaaagagtctggatgtaatagttttggatgaatcaaaagatgtacttctggagatatatgcaccgtggtgtgggcattgtcaatcactggagcctacttacaacaaactagccaagcatctaagtggagttgactcccttgtgatagccaaaatggatggtactaccaatgagcatccacgtgcaaagtctgacggatacccaacaattctcttctatccagctgggaagaaaagctttgagcctgtcacgtttgagggggagcggacagtggtagatatgtacaggttcatcaagaaacatgctagcatccctttcaagttgaagcgccaggagtcaagaagggagagcatccagacggatggtgtcaaggacgaactgtagggcaggtcatgcattgatagatagctgagttttgaattttggttttataaaattaggtccgccaccgaatttcgcgttttcagcttaaacatcacctaaatctgtttctttatattatactatattaaagcaccagtttcaaccgtg

SEQ ID NO: 4200 - protein, 561 aa, Zea mays subsp. mays
  peptide (1)..(561): Ceres Seq. ID no. 12344699
MGSTRTSHPSFPVLLLFLLATAAAAGSNKAEEVDDLQYLIDNSEDIPPNDPDGWPEGGGGGDYDDDLLFQDQDQDLPDYEPQIDETHVVVLTAANFSSFLAATRHVMVEFYAPWCGHCRELAPEYAAAAAHLAVHHNQTDLALAKADATEETDLAQRYDVQGFPTIILFIDGVPKDYNGARTKDAIVDWINKKLGPAVQDVTSVHEAERILTGDDKAVIAFLDTLTGAHSDELAAASRLEDSINFYQTSIPDVAKLFHIDPAAKRPSIVLLKKEEEKLTFYDGKFKASAIADFVSANKLPLVTTLTQETSPSIFGNAIKKQILLFAVASESSKFLSIFKEAAKPFKGKLLFVFVERDNDEVGEPVANYFGLTGQETTVLAYTGNEDARKFFLDGEVSLEAIKDFAEGFLEDKLTPFYKSEPVPESNDGDVKIVVGKSLDVIVLDESKDVLLEIYAPWCGHCQSLEPTYNKLAKHLSGVDSLVIAKMDGTTNEHPRAKSDGYPTILFYPAGKKSFEPVTFEGERTVVDMYRFIKKHASIPFKLKRQESRRESIQTDGVKDEL

SEQ ID NO: 4201 - protein, 455 aa, Zea mays subsp. mays
  peptide (1)..(455): Ceres Seq. ID no. 12344700
MVEFYAPWCGHCRELAPEYAAAAAHLAVHHNQTDLALAKADATEETDLAQRYDVQGFPTIILFIDGVPKDYNGARTKDAIVDWINKKLGPAVQDVTSVHEAERILTGDDKAVIAFLDTLTGAHSDELAAASRLEDSINFYQTSIPDVAKLFHIDPAAKRPSIVLLKKEEEKLTFYDGKFKASAIADFVSANKLPLVTTLTQETSPSIFGNAIKKQILLFAVASESSKFLSIFKEAAKPFKGKLLFVFVERDNDEVGEPVANYFGLTGQETTVLAYTGNEDARKFFLDGEVSLEAIKDFAEGFLEDKLTPFYKSEPVPESNDGDVKIVVGKSLDVIVLDESKDVLLEIYAPWCGHCQSLEPTYNKLAKHLSGVDSLVIAKMDGTTNEHPRAKSDGYPTILFYPAGKKSFEPVTFEGERTVVDMYRFIKKHASIPFKLKRQESRRESIQTDGVKDEL

SEQ ID NO: 4202 - DNA, 1178 bp, Zea mays subsp. mays
  misc_feature (1)..(1178): Ceres Seq. ID no. 12409975
  misc_feature (1)..(1178): Ortholog of  Ceres SEQ ID NO 13594193 as cited in SEQ ID NO 58558
  misc_feature (1)..(1178): Ortholog of  Ceres SEQ ID NO 15177545 as cited in SEQ ID NO 0
atcgccgcctgctctctacctctgcactccaatcagatcatcagatagatcactggccccgtgctgattaccgcgcttcccatctgagcagccagcctcccagggtacagggagagacgcagaagagacagctgctgcctcgctgagacgatggccggaggcggagaccactcccagacgaacggaggccacgtcgaccagagggccttggaggagggcaggaaggaggagttcgctgaccagggctgcgccgccatggtcgtctccgtcccatttatccagaagatcatcgcggagatcttcggcacctacttcctgatgttcgcggggtgcggcgcggtgacgatcaacgcgagcaagaacgggcagatcacgttcccgggcgtggcgatcgtgtgggggctagcggtgatggtgatggtgtacgccgtgggccacatctccggcgcgcacttcaacccggcggtgaccctggccttcgccaccagcgggcggttcccgtggcggcagctgccggcgtacgtgctggcgcagatgctgggcgccacgctcgcctccgggacgctgcgcctcatgttcggcggccggcacgagcacttccccggcacgctgcccacgggctccgaggtgcagtcgctcgtcatcgagatcatcaccacattctacctcatgttcgtcatctccggcgtcgccacggacaacagagcaatcggggagctggctgggctggccgtgggcgcaaccatcctgcttaacgtgctcattgccgggcccgtctccggcgcgtcgatgaacccggcccggagcgtgggcccggcgctggtgagcggggagtacacgtccatctgggtgtacgtggtggggccggtggtgggggccgtggccggggcgtgggcctacaacctcatccgcttcaccaacaagcccctccgcgagatcaccaagagcacgtctttcctcaagagcacgagcaggatgaactccgccgcctccgcctgatggatctccatggccggtaatttagcctacaaaactatatattcacccgtgtcgtcgtgtcagtacgtgagaggatatagatatataattcctgcgtgcgtgtgcgtttgtgtgtggatggaaaacatatgaaagaagaggtatggtttgtgtgtggatggaaaacgtactgtgcctgc

SEQ ID NO: 4203 - protein, 282 aa, Zea mays subsp. mays
  peptide (1)..(282): Ceres Seq. ID no. 12409976
MAGGGDHSQTNGGHVDQRALEEGRKEEFADQGCAAMVVSVPFIQKIIAEIFGTYFLMFAGCGAVTINASKNGQITFPGVAIVWGLAVMVMVYAVGHISGAHFNPAVTLAFATSGRFPWRQLPAYVLAQMLGATLASGTLRLMFGGRHEHFPGTLPTGSEVQSLVIEIITTFYLMFVISGVATDNRAIGELAGLAVGATILLNVLIAGPVSGASMNPARSVGPALVSGEYTSIWVYVVGPVVGAVAGAWAYNLIRFTNKPLREITKSTSFLKSTSRMNSAASA

SEQ ID NO: 4204 - protein, 247 aa, Zea mays subsp. mays
  peptide (1)..(247): Ceres Seq. ID no. 12409977
MVVSVPFIQKIIAEIFGTYFLMFAGCGAVTINASKNGQITFPGVAIVWGLAVMVMVYAVGHISGAHFNPAVTLAFATSGRFPWRQLPAYVLAQMLGATLASGTLRLMFGGRHEHFPGTLPTGSEVQSLVIEIITTFYLMFVISGVATDNRAIGELAGLAVGATILLNVLIAGPVSGASMNPARSVGPALVSGEYTSIWVYVVGPVVGAVAGAWAYNLIRFTNKPLREITKSTSFLKSTSRMNSAASA

SEQ ID NO: 4205 - protein, 226 aa, Zea mays subsp. mays
  peptide (1)..(226): Ceres Seq. ID no. 12409978
MFAGCGAVTINASKNGQITFPGVAIVWGLAVMVMVYAVGHISGAHFNPAVTLAFATSGRFPWRQLPAYVLAQMLGATLASGTLRLMFGGRHEHFPGTLPTGSEVQSLVIEIITTFYLMFVISGVATDNRAIGELAGLAVGATILLNVLIAGPVSGASMNPARSVGPALVSGEYTSIWVYVVGPVVGAVAGAWAYNLIRFTNKPLREITKSTSFLKSTSRMNSAASA

SEQ ID NO: 4206 - DNA, 1167 bp, Zea mays subsp. mays
  misc_feature (1)..(1167): Ceres Seq. ID no. 12365393
  misc_feature (1)..(1167): Ortholog of  Ceres SEQ ID NO 14307480 as cited in SEQ ID NO 54235
aaattctacatgggcctggccgtcttcagttcttcacccttcaccaccagaagcttctaggaagtaggaactcgaacggccggcagcattccgacgagacgagtcacgaatccggatagagcgccgccccccaacctgctgcgccgaccctgctcgccgccggcccgagtagagagagagagagaggagagaaggaagcatgacgacaatccgtcggttctgctgcgacgacctcctccgcttcgcctccgtcaacctggaccacctcaccgagacgttcaacatgtcgttctacatgacgtacctggcgcgctggcccgactacttccacgccgccgtcagccctggcggccgcgtcatgggttacatcatgggtaaagttgaaggccaaggtgaatcttggcatggacatgtcacagcggtttctgttgcctctgaatttcgtaggcagaagttagccaaaaaacttatgaacttactggaggaaatcagtgataagatggataaggcctacttcgtggatctctttgtaagggcatctaacatgccagcgataaggatgtatgaaaagcttggttatgtggtttatcgaagggtgctccggtactactcaggggaagaagatggcctcgatatgagaaaagcattatcacaagatgttgagaagaagtccatcataccactcaagaggccaattacgcctgatgaacttgaatatgattgatgttagctacctggtgcttacgttggatgctccggtggggaatttgacaggctttgaaaatctggtagtgagtgtattgttgtcgtttttacgcctgctaggggacaggttttgatggtgaattcgatgacaagaccaacgtcaaggccgcctggggtaaggtcggcgcgcacgctggcgagtatggtgcggaggccctggagaggatgttcctgtccttccccaccaccaagacctacttcccgcacttcgacctgagccacggctctgccccaggttaagggccacggcaagaaggtggccgacgcgctgaccaacgccgtggcgcacgtggacgacatgcccaacgcgctgtccgccctgagcgacctgcacgcgcacaagcttcgggtggacccggtcaacttcaagctcctaagccactgcctgctggtgagcccatc

SEQ ID NO: 4207 - protein, 174 aa, Zea mays subsp. mays
  peptide (1)..(174): Ceres Seq. ID no. 12365394
MTTIRRFCCDDLLRFASVNLDHLTETFNMSFYMTYLARWPDYFHAAVSPGGRVMGYIMGKVEGQGESWHGHVTAVSVASEFRRQKLAKKLMNLLEEISDKMDKAYFVDLFVRASNMPAIRMYEKLGYVVYRRVLRYYSGEEDGLDMRKALSQDVEKKSIIPLKRPITPDELEYD

SEQ ID NO: 4208 - protein, 146 aa, Zea mays subsp. mays
  peptide (1)..(146): Ceres Seq. ID no. 12365395
MSFYMTYLARWPDYFHAAVSPGGRVMGYIMGKVEGQGESWHGHVTAVSVASEFRRQKLAKKLMNLLEEISDKMDKAYFVDLFVRASNMPAIRMYEKLGYVVYRRVLRYYSGEEDGLDMRKALSQDVEKKSIIPLKRPITPDELEYD

SEQ ID NO: 4209 - protein, 142 aa, Zea mays subsp. mays
  peptide (1)..(142): Ceres Seq. ID no. 12365396
MTYLARWPDYFHAAVSPGGRVMGYIMGKVEGQGESWHGHVTAVSVASEFRRQKLAKKLMNLLEEISDKMDKAYFVDLFVRASNMPAIRMYEKLGYVVYRRVLRYYSGEEDGLDMRKALSQDVEKKSIIPLKRPITPDELEYD

SEQ ID NO: 4210 - DNA, 1635 bp, Zea mays subsp. mays
  misc_feature (1)..(1635): Ceres Seq. ID no. 13577792
  misc_feature (1)..(1635): Ortholog of  Ceres SEQ ID NO 14311989 as cited in SEQ ID NO 54997
gcaccaaccttgttgttgttgttcttctatttcttagtatcatagcacagtatttcgtgctctcgcttcgctcccttaatttatcaccattcctaatttattctatttcttagtatcatagcacagtatttcgctcgccccgatttcccaactcttcccgtgcctcagacagcatcggattgcttgatctcgattgtcagaataagattcagcgcaggtttggattcaccgaatccaccgattgcttgcgccccgcggtcgcgcgcggcggaatttcggccgccgccaattcgggcctctccggaagggtgtccccggtgtggttcgcctaatatccgctgccctcgtgcgggactcctcgtgattttcggctgtgcgcttggcttttccagtcccgtgttgtggttccagcctttcaggggatggggcgccgcgggttgctcaaggctgcgcttctgctgtgcttccttgctgcttgctccgggagagaacttacgatcaaacagaacccttccactaccatatacaactcgactcttgccaagatactcgtggaatatgcttctgcaatctatactgctgatttgacgcaattgtttacttggacatgtgccagatgcggtgacttgatcgaggggttcgagatgatagagatcattgtggatgtcgagaactgcttgcaggcatattttggttttgccagtgacataaacgcagtcgttgttgtttttagaggaactcaagagaacagcatccagaattggatagaggacttgttatggaaacaacttgatcttgactaccctggcatgcctgaagcaatggttcaccgagggttttattctgcatatcacaacacgacactacgtgatggagtagtcagtggtattcagaggactaggaaagcttacggagacattccaatcatgatcacgggtcattcaatgggtggagctatggcttcattctgtgcgctcgatcttgttgttaactacggactggatggcgtaaacctgatgacatttgggcagcctcgtattggcaatgctgcatttgcttcttatttcaagacatacttgcctcaagcgatccgagttactcatgcccatgatattgtgcctcacctgccaccatatttctcattcttcccacagaagacctaccatcacttcccaagagaggtatggacccacaatattggactaggaaccctagtgtaccccgtagaaaagatctgtgacgattctggtgaagaccctacatgctgcagatcagtaagtggaagtagcgtgcgagaccatatatactatcttggcgtcagcatgcatgcagaagactggagcagctgcagaatcgtcatggactacagcaaattgcagtatcagatggacctcaacggtaatctcgtattgtcgaagcagcccggtttgtcaaacgccagaggattcagtgctcagtgaaccagtctatgatttgtacagtataatagcttcacgaatcagtaatgttcaattgttaatggatcaaaggagaagggttggaaccagcatgccgattcggagatgcttattgtacatgtgattacgtaatgtattgttcagtttgcaaatatatattcacacacgccgatatttg

SEQ ID NO: 4211 - protein, 345 aa, Zea mays subsp. mays
  peptide (1)..(345): Ceres Seq. ID no. 13577793
MGRRGLLKAALLLCFLAACSGRELTIKQNPSTTIYNSTLAKILVEYASAIYTADLTQLFTWTCARCGDLIEGFEMIEIIVDVENCLQAYFGFASDINAVVVVFRGTQENSIQNWIEDLLWKQLDLDYPGMPEAMVHRGFYSAYHNTTLRDGVVSGIQRTRKAYGDIPIMITGHSMGGAMASFCALDLVVNYGLDGVNLMTFGQPRIGNAAFASYFKTYLPQAIRVTHAHDIVPHLPPYFSFFPQKTYHHFPREVWTHNIGLGTLVYPVEKICDDSGEDPTCCRSVSGSSVRDHIYYLGVSMHAEDWSSCRIVMDYSKLQYQMDLNGNLVLSKQPGLSNARGFSAQ

SEQ ID NO: 4212 - protein, 271 aa, Zea mays subsp. mays
  peptide (1)..(271): Ceres Seq. ID no. 13577794
MIEIIVDVENCLQAYFGFASDINAVVVVFRGTQENSIQNWIEDLLWKQLDLDYPGMPEAMVHRGFYSAYHNTTLRDGVVSGIQRTRKAYGDIPIMITGHSMGGAMASFCALDLVVNYGLDGVNLMTFGQPRIGNAAFASYFKTYLPQAIRVTHAHDIVPHLPPYFSFFPQKTYHHFPREVWTHNIGLGTLVYPVEKICDDSGEDPTCCRSVSGSSVRDHIYYLGVSMHAEDWSSCRIVMDYSKLQYQMDLNGNLVLSKQPGLSNARGFSAQ

SEQ ID NO: 4213 - protein, 216 aa, Zea mays subsp. mays
  peptide (1)..(216): Ceres Seq. ID no. 13577795
MPEAMVHRGFYSAYHNTTLRDGVVSGIQRTRKAYGDIPIMITGHSMGGAMASFCALDLVVNYGLDGVNLMTFGQPRIGNAAFASYFKTYLPQAIRVTHAHDIVPHLPPYFSFFPQKTYHHFPREVWTHNIGLGTLVYPVEKICDDSGEDPTCCRSVSGSSVRDHIYYLGVSMHAEDWSSCRIVMDYSKLQYQMDLNGNLVLSKQPGLSNARGFSAQ

SEQ ID NO: 4214 - DNA, 973 bp, Zea mays subsp. mays
  misc_feature (1)..(973): Ceres Seq. ID no. 12401449
  misc_feature (1)..(973): Ortholog of  Ceres SEQ ID NO 13596742 as cited in SEQ ID NO 63012
  misc_feature (1)..(973): Ortholog of  Ceres SEQ ID NO 15173334 as cited in SEQ ID NO 63797
acacatccgccgccgtttcttctcccatcatcttcctcgcagcgccggcgctccctctcccgctcccttccttactcgcgctcggcacacaggcggcggcgctcgggctctcagcgacggcgtcagcggcttaccctcgcgccctcgcctccggtcctccgcacaccggccggtgaccctgcgacaacattgcatctgaactgcattggatcctaagagatgatggatgagtcttttcttgataggatggtttcccaacttcggtcaacatgcaagtactacactggatatcccaaggacttagggcgatcaagaattataccattcacatctgagcgtcagtttgtgcagctattacatgaaggcaggcctgtagtcgttgcctttactattaagtgcacatatacacagcatcttgataaagttctggaagaggccgcagctaaattttatccacatatcaagtttgtccgagttgagtgcccgaagtaccctgggttttgcctcacaaggcaaaggaacgaatatccatttgttgaagtattctacaacccagaacaggctgcaagcccaggaaagagcgtggatcctaacatcaccaagtattctgtaaaagtgctaccgttcaactatgaccaaagcgtgtatggatttcgagaatatttcaagaagcatggtttcaagtattctgaaacaaactagatctgttgttaaagatctgcctcgagagtagtcctagggacttgagtagcatgtggaggcagttgttgtatggagttgaaatggcgtgaggctctaatgggaggccttgactagttcattcgagaatgcctgtcatgtattcatttgtatacgggctactgctcatgcctagagatttgcttttccgtacctatgaaccattggatttggtaatgttttacctctcaaagcccggagtgagcaatttgcatcattttttcaagcactgtcg

SEQ ID NO: 4215 - protein, 160 aa, Zea mays subsp. mays
  peptide (1)..(160): Ceres Seq. ID no. 12401450
MMDESFLDRMVSQLRSTCKYYTGYPKDLGRSRIIPFTSERQFVQLLHEGRPVVVAFTIKCTYTQHLDKVLEEAAAKFYPHIKFVRVECPKYPGFCLTRQRNEYPFVEVFYNPEQAASPGKSVDPNITKYSVKVLPFNYDQSVYGFREYFKKHGFKYSETN

SEQ ID NO: 4216 - protein, 159 aa, Zea mays subsp. mays
  peptide (1)..(159): Ceres Seq. ID no. 12401451
MDESFLDRMVSQLRSTCKYYTGYPKDLGRSRIIPFTSERQFVQLLHEGRPVVVAFTIKCTYTQHLDKVLEEAAAKFYPHIKFVRVECPKYPGFCLTRQRNEYPFVEVFYNPEQAASPGKSVDPNITKYSVKVLPFNYDQSVYGFREYFKKHGFKYSETN

SEQ ID NO: 4217 - protein, 151 aa, Zea mays subsp. mays
  peptide (1)..(151): Ceres Seq. ID no. 12401452
MVSQLRSTCKYYTGYPKDLGRSRIIPFTSERQFVQLLHEGRPVVVAFTIKCTYTQHLDKVLEEAAAKFYPHIKFVRVECPKYPGFCLTRQRNEYPFVEVFYNPEQAASPGKSVDPNITKYSVKVLPFNYDQSVYGFREYFKKHGFKYSETN

SEQ ID NO: 4218 - DNA, 1150 bp, Zea mays subsp. mays
  misc_feature (1)..(1150): Ceres Seq. ID no. 12356179
  misc_feature (1)..(1150): Ortholog of  Ceres SEQ ID NO 13624040 as cited in SEQ ID NO 0
acacacaacaccagtcaccagctcatcacatccatctcattctactactgcctcagagaccaagctgctgcaaccggagaaggagatctattctacaaagtgaagtacttggcttgggacatggaaaccgtcgtgggagacctcatggcgaccgagctgaggcttggcctgccgggcaccgtggacgactgcagccagcaccagcagcagacccagctgaaggtggccgcgccgccgtccaaccctactaggggcaagaagcgcgccgccgccgaggaggaggcagacaagcgcgacgcggaggcagcacccccggcggccaaggcgcccgtggtcggatggccaccggtgaggtcgtaccgggaagagctgcttccagcaggcaaagcagcaggccgtcagcagcagcagcagcaaggcggccgacaaagaggatgctgcggcgccggcgccgaggctgcacggcttccgcagccgcctcaaacgccaccgccggcgccggggccggctcattcgtcaaggttagcatggacggcgccccgtacctgcggaagctcgacctgaggatgtacaagggctaccgggagctccgggaggccctggaggccatgttcgtctcctccggcagcgccaacgacaaaaacctgtcggagtttgccgtcacctaccaggacaaggacggcgacctcatgctcgtcggagacgtgccgttcgagatgttcgctagcacctgcaggaagctgaggatcatgaagagatctgaagccacaggcctgggatcggcgaggcaatgaagaaggtctgaccacgaccgagggcccgacaacgttcatgtcgatctctctctctctctctctctctctcttctttttttttttgccccattattttattttgttcttcttgttcgggagaccccaagccaaaaggatgagcttggtggcgcatcaatctacaaagcgcatgcatatacgcggatgtgtgtgcggctttggttctgtaagacgacgactagtagagctaggtctttttttagcagcagcacagaaggagatgcatgctgatgacgaggttgtttcggcttagctctccatatgctgtgtttgtacaaaccaaacaatacagttatcttcaccgtcgttgatccctt

SEQ ID NO: 4219 - protein, 187 aa, Zea mays subsp. mays
  peptide (1)..(187): Ceres Seq. ID no. 12356180
THNTSHQLITSISFYYCLRDQAAATGEGDLFYKVKYLAWDMETVVGDLMATELRLGLPGTVDDCSQHQQQTQLKVAAPPSNPTRGKKRAAAEEEADKRDAEAAPPAAKAPVVGWPPVRSYREELLPAGKAAGRQQQQQQGGRQRGCCGAGAEAARLPQPPQTPPPAPGPAHSSRLAWTAPRTCGSST

SEQ ID NO: 4220 - protein, 151 aa, Zea mays subsp. mays
  peptide (1)..(151): Ceres Seq. ID no. 12356181
MATGEVVPGRAASSRQSSRPSAAAAARRPTKRMLRRRRRGCTASAAASNATAGAGAGSFVKVSMDGAPYLRKLDLRMYKGYRELREALEAMFVSSGSANDKNLSEFAVTYQDKDGDLMLVGDVPFEMFASTCRKLRIMKRSEATGLGSARQ

SEQ ID NO: 4221 - protein, 147 aa, Zea mays subsp. mays
  peptide (1)..(147): Ceres Seq. ID no. 12356182
METVVGDLMATELRLGLPGTVDDCSQHQQQTQLKVAAPPSNPTRGKKRAAAEEEADKRDAEAAPPAAKAPVVGWPPVRSYREELLPAGKAAGRQQQQQQGGRQRGCCGAGAEAARLPQPPQTPPPAPGPAHSSRLAWTAPRTCGSST

SEQ ID NO: 4222 - DNA, 1021 bp, Zea mays subsp. mays
  misc_feature (1)..(1021): Ceres Seq. ID no. 12403002
  misc_feature (1)..(1021): Ortholog of  Ceres SEQ ID NO 15173807 as cited in SEQ ID NO 57520
ctctcctctcatcctaccctaaccgccgccgccgccgcccgccgtcctttcctgtataataaaacctcaaatcgtctctctcccgtcctcccctccaccgccgcagccgccgccgtacctcctcctcccgcgcagcagccaccgccaccgccggaaatgaagaccatcctggccacggagacgatggacatccccgagggggtcacggtcacggtggcggccaagctggtgacggtggaggggccgcgcggtaagctcacccgcaacttcaagcacctcaacctcgacttccagctgcaggacggcggtcgcaagctcaaggtcgacgcctggtttggcacccgccgaaccatggccgccatccgcaccgccatctcccacgtccagaacctcatcgcaggcgtcaccaagggtttccgctacaagatgcggttcgtctacgctcactttcccatcaacgcctccatcaccaacgccaactccgccattgagatcagaaacttcctcggggagaagaaggtcaggaaggttgatatgcttgaaggtgtgaccatcttgcgttcagagaaggtcaaggatgagcttgttcttgaaggcaatgatgttgagcttgtctctcgctccgctgctctcataaaccagaaatgccatgtcaagaagaaggatatccggaagttcttggacggtatctatgtgagtgacaagggccccatctttgatgagcaatgagctgccctttgttcctggctagcaaaagccgtgttaggctgtggccagtagactgtttgcggagtggatgtagttggaaataggagatgggatgagtaaggttgctggagataagctttagcaagagtttatgagatggacctttattttgtgttgtgtttttttttgtttgagttcagttaactacatctttgcaagttggttggatctgaagttctgtactgtcttaggatgttattatgtaacccgaggtggacattgtttgtgatcatattcttcacctaagtacctc

SEQ ID NO: 4223 - protein, 242 aa, Zea mays subsp. mays
  peptide (1)..(242): Ceres Seq. ID no. 12403003
LSSHPTLTAAAAARRPFLYNKTSNRLSPVLPSTAAAAAVPPPPAQQPPPPPEMKTILATETMDIPEGVTVTVAAKLVTVEGPRGKLTRNFKHLNLDFQLQDGGRKLKVDAWFGTRRTMAAIRTAISHVQNLIAGVTKGFRYKMRFVYAHFPINASITNANSAIEIRNFLGEKKVRKVDMLEGVTILRSEKVKDELVLEGNDVELVSRSAALINQKCHVKKKDIRKFLDGIYVSDKGPIFDEQ

SEQ ID NO: 4224 - protein, 190 aa, Zea mays subsp. mays
  peptide (1)..(190): Ceres Seq. ID no. 12403004
MKTILATETMDIPEGVTVTVAAKLVTVEGPRGKLTRNFKHLNLDFQLQDGGRKLKVDAWFGTRRTMAAIRTAISHVQNLIAGVTKGFRYKMRFVYAHFPINASITNANSAIEIRNFLGEKKVRKVDMLEGVTILRSEKVKDELVLEGNDVELVSRSAALINQKCHVKKKDIRKFLDGIYVSDKGPIFDEQ

SEQ ID NO: 4225 - protein, 181 aa, Zea mays subsp. mays
  peptide (1)..(181): Ceres Seq. ID no. 12403005
MDIPEGVTVTVAAKLVTVEGPRGKLTRNFKHLNLDFQLQDGGRKLKVDAWFGTRRTMAAIRTAISHVQNLIAGVTKGFRYKMRFVYAHFPINASITNANSAIEIRNFLGEKKVRKVDMLEGVTILRSEKVKDELVLEGNDVELVSRSAALINQKCHVKKKDIRKFLDGIYVSDKGPIFDEQ

SEQ ID NO: 4226 - DNA, 1006 bp, Zea mays subsp. mays
  misc_feature (1)..(1006): Ceres Seq. ID no. 13495435
  misc_feature (1)..(1006): Ortholog of  Ceres SEQ ID NO 13595263 as cited in SEQ ID NO 56712
  misc_feature (1)..(1006): Ortholog of  Ceres SEQ ID NO 13655622 as cited in SEQ ID NO 64213
aaacatggaatggtagtgggggggtggtttcggatcgggactccacagcttttggcggcgtattctagtatacaccaaaaaagagaaagaaaagcaccgaaaaactagcaaaccctacctcctctcctcccctcccctcctcggcggcggaatgtccgaccgccgccgcgacaaggagaagccccgcgaccgcgacatcgaccgtcatcgcgaccgagaccgcgacatcgaccgtcatcgcgaccgagaccgcgaccgggaccgggacagggacagggacagggatcgcgagcgagaccaccgccgcgagcgcgagcgcgagcggaagcgctcccgctcccggtccccgtcggcggatcgggaccgctcccaccgccgccactctcattcgcaccgaggccgtccttccccctctcccgacgccggccgccacaagcgccgccgcgaggcgtcccctgcctccgcggaccatcaccataaggaggataagaaggctgccgactctcacgcgacacccggcggaggggacatcgcggccgcggccgctgcggtgggtgacggcgacgtgaatgcggaggaactggagatgatgaagatgatgggcattcccgtcggtttcgactccaccaaggggaagcacgtgcccgacgccgacgtcagcggggtgcgtgccgtcaccaagcgccagccgcgccagtacatgaaccgccgcggcggattcaaccgccctctgccgcctgagcgcaaccgctaaggatgggaaaaggatcatgcgccaacacaaggatgtgctgatttctgggtagcagttactctgttactggacagtgtagtgagcatgtataaaccttgatggctatttaatttgcaaaacactgtagaatgatttcccgttcccttttgtcatcgtttattctgtgggcattccaggaaaacagaatttggtggatcattttgaaactgtggctttacagctttaacatgatgtttctggctttctgcgtgc

SEQ ID NO: 4227 - protein, 200 aa, Zea mays subsp. mays
  peptide (1)..(200): Ceres Seq. ID no. 13495436
MSDRRRDKEKPRDRDIDRHRDRDRDIDRHRDRDRDRDRDRDRDRDRERDHRRERERERKRSRSRSPSADRDRSHRRHSHSHRGRPSPSPDAGRHKRRREASPASADHHHKEDKKAADSHATPGGGDIAAAAAAVGDGDVNAEELEMMKMMGIPVGFDSTKGKHVPDADVSGVRAVTKRQPRQYMNRRGGFNRPLPPERNR

SEQ ID NO: 4228 - DNA, 985 bp, Zea mays subsp. mays
  misc_feature (1)..(985): Ceres Seq. ID no. 13495278
  misc_feature (1)..(985): Ortholog of  Ceres SEQ ID NO 14307896 as cited in SEQ ID NO 66915
acagaagggcggagcagtgccagtgtactggccgccaccactcgccactcgtccccctccccccgaaagccggcacgagccctcccttcccttcctccaacctgttccgatccgccccgagccggctggccatggcgatcagggctggccgctcggccctccacctccacgctctcgctttcctcatcctcgccgcctccccctgcctccaagtccaagctctagtggaccatcgcaaacagatatctgactggggtaggcaacccaactttgaactgcagaatatgtcctcgagtcaaagggatggctctcatctcttgggcagatcaaaggaaataacacacaggaaactaagggtgagaattggtgtaaggaacaaaatggaagtagtgcagcaggatgatgaagcattagttaaacttgagaacacaggtattgaacgctcaaaagctgttgattctgcagtgctgggaaaatatagcatctggagacgtgaaaatgaaaatgagaaggcagattcaagggttcgtctgatgcgagatcaaatgatcatggccagaatatattctgttcttgccaaatctagggacaaacttgatctctatcaggagctgctagcaagactcaaggaaagccagcgctcccttggggaagctactgctgatgccgaacttccgaagagtgcttcagatagaatcaaagcaatgggccaagttttatcaaaagcaagggatctgttgtatgattgcaaggaaattacccagcgtttgagagcaatgcttcagtcagcagatgagcaggtccggagcttgaagaagcagagcaccttccttagccagcttgcagctaagacaatcccaaatggcatccattgtctttctatgcgcttaacaattgattattaccttctctctccagagaaaagaaagttccccaatagcgagaacttggaaaatcctgatctttaccattatgctcttttctc

SEQ ID NO: 4229 - protein, 327 aa, Zea mays subsp. mays
  peptide (1)..(327): Ceres Seq. ID no. 13495279
RRAEQCQCTGRHHSPLVPLPPKAGTSPPFPSSNLFRSAPSRLAMAIRAGRSALHLHALAFLILAASPCLQVQALVDHRKQISDWGRQPNFELQNMSSSQRDGSHLLGRSKEITHRKLRVRIGVRNKMEVVQQDDEALVKLENTGIERSKAVDSAVLGKYSIWRRENENEKADSRVRLMRDQMIMARIYSVLAKSRDKLDLYQELLARLKESQRSLGEATADAELPKSASDRIKAMGQVLSKARDLLYDCKEITQRLRAMLQSADEQVRSLKKQSTFLSQLAAKTIPNGIHCLSMRLTIDYYLLSPEKRKFPNSENLENPDLYHYALF

SEQ ID NO: 4230 - protein, 284 aa, Zea mays subsp. mays
  peptide (1)..(284): Ceres Seq. ID no. 13495280
MAIRAGRSALHLHALAFLILAASPCLQVQALVDHRKQISDWGRQPNFELQNMSSSQRDGSHLLGRSKEITHRKLRVRIGVRNKMEVVQQDDEALVKLENTGIERSKAVDSAVLGKYSIWRRENENEKADSRVRLMRDQMIMARIYSVLAKSRDKLDLYQELLARLKESQRSLGEATADAELPKSASDRIKAMGQVLSKARDLLYDCKEITQRLRAMLQSADEQVRSLKKQSTFLSQLAAKTIPNGIHCLSMRLTIDYYLLSPEKRKFPNSENLENPDLYHYALF

SEQ ID NO: 4231 - protein, 233 aa, Zea mays subsp. mays
  peptide (1)..(233): Ceres Seq. ID no. 13495281
MSSSQRDGSHLLGRSKEITHRKLRVRIGVRNKMEVVQQDDEALVKLENTGIERSKAVDSAVLGKYSIWRRENENEKADSRVRLMRDQMIMARIYSVLAKSRDKLDLYQELLARLKESQRSLGEATADAELPKSASDRIKAMGQVLSKARDLLYDCKEITQRLRAMLQSADEQVRSLKKQSTFLSQLAAKTIPNGIHCLSMRLTIDYYLLSPEKRKFPNSENLENPDLYHYALF

SEQ ID NO: 4232 - DNA, 1233 bp, Zea mays subsp. mays
  misc_feature (1)..(1233): Ceres Seq. ID no. 12372784
  misc_feature (1)..(1233): Ortholog of  Ceres SEQ ID NO 13596392 as cited in SEQ ID NO 62136
  misc_feature (1)..(1233): Ortholog of  Ceres SEQ ID NO 13654360 as cited in SEQ ID NO 67980
  misc_feature (1)..(1233): Ortholog of  Ceres SEQ ID NO 13596394 as cited in SEQ ID NO 68561
ccgagtcgtcttcccgttgatcggcaaagagactttagggttttagcggcttctatttctgagcgagggtttatccgccaggggcggcgcgacgcggcggcagttgagctgggatttccttcccatcccgttcccttccaggcgaggcgatggacgaggcggcggtcgacgacctcatccggcggctcctcgaggcccgcggcgggcgcaccccgcgcaacgcgcaggtgaccgacgctgagatccggcgcctctgcgccgccgccaaggatgtgttcctctcccagcccaacctcctggagctcgaggcccccatcaagatatgcggggatgtccatggtcagtattcagaccttcttcgattatttgagtatggtggctatccaccagatgcaaattatctgttcctcggtgactatgttgatagggggaaacagagcatagaaacaatatgccttctcttggcatacaagataaagtacccagaaaacttctttcttctcaggggaaaccatgaatgcgcctcaatcaaccgaatatatgggttttttgatgagtgtaagaggagattcaatgttcgtatctggaagatattcaccgagtgttttaactgcctcccagtggctgcgcttattgatgacaagatcttttgcatgcatggagggttgtctcctgagctaaagagcatggaccaaatacgtaacatttctcgtcctgtggatgttcctgatgttggtctcctatgtgatctgttatggtcggaccctgataaggagattgataggtggggtgagaatgacaggggtgtttcctacacctttggagctgacgtagttgccgagtttcttcagaaacatgatctagatttgatctgcagggcccaccaggtcgtagaggatggttatgaatttttcgcaaaacgccagcttgtaacaatattctcagctccgaactactgtggagagttcgacaatgctggtgcactgatgagcattgacaactccctagtatgctcgttccagatactcaagccttctgagaagaaaggaaaagcaggaaatgggaacatgccaaagcccggtacacctcccaggaagataaaaataagtgttacccatatttagccaggttctcgctatcaatctgcatttgcgaagttgtgattaagtgctcccccaaacttgtggtagtttttttttttggtgagcttaacacgattttaaattgtggacc

SEQ ID NO: 4233 - protein, 324 aa, Zea mays subsp. mays
  peptide (1)..(324): Ceres Seq. ID no. 12372785
MDEAAVDDLIRRLLEARGGRTPRNAQVTDAEIRRLCAAAKDVFLSQPNLLELEAPIKICGDVHGQYSDLLRLFEYGGYPPDANYLFLGDYVDRGKQSIETICLLLAYKIKYPENFFLLRGNHECASINRIYGFFDECKRRFNVRIWKIFTECFNCLPVAALIDDKIFCMHGGLSPELKSMDQIRNISRPVDVPDVGLLCDLLWSDPDKEIDRWGENDRGVSYTFGADVVAEFLQKHDLDLICRAHQVVEDGYEFFAKRQLVTIFSAPNYCGEFDNAGALMSIDNSLVCSFQILKPSEKKGKAGNGNMPKPGTPPRKIKISVTHI

SEQ ID NO: 4234 - DNA, 506 bp, Zea mays subsp. mays
  misc_feature (1)..(506): Ceres Seq. ID no. 12637912
  misc_feature (1)..(506): Ortholog of  Ceres SEQ ID NO 15178246 as cited in SEQ ID NO 52038
gttagggttattttttctactctgcctctgctctcacctgtttcgctgctcgcccgatctcgcgctgccggcagcgatctgagatcgagcgaagctaagctttttcatcgagatggcgcttgtactgcatgctaacagtggtaacaaaaatgcattcaaaacactaattgccgcagaatacagcggtgtcaaggttgagttggtgaaggactttcaaatgggtgtctcccacaaaactccagagttcctcaagatgaaccctattgggaagattcccgtcctggagactcctgatgatcctgtttttgagagcaatgcaattgcaagatatgttactcgcttgaaggctgataacccactttatggatcttcactgactgattatgcccatattgagcaatggattgactttgctgcnnnagagattgatgcaaacattggaaagtggttgtacccacggatggggttttatccccatgctggtgtggtagaagaatcaactattg

SEQ ID NO: 4235 - protein, 131 aa, Zea mays subsp. mays
  peptide (1)..(131): Ceres Seq. ID no. 13624424
  misc_feature (102)..(102): Xaa is any aa, unknown or other
  misc_feature (103)..(103): Xaa is any aa, unknown or other
MALVLHANSGNKNAFKTLIAAEYSGVKVELVKDFQMGVSHKTPEFLKMNPIGKIPVLETPDDPVFESNAIARYVTRLKADNPLYGSSLTDYAHIEQWIDFAXXEIDANIGKWLYPRMGFYPHAGVVEESTI

SEQ ID NO: 4236 - protein, 96 aa, Zea mays subsp. mays
  peptide (1)..(96): Ceres Seq. ID no. 13624425
  misc_feature (67)..(67): Xaa is any aa, unknown or other
  misc_feature (68)..(68): Xaa is any aa, unknown or other
MGVSHKTPEFLKMNPIGKIPVLETPDDPVFESNAIARYVTRLKADNPLYGSSLTDYAHIEQWIDFAXXEIDANIGKWLYPRMGFYPHAGVVEESTI

SEQ ID NO: 4237 - protein, 84 aa, Zea mays subsp. mays
  peptide (1)..(84): Ceres Seq. ID no. 13624426
  misc_feature (55)..(55): Xaa is any aa, unknown or other
  misc_feature (56)..(56): Xaa is any aa, unknown or other
MNPIGKIPVLETPDDPVFESNAIARYVTRLKADNPLYGSSLTDYAHIEQWIDFAXXEIDANIGKWLYPRMGFYPHAGVVEESTI

SEQ ID NO: 4238 - DNA, 1454 bp, Zea mays subsp. mays
  misc_feature (1)..(1454): Ceres Seq. ID no. 12409971
  misc_feature (1)..(1454): Ortholog of  Ceres SEQ ID NO 14314068 as cited in SEQ ID NO 52242
  misc_feature (1)..(1454): Ortholog of  Ceres SEQ ID NO 14314999 as cited in SEQ ID NO 52342
  misc_feature (1)..(1454): Ortholog of  Ceres SEQ ID NO 15177057 as cited in SEQ ID NO 55817
  misc_feature (1)..(1454): Ortholog of  Ceres SEQ ID NO 13585458 as cited in SEQ ID NO 60907
  misc_feature (1)..(1454): Ortholog of  Ceres SEQ ID NO 13598678 as cited in SEQ ID NO 61508
  misc_feature (1)..(1454): Ortholog of  Ceres SEQ ID NO 12625392 as cited in SEQ ID NO 63315
  misc_feature (1)..(1454): Ortholog of  Ceres SEQ ID NO 13598319 as cited in SEQ ID NO 68758
  misc_feature (1)..(1454): Ortholog of  Ceres SEQ ID NO 12589816 as cited in SEQ ID NO 0
aagagctaagagggaagaacaatcgagctactaataaggtcgtatacatatcttctatatactcctctgaaagttgtgaactccggtcgagcttaaaaacagcagcaatggcgaagctttggacattgctgctggctgcagtggtggtcctctcactcctagtgagccccattgcttgcacccgaaagctcaacaaacccaagccgaagccgggcagctacaggcggccggtcaagccgaagccaaaaccggtcacgggcagctacaagccggcgcctgtggccgccagaagaaaccacacagctacacccacgccatcgccgactgtctacggccccggtggctggctgtcaggcgccggcgccacgtactacggcgcgaccaacggcgacgggagcgacggcggcgcgtgcggctaccagacggccgtcggaaagaagccattcgactcgatgatcgccgccgggagcacgccactgtacaggggaggcgagggctgcggcgcctgctacgaggtgaaatgcacgaccaacgccgcgtgctccggccagcccgtgaccatcgtaatcaccgaccagtcccctggcgggctgttccccggcgaggtcgagcactttgacatgagcggcaccgccatgggcgccatggcccggcccggcatggccgacaagctccgcgctggcggcgtgctcaggatcctgtacaggagggtgccgtgcaagtacaccggcgtcaacatcgcgttcaaggtggatcagggcgcgaacccgtactacttcgacgtgctcatcgagttcgaggacgacgacggcgacctcagcgccgtggacctcatggaggccggcagcggcgtctggactcctatggcgcacaactggggcgccacgtggcgcctcaacaacggcaggaagctcaaagcgccgttcgggctccggctcacctccgactcccgcagggtgctcgtcgccaacaacgccatcccggccgcgtggaagcccggcaagacctaccgctccttggtcaactacccctgaaaagagaaataccgacaagtggatggcgtgtattgtgcgtccgggtgttgcgagtggcggcggtgtactactggtgtcggaaaacagaagagaatgaaagaggaggttgaagaagagaataatgtccttcttccctccctggacggtctctgcagtccccaaaagtgatgtgtgacggtgttagtcaaatcatgccggtaatttgatacttcatctcgatttgagttttactgctatactactgtgattgaggtaagacagaatcttatttcttgaccacgtagtacataaactacaaagcatgcccgttgcgttggtaattagactcttgtagtggtttttgccaatatcaagatgtatgtagaatgtgtgtgcatgcgttcacagtgatgagaatatacatgcgtgtatctgatcctg

SEQ ID NO: 4239 - protein, 343 aa, Zea mays subsp. mays
  peptide (1)..(343): Ceres Seq. ID no. 12409972
ELRGKNNRATNKVVYISSIYSSESCELRSSLKTAAMAKLWTLLLAAVVVLSLLVSPIACTRKLNKPKPKPGSYRRPVKPKPKPVTGSYKPAPVAARRNHTATPTPSPTVYGPGGWLSGAGATYYGATNGDGSDGGACGYQTAVGKKPFDSMIAAGSTPLYRGGEGCGACYEVKCTTNAACSGQPVTIVITDQSPGGLFPGEVEHFDMSGTAMGAMARPGMADKLRAGGVLRILYRRVPCKYTGVNIAFKVDQGANPYYFDVLIEFEDDDGDLSAVDLMEAGSGVWTPMAHNWGATWRLNNGRKLKAPFGLRLTSDSRRVLVANNAIPAAWKPGKTYRSLVNYP

SEQ ID NO: 4240 - protein, 308 aa, Zea mays subsp. mays
  peptide (1)..(308): Ceres Seq. ID no. 12409973
MAKLWTLLLAAVVVLSLLVSPIACTRKLNKPKPKPGSYRRPVKPKPKPVTGSYKPAPVAARRNHTATPTPSPTVYGPGGWLSGAGATYYGATNGDGSDGGACGYQTAVGKKPFDSMIAAGSTPLYRGGEGCGACYEVKCTTNAACSGQPVTIVITDQSPGGLFPGEVEHFDMSGTAMGAMARPGMADKLRAGGVLRILYRRVPCKYTGVNIAFKVDQGANPYYFDVLIEFEDDDGDLSAVDLMEAGSGVWTPMAHNWGATWRLNNGRKLKAPFGLRLTSDSRRVLVANNAIPAAWKPGKTYRSLVNYP

SEQ ID NO: 4241 - protein, 193 aa, Zea mays subsp. mays
  peptide (1)..(193): Ceres Seq. ID no. 12409974
MIAAGSTPLYRGGEGCGACYEVKCTTNAACSGQPVTIVITDQSPGGLFPGEVEHFDMSGTAMGAMARPGMADKLRAGGVLRILYRRVPCKYTGVNIAFKVDQGANPYYFDVLIEFEDDDGDLSAVDLMEAGSGVWTPMAHNWGATWRLNNGRKLKAPFGLRLTSDSRRVLVANNAIPAAWKPGKTYRSLVNYP

SEQ ID NO: 4242 - DNA, 1895 bp, Zea mays subsp. mays
  misc_feature (1)..(1895): Ceres Seq. ID no. 12409967
  misc_feature (1)..(1895): Ortholog of  Ceres SEQ ID NO 14307123 as cited in SEQ ID NO 54182
accctcataccacactcaaactcgcatcctgtggagtttttacatagaagtcgtcacttattgcgccgtggtggatgggcagggggctcgtgtcgaacactcgaacagaaccaccgccattctagaggcatccagtattccagcccaatcctatctttgtattcctctccctcgtctcggaagtctggttcgccgaacagtcccgaacccccgattcactgccgctgccccgtctcgtcctcttcgccagcgaaaaccctagtctaggggacgggagcgcaatccacgcacggcaacatggacgccatccgcaagcagctcgaccagctcatgggggccaaccgcaacggcgatgtacgggaggtcagccgcaagtactatgatcgcgacgtctgccgcctctacctcgccggcctctgcccccacgacctcttccagcttaccaagatggacatgggcccgtgcccgaagctgcactcgctgcaactgcgcaaagaatatgaagaagccaaagccaaagattcagagagcccttaagcggttggaggaagaggatgctaaggcagctattgctatttctgttactgaggttacacagactaaagaagtaatggagttatccaaacaaattaggcagaagatgaaggatattgatgcttttgatcttgagggtaacaccgaggggaaaattcgggccactgaagaacttgacaagctaaaagaacaaagggcagaagagcaggcaaagatgttacttgaagctttcaacaaagaccgtgcttctttaataaactctcttcaaaatgccactcaaacaactacacctgtcccccctgctgctccggatgcacggacacaagaaatgataaacgagaaactgaaaaaggcagaagaactaggtgagaatgggatggttgatgaagcccaaaaattgttggatgaggcggaagctctgaagaagctggccacccgaccacaggctgttccagactctacaaaaatgagcgctcatgtccagataactgaccaaaagctgcgcctgtgtgacatatgtggagcattcttgagcgtatatgacagtgaccgtcgcttggcagatcattttggagggaaacttcatatgggttatatgcttatacgtgagagattgtctgaactgcaggaagagaagaacaaaaaacggaagctagaccgagctgagtatgacagaaggtccagggaaaggagcggggaacgtgccagggattcgagcagggatcgctacatagaccgcagcagcagccgtgacagggagtatgaccgcagaagaagccatgatcgctaccatgacagggaaagagagagagattccaggcagtctcgtagttatgattccagaagccaccgcaggtcatattcaccaaggggaagttctagggattatgatcgatctgggcgtcatgaacgccgtgatcggtactaggagcaaggaagcctccttgaaatttagggtactagattgcgttgcctcagggctagtttggccacctcatttttccaaggattgacaaccttatttttttaagggatttctattttcctaagaaaaattagttcattttcccctgggagggaataccttggggaaatggaggtgccaaactagcctaagtgttgttcgggaattctaagagggggcttaggtccaactggagaaaggcatcagctctttgcattataactaagggataggatctgacgtaatctatgcgtatcatattgttgtgttagctggtgttcatcgtgtaaacacaatgtggtggcgacgtgtcatgctttaatacgcttatatgcatttgaattaagttaatctgcccttgccatgtgtcttttattctggtaataagtttgtactc

SEQ ID NO: 4243 - protein, 369 aa, Zea mays subsp. mays
  peptide (1)..(369): Ceres Seq. ID no. 12409968
MYGRSAASTMIATSAASTSPASAPTTSSSLPRWTWARARSCTRCNCAKNMKKPKPKIQRALKRLEEEDAKAAIAISVTEVTQTKEVMELSKQIRQKMKDIDAFDLEGNTEGKIRATEELDKLKEQRAEEQAKMLLEAFNKDRASLINSLQNATQTTTPVPPAAPDARTQEMINEKLKKAEELGENGMVDEAQKLLDEAEALKKLATRPQAVPDSTKMSAHVQITDQKLRLCDICGAFLSVYDSDRRLADHFGGKLHMGYMLIRERLSELQEEKNKKRKLDRAEYDRRSRERSGERARDSSRDRYIDRSSSRDREYDRRRSHDRYHDRERERDSRQSRSYDSRSHRRSYSPRGSSRDYDRSGRHERRDRY

SEQ ID NO: 4244 - protein, 360 aa, Zea mays subsp. mays
  peptide (1)..(360): Ceres Seq. ID no. 12409969
MIATSAASTSPASAPTTSSSLPRWTWARARSCTRCNCAKNMKKPKPKIQRALKRLEEEDAKAAIAISVTEVTQTKEVMELSKQIRQKMKDIDAFDLEGNTEGKIRATEELDKLKEQRAEEQAKMLLEAFNKDRASLINSLQNATQTTTPVPPAAPDARTQEMINEKLKKAEELGENGMVDEAQKLLDEAEALKKLATRPQAVPDSTKMSAHVQITDQKLRLCDICGAFLSVYDSDRRLADHFGGKLHMGYMLIRERLSELQEEKNKKRKLDRAEYDRRSRERSGERARDSSRDRYIDRSSSRDREYDRRRSHDRYHDRERERDSRQSRSYDSRSHRRSYSPRGSSRDYDRSGRHERRDRY

SEQ ID NO: 4245 - protein, 320 aa, Zea mays subsp. mays
  peptide (1)..(320): Ceres Seq. ID no. 12409970
MKKPKPKIQRALKRLEEEDAKAAIAISVTEVTQTKEVMELSKQIRQKMKDIDAFDLEGNTEGKIRATEELDKLKEQRAEEQAKMLLEAFNKDRASLINSLQNATQTTTPVPPAAPDARTQEMINEKLKKAEELGENGMVDEAQKLLDEAEALKKLATRPQAVPDSTKMSAHVQITDQKLRLCDICGAFLSVYDSDRRLADHFGGKLHMGYMLIRERLSELQEEKNKKRKLDRAEYDRRSRERSGERARDSSRDRYIDRSSSRDREYDRRRSHDRYHDRERERDSRQSRSYDSRSHRRSYSPRGSSRDYDRSGRHERRDRY

SEQ ID NO: 4246 - DNA, 770 bp, Zea mays subsp. mays
  misc_feature (1)..(770): Ceres Seq. ID no. 12348995
  misc_feature (1)..(770): Ortholog of  Ceres SEQ ID NO 13595226 as cited in SEQ ID NO 56331
  misc_feature (1)..(770): Ortholog of  Ceres SEQ ID NO 13661903 as cited in SEQ ID NO 61722
  misc_feature (1)..(770): Ortholog of  Ceres SEQ ID NO 15173940 as cited in SEQ ID NO 61934
attgcacccttggctcctactcactctctctccccatccgcgccagtccaaccaagtcagcacccgcgcgcggcaaggagttcacgcccatggcgagcaccaacatggcgtcggccacctcgcggttcatgctggccgcgggcgtgcccaccgccagtagcggcagcggccgcgtcagcttcgcctcggcgcccaaccggcttggcaggaggcttgtggtccgggccgatgaggagtccccggcagagccggcgccgacggcggaaggggagggcgccgtggccaccaagcccaaggccgagaagccgccgccgatcgggcccaagagaggcgccaaggtgaagatcctgaggcgggagtcctactggtacaacgggatcggcaacgtcgtcaccgtcgatcaggatcctaacacccgttacccggtggtggtgcggttcaacaaggtgaactacgccggcgtgtctaccaacaactacgccttggacgagatcctcgaggtgaaatgagtgaggccagtctgctcaaggaccccatgctcctgtgtgatttgtagttgtgaagtgaggctgctgcctagctgctacgttagctgctagcgtcacaacatcaatcttgtaatagcttaatctccacaatcatcatgtaatttattgcatgcttcattcaccgtggactcaataatctctcttgctctaaaatcgatgtattcgtttttcttgtgattttgtacatgcacataaatttctctctggaaacattgtttgtgc

SEQ ID NO: 4247 - protein, 168 aa, Zea mays subsp. mays
  peptide (1)..(168): Ceres Seq. ID no. 12348996
CTLGSYSLSLPIRASPTKSAPARGKEFTPMASTNMASATSRFMLAAGVPTASSGSGRVSFASAPNRLGRRLVVRADEESPAEPAPTAEGEGAVATKPKAEKPPPIGPKRGAKVKILRRESYWYNGIGNVVTVDQDPNTRYPVVVRFNKVNYAGVSTNNYALDEILEVK

SEQ ID NO: 4248 - protein, 139 aa, Zea mays subsp. mays
  peptide (1)..(139): Ceres Seq. ID no. 12348997
MASTNMASATSRFMLAAGVPTASSGSGRVSFASAPNRLGRRLVVRADEESPAEPAPTAEGEGAVATKPKAEKPPPIGPKRGAKVKILRRESYWYNGIGNVVTVDQDPNTRYPVVVRFNKVNYAGVSTNNYALDEILEVK

SEQ ID NO: 4249 - protein, 134 aa, Zea mays subsp. mays
  peptide (1)..(134): Ceres Seq. ID no. 12348998
MASATSRFMLAAGVPTASSGSGRVSFASAPNRLGRRLVVRADEESPAEPAPTAEGEGAVATKPKAEKPPPIGPKRGAKVKILRRESYWYNGIGNVVTVDQDPNTRYPVVVRFNKVNYAGVSTNNYALDEILEVK

SEQ ID NO: 4250 - DNA, 1320 bp, Zea mays subsp. mays
  misc_feature (1)..(1320): Ceres Seq. ID no. 12381241
  misc_feature (1)..(1320): Ortholog of  Ceres SEQ ID NO 14302514 as cited in SEQ ID NO 65814
ctgcaagaatggatcgcgagacccaagtagagtagaccaaagacaaaggaaagcgagggccaccatcccccaaacccgtgagaaatcgaatcgagaagggaagagcacgcgccgtcgccagcaccgcgtccgccatggccgcctcctccccccgcgcgttgcaatcgctggggtccgccgcctcccgcttcctccacgcgcggggcttcgccgcggcggccgccgccgcgccctcgccggcggtcttcgtcgacaagagcacccgcgtgatctgtcagggcatcacggggaagaacggcaccttccacaccgagcaggccatcgagtacggcaccaacatggttggtggagtgactcctaagaaaggtggaactgaacatttagggctcccagtgtttaactctgtagcagaagctaaggctgaaacaaaagccaatgcaactgttatatatgttccaccaccatttgccgccgccgctataatggaggcaatggaggctgagctcgaccttgccgtctgcattacagaaggaatacctcagcatgacatggtgaaagtgaaggctgcactaaacagccagtctaaaactcgattgattgggccaaattgccctggtatcattaagcctggtgagtgtaaaattggaatcatgccaggttacatccacaagcctgggcgtattgggatcgtatctcgttctggtactttgacatatgaagcggtgtttcaaacaacagctgtaggattgggtcagtcaacttgtgtaggcattggtggtgacccgttcaacggcacaaattttgttgattgccttgaaaagttcgttaacgaccctcagacagaaggtattgttctcattggtgaaattggaggtacggctgaggaggatgctgcgacattcatccaggaaagcaaaacacaaaagcctgttgttgcattcattgctggacttacggcacccccgggccgtcgcatgggtcatgctggagctatcgtggcaggaggaaagggtactgcccaggacaaaatcaaggcactcagagaggcaggtgttaccgttgtcgagtcaccagcgaagattggctctaccatgtttgaaatcttcaagcagcgtggaatggtagaatagacgatggtacagtagagacattgagaaaccgcattttgatgctcatgggcaattgcgagcaattccttccatggcctcaaacaaaactaatgaggctaccttttcttacgtgccttctgtttggaagatggcctgacttcacctggatcaccttccaatgagctcatttccaataagacgtttcagagtc

SEQ ID NO: 4251 - protein, 331 aa, Zea mays subsp. mays
  peptide (1)..(331): Ceres Seq. ID no. 12381242
MAASSPRALQSLGSAASRFLHARGFAAAAAAAPSPAVFVDKSTRVICQGITGKNGTFHTEQAIEYGTNMVGGVTPKKGGTEHLGLPVFNSVAEAKAETKANATVIYVPPPFAAAAIMEAMEAELDLAVCITEGIPQHDMVKVKAALNSQSKTRLIGPNCPGIIKPGECKIGIMPGYIHKPGRIGIVSRSGTLTYEAVFQTTAVGLGQSTCVGIGGDPFNGTNFVDCLEKFVNDPQTEGIVLIGEIGGTAEEDAATFIQESKTQKPVVAFIAGLTAPPGRRMGHAGAIVAGGKGTAQDKIKALREAGVTVVESPAKIGSTMFEIFKQRGMVE

SEQ ID NO: 4252 - protein, 263 aa, Zea mays subsp. mays
  peptide (1)..(263): Ceres Seq. ID no. 12381243
MVGGVTPKKGGTEHLGLPVFNSVAEAKAETKANATVIYVPPPFAAAAIMEAMEAELDLAVCITEGIPQHDMVKVKAALNSQSKTRLIGPNCPGIIKPGECKIGIMPGYIHKPGRIGIVSRSGTLTYEAVFQTTAVGLGQSTCVGIGGDPFNGTNFVDCLEKFVNDPQTEGIVLIGEIGGTAEEDAATFIQESKTQKPVVAFIAGLTAPPGRRMGHAGAIVAGGKGTAQDKIKALREAGVTVVESPAKIGSTMFEIFKQRGMVE

SEQ ID NO: 4253 - protein, 215 aa, Zea mays subsp. mays
  peptide (1)..(215): Ceres Seq. ID no. 12381244
MEAMEAELDLAVCITEGIPQHDMVKVKAALNSQSKTRLIGPNCPGIIKPGECKIGIMPGYIHKPGRIGIVSRSGTLTYEAVFQTTAVGLGQSTCVGIGGDPFNGTNFVDCLEKFVNDPQTEGIVLIGEIGGTAEEDAATFIQESKTQKPVVAFIAGLTAPPGRRMGHAGAIVAGGKGTAQDKIKALREAGVTVVESPAKIGSTMFEIFKQRGMVE

SEQ ID NO: 4254 - DNA, 1163 bp, Zea mays subsp. mays
  misc_feature (1)..(1163): Ceres Seq. ID no. 12406669
  misc_feature (1)..(1163): Ortholog of  Ceres SEQ ID NO 12625306 as cited in SEQ ID NO 62387
ctttttttcggcctttccctcccatatactcgccgtcggccagcggatctaatcggggcgggcgcgatggctgggcagaaccagcggctcaacgtcgtgccgacggtgacgatgctcggcgtcatgaaggctcggctcgtcggcgcgacccgcggccacgcgctgctgaagaagaagtccgacgcgctgacggtccagttccgcgccatcctcaagaagatcgtcgccgccaaggagtcgatgggcgagacgatgcgcgcctcctccttctccctcgccgaggccaagtacgtcgctggcgacggcgtccgccacgtcatcctccagtccgtccgcgcggcatccgtccgcgtccgctcccaccaggagaacgtggccggggtcaagctccccaagttcacccacttcgtcgaccccgccgcggcctccgggggcccctccaacgcgtccccgagcctcacgggcctggcccgcggcgggcagcaggtcgccgcctgcctctccgcgcacgtcaaggccatcgaggtgctcgtcgagctcgcatctctgcaaacctccttcctcactctcgacgaggccatcaagaccaccaaccgccgcgtcaacgcgctcgagaacgtcgtcaagcccaggatcgagaacaccatcagctacatcaagggggagctcgacgagctcgagcgcgaggacttcttcaggctcaagaagatccagggctacaagaagagggagatcgagcgccagatggccgccgccaggctatttgcggaggaacagcttgccgaggatctcgcgcttaagaggggtatctccgtgggggctgcggcaaacctgctggttgctggtggggagaaggacgacgacatcatcttctgaccactccttccatggccatccagtcattcaatcgtggcagaaacaataagttgatgctggagctccagaattgtatctgtttatagaatgatggagattttgattcagtaatctggagtctagccatccgagatcctcaataatctgtacctggaaaccaaacagtgccaagtaacttttacggagcgttatgtgcagctcgtgtagaaaattcaattgaaccgtatttcctgtcgtgtaccttccagtaccgtattatattatatatttattattcaattggacct

SEQ ID NO: 4255 - protein, 291 aa, Zea mays subsp. mays
  peptide (1)..(291): Ceres Seq. ID no. 12406670
LFFGLSLPYTRRRPADLIGAGAMAGQNQRLNVVPTVTMLGVMKARLVGATRGHALLKKKSDALTVQFRAILKKIVAAKESMGETMRASSFSLAEAKYVAGDGVRHVILQSVRAASVRVRSHQENVAGVKLPKFTHFVDPAAASGGPSNASPSLTGLARGGQQVAACLSAHVKAIEVLVELASLQTSFLTLDEAIKTTNRRVNALENVVKPRIENTISYIKGELDELEREDFFRLKKIQGYKKREIERQMAAARLFAEEQLAEDLALKRGISVGAAANLLVAGGEKDDDIIF

SEQ ID NO: 4256 - protein, 269 aa, Zea mays subsp. mays
  peptide (1)..(269): Ceres Seq. ID no. 12406671
MAGQNQRLNVVPTVTMLGVMKARLVGATRGHALLKKKSDALTVQFRAILKKIVAAKESMGETMRASSFSLAEAKYVAGDGVRHVILQSVRAASVRVRSHQENVAGVKLPKFTHFVDPAAASGGPSNASPSLTGLARGGQQVAACLSAHVKAIEVLVELASLQTSFLTLDEAIKTTNRRVNALENVVKPRIENTISYIKGELDELEREDFFRLKKIQGYKKREIERQMAAARLFAEEQLAEDLALKRGISVGAAANLLVAGGEKDDDIIF

SEQ ID NO: 4257 - protein, 265 aa, Zea mays subsp. mays
  peptide (1)..(265): Ceres Seq. ID no. 12406672
FFRPFPPIYSPSASGSNRGGRDGWAEPAAQRRADGDDARRHEGSARRRDPRPRAAEEEVRRADGPVPRHPQEDRRRQGVDGRDDARLLLLPRRGQVRRWRRRPPRHPPVRPRGIRPRPLPPGERGRGQAPQVHPLRRPRRGLRGPLQRVPEPHGPGPRRAAGRRLPLRARQGHRGARRARISANLLPHSRRGHQDHQPPRQRARERRQAQDREHHQLHQGGARRARARGLLQAQEDPGLQEEGDRAPDGRRQAICGGTACRGSRA

SEQ ID NO: 4258 - DNA, 1006 bp, Zea mays subsp. mays
  misc_feature (1)..(1006): Ceres Seq. ID no. 12403719
  misc_feature (1)..(1006): Ortholog of  Ceres SEQ ID NO 12592832 as cited in SEQ ID NO 62031
ctagggtttacatcccttataaaatctcgtcttccacccctgcctccctcagtcgcacttcctccggcggcggcaactcgacggccaaccgcgccaccctgccgcggcagccatggtgcatgttaacttctaccgcaactatgggaagactttcaagaagccaaggcggccgtatgagaaggagcgcctagatgctgagctgaagctggttggtgagtatggcctgcggtgcaagcgcgagctgtggcgcgtgcagtatgccctgagccgtatcaggaatgcagccagggagctgctcaccctggatgagaagaacccacgccgtatctttgagggcgaggcgctcctccgccgcatgaacagatatggtcttcttggtgagggacagaacaagcttgattacgtgcttgctctcactgttgagaacttcctccagcgccgcctccagaccatcgtcttcaagaatggcatggccaagtccatccaccatgctcgtgtcctgatcaggcagcgccacatcagggtgggaaggcagctcgtcaacatcccctcgttcatggtcagggtcgaatcagagaagcacatcgacttctccctcaccagccctctgggtggtggtcctgccggaagggtgaagcggaagaaccagaagaaggcctcagggggcggcgacgctgaggaggacgaggagtaaagggggggggggcacgtaggattctgggacggcaattggtttaaatgtgaggtggacactttagttgttgtgcctgagtgtgtttgtgttgtaatgaatacaaattctactgtggtagacaattttgcacccccactactgacactcgtgtttaaatttaaacattggcatcgtgtctggacacgatgaattgtattctggtttgggtggctatttgctagtttggtctttaggccaatgtttaagactgaaacaaattggtagccaactttactatcttatgctctgctggtctgtttggtgatttttttt

SEQ ID NO: 4259 - protein, 193 aa, Zea mays subsp. mays
  peptide (1)..(193): Ceres Seq. ID no. 12403720
MVHVNFYRNYGKTFKKPRRPYEKERLDAELKLVGEYGLRCKRELWRVQYALSRIRNAARELLTLDEKNPRRIFEGEALLRRMNRYGLLGEGQNKLDYVLALTVENFLQRRLQTIVFKNGMAKSIHHARVLIRQRHIRVGRQLVNIPSFMVRVESEKHIDFSLTSPLGGGPAGRVKRKNQKKASGGGDAEEDEE

SEQ ID NO: 4260 - protein, 112 aa, Zea mays subsp. mays
  peptide (1)..(112): Ceres Seq. ID no. 12403721
MNRYGLLGEGQNKLDYVLALTVENFLQRRLQTIVFKNGMAKSIHHARVLIRQRHIRVGRQLVNIPSFMVRVESEKHIDFSLTSPLGGGPAGRVKRKNQKKASGGGDAEEDEE

SEQ ID NO: 4261 - DNA, 849 bp, Zea mays subsp. mays
  misc_feature (1)..(849): Ceres Seq. ID no. 12434769
  misc_feature (1)..(849): Ortholog of  Ceres SEQ ID NO 13583431 as cited in SEQ ID NO 62318
aagagctccccacctcgcccccccccatccagctccgaccctagggtttccatccggctcttccggaagcttccgaaaatggccaccgacgagctcgcccacgccgtcgcccccgccccggccgggggagaccactccccggccttctcgttcagcatctggccgccgacgcagcgcacgcgggacgcggtggtgcggcgcctcgtggagacgctcgcgggagacaccatcctctgcaagcgctacggtgcggtgccggccgccgacgccgagcccgcggcgcgcgccatcgaggccgaggccttcgacgccgcggcctccacgggaggcgccgccgccgcctccgtggaggaggggatcgaggcgctgcagttctactccaaggaggtgagccgccgcctcctcgacttcgtcaagtcccgctccgcggacgccaaggccggtgacacgccgtcggaggaggcccgggcccctggcgcgcccgaggccgaggccgcccagcccgcggcgtgagcgccggacagccattcgttccgttttgtatttcctgcagcctgtgtttggcttgggtctgagtttgtatgacttgaacgttagctgtttgcacatctatgcaattcttgttcttccatgaatagccccgttctagtgcgtgttcctgtttttctgggaatccctgcccgatcctgaggttgtcaaaccatcgcagcattgacctctgtctgtgtgcagcttcgagtgatggtcgaattgttccggagaccgaattgacaagcaattaagattcctcccatctttcaagccacatttatatgtataataataatctgaccgttgatttgaaattct

SEQ ID NO: 4262 - protein, 170 aa, Zea mays subsp. mays
  peptide (1)..(170): Ceres Seq. ID no. 12434770
KSSPPRPPPSSSDPRVSIRLFRKLPKMATDELAHAVAPAPAGGDHSPAFSFSIWPPTQRTRDAVVRRLVETLAGDTILCKRYGAVPAADAEPAARAIEAEAFDAAASTGGAAAASVEEGIEALQFYSKEVSRRLLDFVKSRSADAKAGDTPSEEARAPGAPEAEAAQPAA

SEQ ID NO: 4263 - protein, 144 aa, Zea mays subsp. mays
  peptide (1)..(144): Ceres Seq. ID no. 12434771
MATDELAHAVAPAPAGGDHSPAFSFSIWPPTQRTRDAVVRRLVETLAGDTILCKRYGAVPAADAEPAARAIEAEAFDAAASTGGAAAASVEEGIEALQFYSKEVSRRLLDFVKSRSADAKAGDTPSEEARAPGAPEAEAAQPAA

SEQ ID NO: 4264 - protein, 129 aa, Zea mays subsp. mays
  peptide (1)..(129): Ceres Seq. ID no. 12434772
RAPHLAPPHPAPTLGFPSGSSGSFRKWPPTSSPTPSPPPRPGETTPRPSRSASGRRRSARGTRWCGASWRRSRETPSSASATVRCRPPTPSPRRAPSRPRPSTPRPPREAPPPPPWRRGSRRCSSTPRR

SEQ ID NO: 4265 - DNA, 1057 bp, Zea mays subsp. mays
  misc_feature (1)..(1057): Ceres Seq. ID no. 12345982
  misc_feature (1)..(1057): Ortholog of  Ceres SEQ ID NO 12634327 as cited in SEQ ID NO 0
aagaaaaaaaagatggtgtgtccccaaacaggacctttgtttaagccgcgccttggctcgtcacgactcacgaccatgatttggtaaagaaagcacaaagcaggaggaagccggcggtgtaggcgacccatggctccacagacgaggagagagaggttggcgggggaggcgcggccgagctcgtcggggctaacaccggcgaagccgggggcggtcgaggtgcagcgccgacgggcgggcagcggttggacgagccgtcggatctccatctacgcctcccgagtctacttcctcctcatcatgctccagatcccgctcttcagggtcccttgtagagctggcacatgcacaactcctattcaagtaacatcatctcagttggtctcaaatgatatattcccagcagctgttgtgaaggccatgctctaccctggagctaccgtgagcagcctaactaaaagcaagacatttcctagttggaatgacctgtttgacatgtacaacctgacagaagcaaaaaatgcttctgcagtagttgatctccagcgtctagagatacttgccggaagctacttctgtgttgctggagcgctcattggcatcataaatcctgggaggatgactttgtttggtacccttttgattatctggggtatggtgaaagaagcactatttgggaagccagtgaacagtgatctgactcaatcaactcatgtctacccaaccattttgattgcacttatctgtgcattcatgtcgataacttacaacgtaaagaagacagcaagaagtagtactcctgtttctatcgctaagccactgataagttctgccaagtcaaaactgaagtagacttacaagtttaatccttgtaactcttttgaaatatttatttatgtgcaaaaaaacaggtttgaggatgacctgatgatgcttttggtgtatatctgactttcaatactgtaacattcagttttctttattgtattaacaattcgcaaggtcacaccgtctgtaatgtttacaaaaaaaaacagataaatcttggttttctccc

SEQ ID NO: 4266 - protein, 240 aa, Zea mays subsp. mays
  peptide (1)..(240): Ceres Seq. ID no. 12345983
MAPQTRRERLAGEARPSSSGLTPAKPGAVEVQRRRAGSGWTSRRISIYASRVYFLLIMLQIPLFRVPCRAGTCTTPIQVTSSQLVSNDIFPAAVVKAMLYPGATVSSLTKSKTFPSWNDLFDMYNLTEAKNASAVVDLQRLEILAGSYFCVAGALIGIINPGRMTLFGTLLIIWGMVKEALFGKPVNSDLTQSTHVYPTILIALICAFMSITYNVKKTARSSTPVSIAKPLISSAKSKLK

SEQ ID NO: 4267 - protein, 183 aa, Zea mays subsp. mays
  peptide (1)..(183): Ceres Seq. ID no. 12345984
MLQIPLFRVPCRAGTCTTPIQVTSSQLVSNDIFPAAVVKAMLYPGATVSSLTKSKTFPSWNDLFDMYNLTEAKNASAVVDLQRLEILAGSYFCVAGALIGIINPGRMTLFGTLLIIWGMVKEALFGKPVNSDLTQSTHVYPTILIALICAFMSITYNVKKTARSSTPVSIAKPLISSAKSKLK

SEQ ID NO: 4268 - protein, 143 aa, Zea mays subsp. mays
  peptide (1)..(143): Ceres Seq. ID no. 12345985
MLYPGATVSSLTKSKTFPSWNDLFDMYNLTEAKNASAVVDLQRLEILAGSYFCVAGALIGIINPGRMTLFGTLLIIWGMVKEALFGKPVNSDLTQSTHVYPTILIALICAFMSITYNVKKTARSSTPVSIAKPLISSAKSKLK

SEQ ID NO: 4269 - DNA, 789 bp, Zea mays subsp. mays; identical to SEQ ID NO: 1699
  misc_feature (1)..(789): Ceres Seq. ID no. 12355957
  misc_feature (1)..(789): Ortholog of  Ceres SEQ ID NO 13587131 as cited in SEQ ID NO 331
  misc_feature (1)..(789): Ortholog of  Ceres SEQ ID NO 13661176 as cited in SEQ ID NO 61114

SEQ ID NO: 4270 - protein, 161 aa, Zea mays subsp. mays; identical to SEQ ID NO: 1700
  peptide (1)..(161): Ceres Seq. ID no. 12355958

SEQ ID NO: 4271 - protein, 106 aa, Zea mays subsp. mays; identical to SEQ ID NO: 1701
  peptide (1)..(106): Ceres Seq. ID no. 12355959

SEQ ID NO: 4272 - DNA, 1424 bp, Zea mays subsp. mays
  misc_feature (1)..(1424): Ceres Seq. ID no. 12365397
  misc_feature (1)..(1424): Ortholog of  Ceres SEQ ID NO 14316017 as cited in SEQ ID NO 67028
aaactttcgcaccaccaactcacactgaccgcaacttcccaacaatctcggtccctccctccctcctccctaaactccccagcaacccgcggccgagccccgtagtccgtgcaccagttgtctcgcgtcgtcgtcgtcgccggggcctgcagcctgcaggcagcgacctagctaggaacgggtgacatggcgcgtgcggcggcgtcggtggccgcggcgctgctcgtcgtgctcggcgtggcagcgtcggtggcgacggcgcagatggagacctgcagcggcgacctcccacccgtgctcgccgccaactactccggcctggcctgccagcctgtctggaacaacttcgtgctccggtaccaccaggacaaggacaacgtgctgcgggtggtgctgtccacgatgtacagcacggggtgggtgggcatggggttctccagggacggcctcatggtcggctccagcgccatggtggggtggatcggcaagaaggggctcccccacgtccggcagttcgcgctgcggggcaagagcagctccaaggtggtggtcgaccgtggcttcctcgtttccaacgaccacgaccacactgtcgtggtgcagcaggccaagatctacctcgccttccagctcaggttctcctaccgcctcacccaccagcacatcgtcatggccttcggcaacagcatccccgtcaagaacaggctcaccaggcaccaggacaagacctccttcaccttcgatttcacaacgggcagagcttcggtggacgggtccttcccatacggcctgcggcgtgcgcacggcgcgctgaacgtgttcgcgtggggagtcctgctgcccatcggcgccatcctggcgcgctacttccggcggatggacccgctctggttctacctccacgtgggcgtccagctcgccggcttcatcatcggcctggccggcgtcgtcgccggggtggcgctgtacaacaagatccaggccgacatccccgcgcacagggggctcggcgtcttcgtcctcttcctcggcatcctgcaggtgctggccttcttcctgcgccccagcgccgactccaagtaccgcaagtactggaactggtaccaccactgggcgggcaggctggcgctcttcttcgccgccgtcaacatcgtgctcgggatccacgtcggcggcgccgacagctcatggaagatcggatacggcttcagcctggccgtcctcctcgtcgccgtcgccgcgctcgagttcatgctgtggacgaggtggtccaagaacagcaccgccaccccgacgtactaggaacctgctgctgcacgtaccttgttgtttttccggggtcggatgatgttttgtgtttgcctttgaccttgtttttttttgttgttggtggtggtggtgtatctatatgatatatcctttgg

SEQ ID NO: 4273 - protein, 371 aa, Zea mays subsp. mays
  peptide (1)..(371): Ceres Seq. ID no. 12365398
MARAAASVAAALLVVLGVAASVATAQMETCSGDLPPVLAANYSGLACQPVWNNFVLRYHQDKDNVLRVVLSTMYSTGWVGMGFSRDGLMVGSSAMVGWIGKKGLPHVRQFALRGKSSSKVVVDRGFLVSNDHDHTVVVQQAKIYLAFQLRFSYRLTHQHIVMAFGNSIPVKNRLTRHQDKTSFTFDFTTGRASVDGSFPYGLRRAHGALNVFAWGVLLPIGAILARYFRRMDPLWFYLHVGVQLAGFIIGLAGVVAGVALYNKIQADIPAHRGLGVFVLFLGILQVLAFFLRPSADSKYRKYWNWYHHWAGRLALFFAAVNIVLGIHVGGADSSWKIGYGFSLAVLLVAVAALEFMLWTRWSKNSTATPTY

SEQ ID NO: 4274 - protein, 345 aa, Zea mays subsp. mays
  peptide (1)..(345): Ceres Seq. ID no. 12365399
METCSGDLPPVLAANYSGLACQPVWNNFVLRYHQDKDNVLRVVLSTMYSTGWVGMGFSRDGLMVGSSAMVGWIGKKGLPHVRQFALRGKSSSKVVVDRGFLVSNDHDHTVVVQQAKIYLAFQLRFSYRLTHQHIVMAFGNSIPVKNRLTRHQDKTSFTFDFTTGRASVDGSFPYGLRRAHGALNVFAWGVLLPIGAILARYFRRMDPLWFYLHVGVQLAGFIIGLAGVVAGVALYNKIQADIPAHRGLGVFVLFLGILQVLAFFLRPSADSKYRKYWNWYHHWAGRLALFFAAVNIVLGIHVGGADSSWKIGYGFSLAVLLVAVAALEFMLWTRWSKNSTATPTY

SEQ ID NO: 4275 - protein, 299 aa, Zea mays subsp. mays
  peptide (1)..(299): Ceres Seq. ID no. 12365400
MYSTGWVGMGFSRDGLMVGSSAMVGWIGKKGLPHVRQFALRGKSSSKVVVDRGFLVSNDHDHTVVVQQAKIYLAFQLRFSYRLTHQHIVMAFGNSIPVKNRLTRHQDKTSFTFDFTTGRASVDGSFPYGLRRAHGALNVFAWGVLLPIGAILARYFRRMDPLWFYLHVGVQLAGFIIGLAGVVAGVALYNKIQADIPAHRGLGVFVLFLGILQVLAFFLRPSADSKYRKYWNWYHHWAGRLALFFAAVNIVLGIHVGGADSSWKIGYGFSLAVLLVAVAALEFMLWTRWSKNSTATPTY

SEQ ID NO: 4276 - DNA, 1344 bp, Zea mays subsp. mays
  misc_feature (1)..(1344): Ceres Seq. ID no. 12347927
  misc_feature (1)..(1344): Ortholog of  Ceres SEQ ID NO 12625831 as cited in SEQ ID NO 65139
actcgaaaagaaaactagccgggcacgttacgctcaccaccataccgtcccacgcggcctccccaactaaccctatcccccggcgaccgggaactgcaaccgatggaccgcctcgtcgtcttctcccgccgccgccgccgctggatcctcctcgctgcggccggtgcggcggcggccgtcggcgcgtacaagatctaccaccaccctgccgtcgcggaacgtcgccgccgcctcgtgcgcctagccgccgccatcgcggccttcgctgatgccgccgcatcatccgccgacgccgtggccctggtgacatccgatctcgccgactttgtccgttccgacgcggacgaggtcccccgcagcgtcaagcagctggccaagctcgcctcctcccctgaggtatccgccaccgtctccaccctatccgaggcagtaacctccgggatcctccgcgggtcgggatcctctagctccgggcccgcatccggcggtaccgtggccctctccgatcgtctcgtagacaggctcttctctgactcaggcgagcgcctcgcgtccgcggttgccggcagcttcgcccgccatctcgtcctcgccttttactccgctccttcaccacaaggggaggcgtcctcctccccgacgatgtgggtcaacgtggttgcgactggaaagtgccggaaggcgataagcaactgggttgaggtcttcgtggggactgctgtgagggagttcattgacaagaccatccacatcaacacctacgagcagctcttcgaagggctcaccaatccgagacatgacgctaaggtcaaggaattgcttgtttcagtgtgcaatgctgcggttgagactttggtgaagaccactcaccatgccctgtacagtactaatggcaacttgggtgcaaatggtagtgtcagtggcaatgccaatgaagctggggaagggtgggtggagacggtgtcgagctcgttggcagttcctagcaacaggaagtttgtgcttgatgttacagggagggtcacatttgagacagtgcggtcatttctggagtttgttctttggaagctgcaggatggggcaaggaagggcggtggctccgtggttgacagtggcctccgtgtcgtgaggtatatgagcgataagtcgatggttatcgccacaatctgtattacgttgtgcttgcatgtgttgaatgggactaggctcttggtaacagcctaatagtgtacttgtttggttttcctattttttgcacattgtttgtgtaaaactgtaggaatcatactgaaactgtaaatccaaaaggaatggaaataatagaaataacatgaattgtgctgt

SEQ ID NO: 4277 - protein, 373 aa, Zea mays subsp. mays
  peptide (1)..(373): Ceres Seq. ID no. 12347928
MDRLVVFSRRRRRWILLAAAGAAAAVGAYKIYHHPAVAERRRRLVRLAAAIAAFADAAASSADAVALVTSDLADFVRSDADEVPRSVKQLAKLASSPEVSATVSTLSEAVTSGILRGSGSSSSGPASGGTVALSDRLVDRLFSDSGERLASAVAGSFARHLVLAFYSAPSPQGEASSSPTMWVNVVATGKCRKAISNWVEVFVGTAVREFIDKTIHINTYEQLFEGLTNPRHDAKVKELLVSVCNAAVETLVKTTHHALYSTNGNLGANGSVSGNANEAGEGWVETVSSSLAVPSNRKFVLDVTGRVTFETVRSFLEFVLWKLQDGARKGGGSVVDSGLRVVRYMSDKSMVIATICITLCLHVLNGTRLLVTA

SEQ ID NO: 4278 - protein, 193 aa, Zea mays subsp. mays
  peptide (1)..(193): Ceres Seq. ID no. 12347929
MWVNVVATGKCRKAISNWVEVFVGTAVREFIDKTIHINTYEQLFEGLTNPRHDAKVKELLVSVCNAAVETLVKTTHHALYSTNGNLGANGSVSGNANEAGEGWVETVSSSLAVPSNRKFVLDVTGRVTFETVRSFLEFVLWKLQDGARKGGGSVVDSGLRVVRYMSDKSMVIATICITLCLHVLNGTRLLVTA

SEQ ID NO: 4279 - DNA, 1428 bp, Zea mays subsp. mays
  misc_feature (1)..(1428): Ceres Seq. ID no. 12434949
  misc_feature (1)..(1428): Ortholog of  Ceres SEQ ID NO 15171279 as cited in SEQ ID NO 51378
  misc_feature (1)..(1428): Ortholog of  Ceres SEQ ID NO 13596816 as cited in SEQ ID NO 62287
gcacgagaccattacctagaacatcctaatcaaaagccaaggaaaggaaacacaattcagcagcacacgcaccaccaaaaagagggagaagagtcttcgcctcgcggagagacgtgctgcctagcataatatatagccacgaaatagagtgctgggtctagctatagctaactagccagcagcagcagcagcgtgcgtgcgttcaaggcagcagaggtagagaggttttgagagagaatggcaagcaggcaaggtgtagccgcctccatgttcgccacggcattgctcctcggcgtctttgcatccatcccacaaagtgctgaggccatcggcgtatgctacggcatgagcgccaacaacctgccggcggcgagcacggtggtgagcatgtacaaggcgaacggcatctcggcgatgcggctgtacgcgccggaccagggcgcgctgcaggcggtgggcggcacgggcatcagcgtggccgtgggcgcccccaacgacgtgctgtcgaacatcgcggctagccccgcggcggccgcgtcgtgggtgcgcaacaacatccaggcgtacccgtccgtgtcgttccgctacgtgtgcgtgggcaacgaggtggccggcggcgcggcgcaggacctggcgccggccatggagaacgtgcacgcggcgctggcggcggccgggctgggccacatcaaggtgacgacgtcggtgtcgcaggccatcctgggcgtgtacagcccgccgtccgccgcggagttcaccggcgaggcgcgcgggtacatgggccccgtgctgcagttcctggcccgcaccgggtcgccgctcatggccaacatctacccgtacctggcctgggcatacaaccccagcgccatggacatgagctacgcgctcttcacctcctccggcaccgtcgtgcaggacggcgcctacgggtaccagaacctcttcgacaccaccgtcgacgccttctacgtcgccatgggaaagaacggcggctccggcgtgccgctcgtggtgtcggagagcgggtggccgtccggcggcggcgtccaggccacgccggccaacgcgagggtgtacaaccagtacctcatcaaccacgtcggccgcgggacgccgcgccaccccggcgccatcgagacctacctcttctccatgttcaacgagaaccagaaggagagcggcgtggagcagaactgggggctcttctaccccaacatgcagcacgtctgccccatcagcttctgaagaaccgttaaccgtaccgatccaagctagctgctagctggccctggaccctggtggtggctccgaccgacgacggacgacgacgatcgacctgcagccgtatgtgtcgatccggccggccgtatacggatagtacgtagcatgtatgtatatatatggtatatgtgggcttgctttgcg

SEQ ID NO: 4280 - protein, 336 aa, Zea mays subsp. mays
  peptide (1)..(336): Ceres Seq. ID no. 12434950
MASRQGVAASMFATALLLGVFASIPQSAEAIGVCYGMSANNLPAASTVVSMYKANGISAMRLYAPDQGALQAVGGTGISVAVGAPNDVLSNIAASPAAAASWVRNNIQAYPSVSFRYVCVGNEVAGGAAQDLAPAMENVHAALAAAGLGHIKVTTSVSQAILGVYSPPSAAEFTGEARGYMGPVLQFLARTGSPLMANIYPYLAWAYNPSAMDMSYALFTSSGTVVQDGAYGYQNLFDTTVDAFYVAMGKNGGSGVPLVVSESGWPSGGGVQATPANARVYNQYLINHVGRGTPRHPGAIETYLFSMFNENQKESGVEQNWGLFYPNMQHVCPISF

SEQ ID NO: 4281 - protein, 326 aa, Zea mays subsp. mays
  peptide (1)..(326): Ceres Seq. ID no. 12434951
MFATALLLGVFASIPQSAEAIGVCYGMSANNLPAASTVVSMYKANGISAMRLYAPDQGALQAVGGTGISVAVGAPNDVLSNIAASPAAAASWVRNNIQAYPSVSFRYVCVGNEVAGGAAQDLAPAMENVHAALAAAGLGHIKVTTSVSQAILGVYSPPSAAEFTGEARGYMGPVLQFLARTGSPLMANIYPYLAWAYNPSAMDMSYALFTSSGTVVQDGAYGYQNLFDTTVDAFYVAMGKNGGSGVPLVVSESGWPSGGGVQATPANARVYNQYLINHVGRGTPRHPGAIETYLFSMFNENQKESGVEQNWGLFYPNMQHVCPISF

SEQ ID NO: 4282 - protein, 300 aa, Zea mays subsp. mays
  peptide (1)..(300): Ceres Seq. ID no. 12434952
MSANNLPAASTVVSMYKANGISAMRLYAPDQGALQAVGGTGISVAVGAPNDVLSNIAASPAAAASWVRNNIQAYPSVSFRYVCVGNEVAGGAAQDLAPAMENVHAALAAAGLGHIKVTTSVSQAILGVYSPPSAAEFTGEARGYMGPVLQFLARTGSPLMANIYPYLAWAYNPSAMDMSYALFTSSGTVVQDGAYGYQNLFDTTVDAFYVAMGKNGGSGVPLVVSESGWPSGGGVQATPANARVYNQYLINHVGRGTPRHPGAIETYLFSMFNENQKESGVEQNWGLFYPNMQHVCPISF

SEQ ID NO: 4283 - DNA, 1592 bp, Zea mays subsp. mays
  misc_feature (1)..(1592): Ceres Seq. ID no. 12365401
  misc_feature (1)..(1592): Ortholog of  Ceres SEQ ID NO 15171556 as cited in SEQ ID NO 59687
  misc_feature (1)..(1592): Ortholog of  Ceres SEQ ID NO 15177935 as cited in SEQ ID NO 60258
  misc_feature (1)..(1592): Ortholog of  Ceres SEQ ID NO 13659033 as cited in SEQ ID NO 66372
  misc_feature (1)..(1592): Ortholog of  Ceres SEQ ID NO 12625899 as cited in SEQ ID NO 69079
  misc_feature (1)..(1592): Ortholog of  Ceres SEQ ID NO 15180051 as cited in SEQ ID NO 0
aaagccagcattgctgcatgccagcatccacgtagcatctgaggctctgagctcatggttcagatagcagcggtgaagcggatgaaggggcgggccccgctgtcagtggtggtggcaatcatcggcgggctggctctcgcgggcgtcatcttcaccgacgacctccgctcacttactgagatcatggagaagaaggggaaagcgaaggagcacaagaggacgacgtctctacatgccgggacgaggacgaggaagatgccgctaacgccgccgccgccgccgcagccggcgaaggcagcgttcgacccgagccggtgcagcgtgacggagggctactgggcgtacaacaggtccaaggagctgctttacacggaccaaacatgcccgttcatcgacaggcaggtctcttgccagaggaacggcaggccggacagcgactacctgcgctgggattggcacctagacgactgcagtctcccaaggttcgacccggtggcgttgctggagacgctgcgggggaagcggatgatgttcgttggcgactcgctgcagatggggcagtggctctccatggtctgcctcgtcaactccgccgtgccctacaccgcgcggtccatggagcgcagcaccaccctgtccgtcttcaccgccacggagtacaacgcgacgatcgagttctactgggcgccgtacctggtggaggccaactccgaccgcaacatccggctgggggccgacggccgcgtgctccacgtcgacgccgtcgagctgcacgctaggcactggaagggcgtggacatcctcgtcttcgacagctacgtgtggtggatgaccggcagcaggatcaaatcagtgtgggggtcgttcggggacgacgggtacgaggagctggacgcctgggtcgcgttccggcttggactcaagacatgggccaactgggtggacgccaacatcgatcccaacgccacaagggtcttcttcatgtcgatctccaccacgcacatgaggagcgaggactggggccgggagggcggcatacggtgccacaacgagacgtggcccgtcacgcggaaggggtactggggcagcggcgcggaccggcggatgatggaggtgatgtccgacgtggtgggccggatgcgggtgcccgtcacgctgctcaacgtcacgcagctcacggagcaccgcgtcgacgcccacgtctccgtgtacaccgagaccggcggcgagctgctcaccgacgcgcagagggccgacccgcagacgcacacggactgcatccactggtgcgtgcccggcgtgccggacacgtggaaccagatcctctacgcgcacttgtagcagcaggttcggtcacagtcacagccgcgagaacgaacaacggggacacgtaccgaaatccagctgggaataattttagttacggtaggtcgtcgtccggccgagttcaattcagacatgatagatccagttcaaatcatcgctcggacagaaaatgcctgagcttgtactgctctgctttgtcacacaggcagagcgcgtcacgcacgcttgctcacacacatacaatacacacggacacaccttttcct

SEQ ID NO: 4284 - protein, 428 aa, Zea mays subsp. mays
  peptide (1)..(428): Ceres Seq. ID no. 12365402
MVQIAAVKRMKGRAPLSVVVAIIGGLALAGVIFTDDLRSLTEIMEKKGKAKEHKRTTSLHAGTRTRKMPLTPPPPPQPAKAAFDPSRCSVTEGYWAYNRSKELLYTDQTCPFIDRQVSCQRNGRPDSDYLRWDWHLDDCSLPRFDPVALLETLRGKRMMFVGDSLQMGQWLSMVCLVNSAVPYTARSMERSTTLSVFTATEYNATIEFYWAPYLVEANSDRNIRLGADGRVLHVDAVELHARHWKGVDILVFDSYVWWMTGSRIKSVWGSFGDDGYEELDAWVAFRLGLKTWANWVDANIDPNATRVFFMSISTTHMRSEDWGREGGIRCHNETWPVTRKGYWGSGADRRMMEVMSDVVGRMRVPVTLLNVTQLTEHRVDAHVSVYTETGGELLTDAQRADPQTHTDCIHWCVPGVPDTWNQILYAHL

SEQ ID NO: 4285 - protein, 419 aa, Zea mays subsp. mays
  peptide (1)..(419): Ceres Seq. ID no. 12365403
MKGRAPLSVVVAIIGGLALAGVIFTDDLRSLTEIMEKKGKAKEHKRTTSLHAGTRTRKMPLTPPPPPQPAKAAFDPSRCSVTEGYWAYNRSKELLYTDQTCPFIDRQVSCQRNGRPDSDYLRWDWHLDDCSLPRFDPVALLETLRGKRMMFVGDSLQMGQWLSMVCLVNSAVPYTARSMERSTTLSVFTATEYNATIEFYWAPYLVEANSDRNIRLGADGRVLHVDAVELHARHWKGVDILVFDSYVWWMTGSRIKSVWGSFGDDGYEELDAWVAFRLGLKTWANWVDANIDPNATRVFFMSISTTHMRSEDWGREGGIRCHNETWPVTRKGYWGSGADRRMMEVMSDVVGRMRVPVTLLNVTQLTEHRVDAHVSVYTETGGELLTDAQRADPQTHTDCIHWCVPGVPDTWNQILYAHL

SEQ ID NO: 4286 - protein, 385 aa, Zea mays subsp. mays
  peptide (1)..(385): Ceres Seq. ID no. 12365404
MEKKGKAKEHKRTTSLHAGTRTRKMPLTPPPPPQPAKAAFDPSRCSVTEGYWAYNRSKELLYTDQTCPFIDRQVSCQRNGRPDSDYLRWDWHLDDCSLPRFDPVALLETLRGKRMMFVGDSLQMGQWLSMVCLVNSAVPYTARSMERSTTLSVFTATEYNATIEFYWAPYLVEANSDRNIRLGADGRVLHVDAVELHARHWKGVDILVFDSYVWWMTGSRIKSVWGSFGDDGYEELDAWVAFRLGLKTWANWVDANIDPNATRVFFMSISTTHMRSEDWGREGGIRCHNETWPVTRKGYWGSGADRRMMEVMSDVVGRMRVPVTLLNVTQLTEHRVDAHVSVYTETGGELLTDAQRADPQTHTDCIHWCVPGVPDTWNQILYAHL

SEQ ID NO: 4287 - DNA, 1372 bp, Zea mays subsp. mays
  misc_feature (1)..(1372): Ceres Seq. ID no. 12345991
  misc_feature (1)..(1372): Ortholog of  Ceres SEQ ID NO 14307053 as cited in SEQ ID NO 54262
gtgcgtgcgttacccgcgctcgagacaaggcgttgtctcactctcatcatccgtgcagtgctggacgatcgcttcttgtccccgtctcggcttctcgcctcttcggcggcagcggggcatcgattgcaatggacgcgcccttcttccacgagctcaggcggcaggcctcctcctacctgaccggcaagatccgctccgcgcggctggcgctcaccgacgtcaccccgacgcagctcttgacggaggaggcgacgaacggggacgcgtcgccgccgaacgtcaggacgatggggcgcatagcccggcaggcgttcgacgtcgacgagtacgtcaggatcacgggcgtcctgcacgggcgcctcgcgagcttcgaccgcaggcagtggcgggaggcgtacaaggcgctcctcctcctcgagcacctcctcacgcacgggccccgcagcgtcgcggtggagttccacaaggacagggaggccatcgaccggatggccaccttccaacacgtcgacgagaaaggcttcaactggggcctgacggtgaggagcaagtcggagcgcgtgctcaagctgctggagcgcggcccgttcctggaggaggagcgcgagcgggcgcgcaagatcgcgcgcgagatcacgggcttcggcagcttcagcctcagcgcaggcgcctcccaccacgccgtgtcgcagtcgcagccacccggtgacgacgggaaccgcggcgacggccggagcagctccaagcgcgaggagcggcagaggcacgacgacggcggccgattcgggcggagccactcgcagttcgaggagcggtggtggaagcacaaggacggtgacgacggcgacaaggagaatctgatacagagcccggagccgacagcacgggtcgcgccgcgggaagtggatgcggaggcggaggaggaggagctgcaccaccaccagctccatccgttccacgggttggggcaaaaacagcggccggaggcgacgctgctcctgagccagtgacgggatcagtcggttcgtgtcatggtgacgtgaaaagaaccgtgtgcttttctcccttcctccaaggctgcagggtcagtattttactgacactgcttggtgcatcaggcatctcatgcgccatgaatggccgcttgcttggcctcgtaaaatttctttccttcagttcggaacttcggatgccagaatgtactagagaccaccacatacaggcatgtctcaagcttccagtaactctctagaaaccacgtattctaggagtgcgagaatgggatcctcctgcccaagtgcagctgtgctaatcttttactctgaacctgtgaaccatctactgaaggaaagcaaaaggcagtagttattcc

SEQ ID NO: 4288 - protein, 335 aa, Zea mays subsp. mays
  peptide (1)..(335): Ceres Seq. ID no. 12345992
ACVTRARDKALSHSHHPCSAGRSLLVPVSASRLFGGSGASIAMDAPFFHELRRQASSYLTGKIRSARLALTDVTPTQLLTEEATNGDASPPNVRTMGRIARQAFDVDEYVRITGVLHGRLASFDRRQWREAYKALLLLEHLLTHGPRSVAVEFHKDREAIDRMATFQHVDEKGFNWGLTVRSKSERVLKLLERGPFLEEERERARKIAREITGFGSFSLSAGASHHAVSQSQPPGDDGNRGDGRSSSKREERQRHDDGGRFGRSHSQFEERWWKHKDGDDGDKENLIQSPEPTARVAPREVDAEAEEEELHHHQLHPFHGLGQKQRPEATLLLSQ

SEQ ID NO: 4289 - protein, 293 aa, Zea mays subsp. mays
  peptide (1)..(293): Ceres Seq. ID no. 12345993
MDAPFFHELRRQASSYLTGKIRSARLALTDVTPTQLLTEEATNGDASPPNVRTMGRIARQAFDVDEYVRITGVLHGRLASFDRRQWREAYKALLLLEHLLTHGPRSVAVEFHKDREAIDRMATFQHVDEKGFNWGLTVRSKSERVLKLLERGPFLEEERERARKIAREITGFGSFSLSAGASHHAVSQSQPPGDDGNRGDGRSSSKREERQRHDDGGRFGRSHSQFEERWWKHKDGDDGDKENLIQSPEPTARVAPREVDAEAEEEELHHHQLHPFHGLGQKQRPEATLLLSQ

SEQ ID NO: 4290 - protein, 240 aa, Zea mays subsp. mays
  peptide (1)..(240): Ceres Seq. ID no. 12345994
MGRIARQAFDVDEYVRITGVLHGRLASFDRRQWREAYKALLLLEHLLTHGPRSVAVEFHKDREAIDRMATFQHVDEKGFNWGLTVRSKSERVLKLLERGPFLEEERERARKIAREITGFGSFSLSAGASHHAVSQSQPPGDDGNRGDGRSSSKREERQRHDDGGRFGRSHSQFEERWWKHKDGDDGDKENLIQSPEPTARVAPREVDAEAEEEELHHHQLHPFHGLGQKQRPEATLLLSQ

SEQ ID NO: 4291 - DNA, 1313 bp, Zea mays subsp. mays; identical to SEQ ID NO: 3197
  misc_feature (1)..(1313): Ceres Seq. ID no. 13564341
  misc_feature (1)..(1313): Ortholog of  Ceres SEQ ID NO 13598443 as cited in SEQ ID NO 69024

SEQ ID NO: 4292 - protein, 377 aa, Zea mays subsp. mays; identical to SEQ ID NO: 3198
  peptide (1)..(377): Ceres Seq. ID no. 13564342

SEQ ID NO: 4293 - protein, 374 aa, Zea mays subsp. mays; identical to SEQ ID NO: 3199
  peptide (1)..(374): Ceres Seq. ID no. 13564343

SEQ ID NO: 4294 - protein, 266 aa, Zea mays subsp. mays; identical to SEQ ID NO: 3200
  peptide (1)..(266): Ceres Seq. ID no. 13564344

SEQ ID NO: 4295 - DNA, 1104 bp, Zea mays subsp. mays
  misc_feature (1)..(1104): Ceres Seq. ID no. 12402575
  misc_feature (1)..(1104): Ortholog of  Ceres SEQ ID NO 13659177 as cited in SEQ ID NO 66838
  misc_feature (1)..(1104): Ortholog of  Ceres SEQ ID NO 13622757 as cited in SEQ ID NO 0
gtcctccatcaaaagaaggcagggaaagatctgatctggggggtgagagagcaggaggagaaagccaagccattgccctcccctcttgaaggcttggagcttggttctacatcctcttctcttcccctccgtctctctctctctctctatttggtttgcttgcttgcctctactagactctagtcgtcgggtccggccatggccaccatcctggagaacatccagaaggcgaggttcctgccgaccaggccgctcaaggacgagctgcccaccttccagggcggcggcaagagcaaggaggagagccacctcatgggcctgaggaagcggctgtccagcttctccggcaagatccagcccatctcctccgcgtcggccgccgagtgggcgttccgccgctccaagtcggcgccctccctcggcgccgccttcgccgcggggggcggctccctgaggcagtggtggcagtggggcgtcggctggctcctgtccaagaagcccgggttcgcgggcgacctcgagatgaacgaggaggaggtcgccgcgctgggccgccagagcaggggcacctgggcccacgtcctcttcaagatgcggtccggcgtccgccgcctcgtcgcgtccgcgcactcgctccccaccacgcacaagcagcagtccctgccgtcgtcgtcggcctcggcggcgcacagcgtccagtgcaagccggcggcgtcgttcgcctacgcgcagcggcagagcttccaccacaccggccacgccatggcgcactaggcagcgtctcgcggttgccggtgccgtctgcggccggtctcctccagatccagagatggagggcgatgagaggcgcgggaagaagaagattcaggttacaggtgcgtgagatcgacggtgaagatgtcgttgaattgatgatgaatgaaatggaatgtaggattaccattctgttgtctgtgtagatctagtgcccctgtagaggtgaacaagtgttatactacatgctcgttctttatattattcttttgggttcgttcgttggacgatgtaaatgtaaaatgtttggttgatcttgtactgttcaataaaactgatgcaaattgtgcc

SEQ ID NO: 4296 - protein, 191 aa, Zea mays subsp. mays
  peptide (1)..(191): Ceres Seq. ID no. 12402576
MATILENIQKARFLPTRPLKDELPTFQGGGKSKEESHLMGLRKRLSSFSGKIQPISSASAAEWAFRRSKSAPSLGAAFAAGGGSLRQWWQWGVGWLLSKKPGFAGDLEMNEEEVAALGRQSRGTWAHVLFKMRSGVRRLVASAHSLPTTHKQQSLPSSSASAAHSVQCKPAASFAYAQRQSFHHTGHAMAH

SEQ ID NO: 4297 - protein, 153 aa, Zea mays subsp. mays
  peptide (1)..(153): Ceres Seq. ID no. 12402577
MGLRKRLSSFSGKIQPISSASAAEWAFRRSKSAPSLGAAFAAGGGSLRQWWQWGVGWLLSKKPGFAGDLEMNEEEVAALGRQSRGTWAHVLFKMRSGVRRLVASAHSLPTTHKQQSLPSSSASAAHSVQCKPAASFAYAQRQSFHHTGHAMAH

SEQ ID NO: 4298 - DNA, 847 bp, Zea mays subsp. mays
  misc_feature (1)..(847): Ceres Seq. ID no. 12372571
  misc_feature (1)..(847): Ortholog of  Ceres SEQ ID NO 13655537 as cited in SEQ ID NO 63735
aagtaggtgaaggtcagatcagagtatcaccacttggcaatttctcccccggcacaagcgcatggctaccgtcgggggcaatcgtgctctctatgcagtcgtcgcgctgccacttctcgcgacccttcttcacggaccaatgcggctgtcgcatgccttcccataccgttccctactccagacctgccagcccagcggctccatccagggccgttccggcaactgcaacacggagaacggctccgagtgctgcaagaacgggcgtcgctacaccacatacggctgctccccgcccgtcacgggtagcacccgcgccgtactgactctcaacagcttcgccgagggcggggacggcggcggcgcggccgcctgcacggggaagttctacgacgacagcaagaaggtggtggcgctgtcaactggctggtacaacggcggtagccggtgcagaaagcacatcatgatccacgcgggcaacgggaattccgtgagcgcgttggtcgtcgacgagtgtgactccaccgtgggctgcgacaaggaccacaactttgagccgccgtgccgcaacaacatcgtcgacgggtcgccggcggtgtgggacgctctggggctcaacaaggacgacggccaggcacagatcacctggtccgacgagtgagcgactgtaccaccgctgcaccggccgggtgcgctcgtgcaagtgcaccggccggcacgtctcatgttgccaatatataataagtagtagggtacagtggtacaccctctaaataatcatgcatgaagcagctgttcatctttagacgtgtttaaccatttgcaaaattaaataactgttggccccccg

SEQ ID NO: 4299 - protein, 198 aa, Zea mays subsp. mays
  peptide (1)..(198): Ceres Seq. ID no. 12372572
MATVGGNRALYAVVALPLLATLLHGPMRLSHAFPYRSLLQTCQPSGSIQGRSGNCNTENGSECCKNGRRYTTYGCSPPVTGSTRAVLTLNSFAEGGDGGGAAACTGKFYDDSKKVVALSTGWYNGGSRCRKHIMIHAGNGNSVSALVVDECDSTVGCDKDHNFEPPCRNNIVDGSPAVWDALGLNKDDGQAQITWSDE

SEQ ID NO: 4300 - protein, 172 aa, Zea mays subsp. mays
  peptide (1)..(172): Ceres Seq. ID no. 12372573
MRLSHAFPYRSLLQTCQPSGSIQGRSGNCNTENGSECCKNGRRYTTYGCSPPVTGSTRAVLTLNSFAEGGDGGGAAACTGKFYDDSKKVVALSTGWYNGGSRCRKHIMIHAGNGNSVSALVVDECDSTVGCDKDHNFEPPCRNNIVDGSPAVWDALGLNKDDGQAQITWSDE

SEQ ID NO: 4301 - protein, 106 aa, Zea mays subsp. mays
  peptide (1)..(106): Ceres Seq. ID no. 12372574
VGEGQIRVSPLGNFSPGTSAWLPSGAIVLSMQSSRCHFSRPFFTDQCGCRMPSHTVPYSRPASPAAPSRAVPATATRRTAPSAARTGVATPHTAAPRPSRVAPAPY

SEQ ID NO: 4302 - DNA, 872 bp, Zea mays subsp. mays
  misc_feature (1)..(872): Ceres Seq. ID no. 12353745
  misc_feature (1)..(872): Ortholog of  Ceres SEQ ID NO 13661994 as cited in SEQ ID NO 60568
  misc_feature (1)..(872): Ortholog of  Ceres SEQ ID NO 12584790 as cited in SEQ ID NO 62648
gcgtcggttttatgcacgactccttttcgcacccggctggccggctccccacctgctcgcctctcgcgcatcctaccaggagggtgggagacccaggcagcggaggtgtgcgaagctcgcttcgcaccacgcgctgcggcctgcggggcgagagatcgaggcctgagctagggtctggtggcggagatgtcgacgccggcgaggaagcgcctgatgcgggacttcaagcgccttcagcaggacccgcccgccggcatcagcggcgcgccgtacgacaacaatatcatgctctggaactccgtcatattcgggccggatgacacgccgtgggatggaggcacgttcaagctgactctgcaatttacagaagattaccccaacaaacctccaactgttcggtttgtttcgaggatgtttcatccaaacatctatgcggatggaagcatctgtttggacatcctacaaaaccagtggagccctatatatgatgttgcggcaatattgacctctattcagtccctgctgtgtgacccaaacccaaattctcctgctaactctgaagcagccagaatgttcagcgagaacaagcgtgagtacaaccgcaaagttcgtgaggttgtggagcagagctggacagccgactaaaactttatccgcttcgccaggcggtgtaaataaagcatctgtctttcctacttggccggtctgttttaccgttagaaatcctcagctatcgttgtgttcttgtggttcagtcccttgttgtagtgatgcctgcgggttttcctaatgtagtgctgaacggtttcataaactcggatattggtgcatatgtaacagatatagctaagtcaagttgttgcttggtttgc

SEQ ID NO: 4303 - protein, 152 aa, Zea mays subsp. mays
  peptide (1)..(152): Ceres Seq. ID no. 12353746
MSTPARKRLMRDFKRLQQDPPAGISGAPYDNNIMLWNSVIFGPDDTPWDGGTFKLTLQFTEDYPNKPPTVRFVSRMFHPNIYADGSICLDILQNQWSPIYDVAAILTSIQSLLCDPNPNSPANSEAARMFSENKREYNRKVREVVEQSWTAD

SEQ ID NO: 4304 - protein, 143 aa, Zea mays subsp. mays
  peptide (1)..(143): Ceres Seq. ID no. 12353747
MRDFKRLQQDPPAGISGAPYDNNIMLWNSVIFGPDDTPWDGGTFKLTLQFTEDYPNKPPTVRFVSRMFHPNIYADGSICLDILQNQWSPIYDVAAILTSIQSLLCDPNPNSPANSEAARMFSENKREYNRKVREVVEQSWTAD

SEQ ID NO: 4305 - protein, 119 aa, Zea mays subsp. mays
  peptide (1)..(119): Ceres Seq. ID no. 12353748
MLWNSVIFGPDDTPWDGGTFKLTLQFTEDYPNKPPTVRFVSRMFHPNIYADGSICLDILQNQWSPIYDVAAILTSIQSLLCDPNPNSPANSEAARMFSENKREYNRKVREVVEQSWTAD

SEQ ID NO: 4306 - DNA, 1073 bp, Zea mays subsp. mays
  misc_feature (1)..(1073): Ceres Seq. ID no. 13496658
  misc_feature (1)..(1073): Ortholog of  Ceres SEQ ID NO 15180175 as cited in SEQ ID NO 0
tcshatcgaaaaagggattattcattttccgaccaaaaaacgaaaaaggcaaatccaaagacggagaagaagaagagtcgcgaaggaatggggaagggcaaggtgcatccctcgccgccgccagctgccgcggccgcggccgcgggcggcggagccggggagacgacggcggaggcggtgctgatgcggctgatgccggcggcggtgctcgcgdccgcggcgccgctmggggccgaggggaaggaggtgctggcgtacctggtgctggcgtcgctgcggtcctcggccccgccgacgccggcgcgcggggacgggcaccgcccggagctcgggtgcggctgcttcgggtgctacacggcctactggtcccgctgggacgggtcccccgagggcgaccgcgaggccatccaccgcgccatcgaggcgttcgaggagcacctggcggaggaggagaagggccgcgggaagggaggcgggccccgccgcgggcggaagaagcgcgccgagggcaaggggaggtggaaggtgaagaaggaaaaggaggtggaggtcggcgtcgatccactcccgcccccgtccgatctccccgccccggaggaggcccccaaggcggaggacggcgcggagtacctgacggcggaggacgagaaggaggaggacgctccgactgcggccgccggcgccgaggatgagaagcggcggcgctggtggggctccgtgmtgagctggaaggcgtggggcctctgggggtcccactagtcaggtccctcccctcgctacgsttcgccctgttcagttagttaggtttggtgctttctttgcttgctgctatctytggggtttagctgctgctgctcaggtggattagttggtgatggttagtactcctacgctatttggcagtytggatggggaygttgtgttttagtatctgttggtgcggtgtgtcacgtgttaggctcttctcttgtgtactgkacatacacgcaggcatggagtgtgtggtttggttggtgtaaattatcattgtaatgtaatgtactcctactaatgtaaatgcggcagtagttgtg

SEQ ID NO: 4307 - protein, 252 aa, Zea mays subsp. mays
  peptide (1)..(252): Ceres Seq. ID no. 15222999
  misc_feature (1)..(1): Xaa is any aa, unknown or other
  misc_feature (2)..(2): Xaa is any aa, unknown or other
  misc_feature (72)..(72): Xaa is any aa, unknown or other
  misc_feature (76)..(76): Xaa is any aa, unknown or other
  misc_feature (241)..(241): Xaa is any aa, unknown or other
XXRKRDYSFSDQKTKKANPKTEKKKSREGMGKGKVHPSPPPAAAAAAAGGGAGETTAEAVLMRLMPAAVLAXAAPXGAEGKEVLAYLVLASLRSSAPPTPARGDGHRPELGCGCFGCYTAYWSRWDGSPEGDREAIHRAIEAFEEHLAEEEKGRGKGGGPRRGRKKRAEGKGRWKVKKEKEVEVGVDPLPPPSDLPAPEEAPKAEDGAEYLTAEDEKEEDAPTAAAGAEDEKRRRWWGSVXSWKAWGLWGSH

SEQ ID NO: 4308 - protein, 229 aa, Zea mays subsp. mays
  peptide (1)..(229): Ceres Seq. ID no. 15223000
  misc_feature (1)..(1): Xaa is any aa, unknown or other
  misc_feature (71)..(71): Xaa is any aa, unknown or other
  misc_feature (76)..(76): Xaa is any aa, unknown or other
XSKKGLFIFRPKNEKGKSKDGEEEESRRNGEGQGASLAAASCRGRGRGRRSRGDDGGGGADAADAGGGARXRGAAXGRGEGGAGVPGAGVAAVLGPADAGARGRAPPGARVRLLRVLHGLLVPLGRVPRGRPRGHPPRHRGVRGAPGGGGEGPREGRRAPPRAEEARRGQGEVEGEEGKGGGGRRRSTPAPVRSPRPGGGPQGGGRRGVPDGGGREGGGRSDCGRRRRG

SEQ ID NO: 4309 - protein, 223 aa, Zea mays subsp. mays
  peptide (1)..(223): Ceres Seq. ID no. 15223001
  misc_feature (43)..(43): Xaa is any aa, unknown or other
  misc_feature (47)..(47): Xaa is any aa, unknown or other
  misc_feature (212)..(212): Xaa is any aa, unknown or other
MGKGKVHPSPPPAAAAAAAGGGAGETTAEAVLMRLMPAAVLAXAAPXGAEGKEVLAYLVLASLRSSAPPTPARGDGHRPELGCGCFGCYTAYWSRWDGSPEGDREAIHRAIEAFEEHLAEEEKGRGKGGGPRRGRKKRAEGKGRWKVKKEKEVEVGVDPLPPPSDLPAPEEAPKAEDGAEYLTAEDEKEEDAPTAAAGAEDEKRRRWWGSVXSWKAWGLWGSH

SEQ ID NO: 4310 - DNA, 1782 bp, Zea mays subsp. mays
  misc_feature (1)..(1782): Ceres Seq. ID no. 12367381
  misc_feature (1)..(1782): Ortholog of  Ceres SEQ ID NO 15171430 as cited in SEQ ID NO 51500
  misc_feature (1)..(1782): Ortholog of  Ceres SEQ ID NO 15170354 as cited in SEQ ID NO 54190
  misc_feature (1)..(1782): Ortholog of  Ceres SEQ ID NO 14307253 as cited in SEQ ID NO 54783
  misc_feature (1)..(1782): Ortholog of  Ceres SEQ ID NO 15172476 as cited in SEQ ID NO 54945
  misc_feature (1)..(1782): Ortholog of  Ceres SEQ ID NO 13594213 as cited in SEQ ID NO 57038
  misc_feature (1)..(1782): Ortholog of  Ceres SEQ ID NO 15171508 as cited in SEQ ID NO 58526
  misc_feature (1)..(1782): Ortholog of  Ceres SEQ ID NO 14312300 as cited in SEQ ID NO 58632
  misc_feature (1)..(1782): Ortholog of  Ceres SEQ ID NO 15176106 as cited in SEQ ID NO 60324
  misc_feature (1)..(1782): Ortholog of  Ceres SEQ ID NO 13654989 as cited in SEQ ID NO 63117
  misc_feature (1)..(1782): Ortholog of  Ceres SEQ ID NO 13584744 as cited in SEQ ID NO 69137
accgttccttttctccaccattgaaacactctctgaccctcactcgctccctgtcacacacactacactcgcaattcatccgcagtcacaagctcggctgctgctcccgcctaacggttgaggcgttgctggtgcacacaggaagggaagggaagggagagctgcacacagctttgctctggctcttggctcccctgtccacctgtcctgtccgtccatcatggaggaaacgcccagcccgcagctctagccgccgtcaatctcgtctcgtatcggagtcgaaggaagtaagaggcgggatggcatgaagcgacctaccaagaatgagaggctgggcaacccccggcacaagtaggaggaagaacccgagcaaccgagccacagggaggaggaggagatgggcaactgcggcacacgggaggagaatgccgtcgtcgctgcgcacgcgcaagttcagcaactccacttgttacaacagccttccaagaacgccaatgcagataggaagcacacctgcatgtcatcagatataagtgacccttccacacctaggaaagttgaagatgccaagaacatttccatatacaacgatgtgattgccttcacattgtttgagctagagacaatcacaaagagcttccgtgttgattatgttcttggcgaaggaggatttgggaccgtttacaagggttacatagatgaaaatgtcagggttgggctgaagtcactgcctgttgcagtcaaggtgctcaacaaagatggacatcaagggcacagagaatggcttaccgaggttaactgcctggggcagttgaggcatccaaatttggtgaagttgatcggatattgctgcgaagatgaccatcggctgcttgtctacgagttcatgtttcgaggaagtctagaaaaccacttattccgaaagacagctacgccattgccctggggtactaggatgtcaatcgcgctgggagccgctaaagggctcgcttgcctccacaacgctcaaaggcccgtcatctacagagatttcaagacatcaaacattctgctggactccgattatactgccaaactgtctgactttggcctcgcaaaagatggccctgaaggtgatcagacgcatgtgtcgacacgggtgatgggaacctacggttatgctgcccctgaatatgtgatgaccggtcacttgactgctcggagtgacgtgtacagcttcggcgtggtcctgctggagctcctgacggggcgcaagtcgatcgacaagtcgcggcccagcagggagcagagcctggtggactgggcgctcccgaagctcaacgacaagaggaggctcctccagatcatcgacccgaggctggaggggcagtactcggccagagccgctcacaagtcctgcagcctcgcgttctactgcctgagccagaaccccaaggccaggccgctcatgagcgacgtcgtcgagaccctcgcgccgttgcagcagggcggcggcggcggcagcgacgcgtcctccggccttcctgactgcagaggccgccgcaggctgaccggcaacagcgtcgtccacttcagggccatccccaaccccaagtgcacgcctgttgtcccggcttgcagagtgcggtgatgttgctgcgcttcggttgaagctgctgggataggttcaggtgtgtactgtgaccatgggtggtggtgcgttttgatgatctgcatgttggattaatgtgggcttggcccaaattaatattcaataatagtcaatgctaatggcccactttt

SEQ ID NO: 4311 - protein, 410 aa, Zea mays subsp. mays
  peptide (1)..(410): Ceres Seq. ID no. 12367382
MGNCGTREENAVVAAHAQVQQLHLLQQPSKNANADRKHTCMSSDISDPSTPRKVEDAKNISIYNDVIAFTLFELETITKSFRVDYVLGEGGFGTVYKGYIDENVRVGLKSLPVAVKVLNKDGHQGHREWLTEVNCLGQLRHPNLVKLIGYCCEDDHRLLVYEFMFRGSLENHLFRKTATPLPWGTRMSIALGAAKGLACLHNAQRPVIYRDFKTSNILLDSDYTAKLSDFGLAKDGPEGDQTHVSTRVMGTYGYAAPEYVMTGHLTARSDVYSFGVVLLELLTGRKSIDKSRPSREQSLVDWALPKLNDKRRLLQIIDPRLEGQYSARAAHKSCSLAFYCLSQNPKARPLMSDVVETLAPLQQGGGGGSDASSGLPDCRGRRRLTGNSVVHFRAIPNPKCTPVVPACRVR

SEQ ID NO: 4312 - protein, 370 aa, Zea mays subsp. mays
  peptide (1)..(370): Ceres Seq. ID no. 12367383
MSSDISDPSTPRKVEDAKNISIYNDVIAFTLFELETITKSFRVDYVLGEGGFGTVYKGYIDENVRVGLKSLPVAVKVLNKDGHQGHREWLTEVNCLGQLRHPNLVKLIGYCCEDDHRLLVYEFMFRGSLENHLFRKTATPLPWGTRMSIALGAAKGLACLHNAQRPVIYRDFKTSNILLDSDYTAKLSDFGLAKDGPEGDQTHVSTRVMGTYGYAAPEYVMTGHLTARSDVYSFGVVLLELLTGRKSIDKSRPSREQSLVDWALPKLNDKRRLLQIIDPRLEGQYSARAAHKSCSLAFYCLSQNPKARPLMSDVVETLAPLQQGGGGGSDASSGLPDCRGRRRLTGNSVVHFRAIPNPKCTPVVPACRVR

SEQ ID NO: 4313 - protein, 247 aa, Zea mays subsp. mays
  peptide (1)..(247): Ceres Seq. ID no. 12367384
MFRGSLENHLFRKTATPLPWGTRMSIALGAAKGLACLHNAQRPVIYRDFKTSNILLDSDYTAKLSDFGLAKDGPEGDQTHVSTRVMGTYGYAAPEYVMTGHLTARSDVYSFGVVLLELLTGRKSIDKSRPSREQSLVDWALPKLNDKRRLLQIIDPRLEGQYSARAAHKSCSLAFYCLSQNPKARPLMSDVVETLAPLQQGGGGGSDASSGLPDCRGRRRLTGNSVVHFRAIPNPKCTPVVPACRVR

SEQ ID NO: 4314 - DNA, 1919 bp, Zea mays subsp. mays
  misc_feature (1)..(1919): Ceres Seq. ID no. 12406508
  misc_feature (1)..(1919): Ortholog of  Ceres SEQ ID NO 14311203 as cited in SEQ ID NO 53639
  misc_feature (1)..(1919): Ortholog of  Ceres SEQ ID NO 15176053 as cited in SEQ ID NO 57792
  misc_feature (1)..(1919): Ortholog of  Ceres SEQ ID NO 14311175 as cited in SEQ ID NO 60223
  misc_feature (1)..(1919): Ortholog of  Ceres SEQ ID NO 15224727 as cited in SEQ ID NO 64990
  misc_feature (1)..(1919): Ortholog of  Ceres SEQ ID NO 14308023 as cited in SEQ ID NO 65865
  misc_feature (1)..(1919): Ortholog of  Ceres SEQ ID NO 14307972 as cited in SEQ ID NO 66436
  misc_feature (1)..(1919): Ortholog of  Ceres SEQ ID NO 15170175 as cited in SEQ ID NO 67138
  misc_feature (1)..(1919): Ortholog of  Ceres SEQ ID NO 12614670 as cited in SEQ ID NO 68565
gactatgcatgcatacgttcggggtcgagatcgagctgaccaatgatccaatagccgccgccttgtggttgtgtcatatatgggggccgaccagtggccgtggccgtggccgtgggcgacgccgccgccgccggccctgctgcttctggcctcactactgccggcgctgctgctcgcgctgtggcgcctggtgtggcaaccgcgggccgtggcgcggtcgttcgcgaggcagggcatccgggggccgccctactgtttcctggccggatccttgtcggaggcgaagcggctggcgcgtgccagccggagaagggttccgcagctggacgtcgcttcacatgacatcatgcccatcttgctgccaccgttccaccgatgggtcgtcgagtatgggaggacattcctgtactggatcgggccaacacctgcaatcttctccgttgatttagagttgattaaggaagtgctcacagacaggacgggcctgtttggcaaggacttcatgatccccgttttcaaagtcctgttgggcaacgggctcatcttagcaaacggcgacgactggaaacggcacaggaaagttgtccttccagccttcaaccacgagaggatcaagagcatgtcggcagtgacggcggaagctacggaacagatggcacagcgatggtgcgagcagctaatactgcacagtggtgcccgtcaagcagcggaaatacaagtggaccgcgccatctgcgacctgactgccgaaatcatcggccgcgccgctttcggcaccagcctccaggaagccggtgaggtcctcctcctgatgcacgagatgcagaagatgggcgccgcggccatggtggatgctcccatactctggtatctgccgacgcggcgcaacctaacggtgcgacgtctggacaagctgttgagggccaagatcactgcgatgatggcagcgcgggtggccgccaattgcggcggtggctacggcgacgacctgctcggcctcctgctggaggcgtggtcgccggagcctgggcggcgccatgctgggagcgacgacgaagggacgacgacgacgacgctgaccaccggagaggtgatcgacgagtgcaagaccttcttcggcgccgggcaggagaccaccgccaccctcctcgtgtggaccatgttcctgctgagcacgcacccgcagtggcaggacaaggtcagggaggaggtcctccgcgaattccgcggcgacgtccccaccaccgacaccctctccagactgaagctgcttcacatggttctgctggagacactgaggctctacccgccgatcgtgtacatacaacggaggactgcctcagacgtcgtgctcaggggcatgctgcaggtcccgaggggaccgtggtatcgatccccatcggcctgctgcaacgggacagggaggtgtggggctccgacgccgacgagttcaaccccttgaggtttagcaatggcgtcgccagggccgccacggatccacacgcgctgctgtctttctcgctcggcccgagagcctgcaccggcaagagcttcggcatcatagaagcacagatcgtcatggcggtcatcctcaggaacttctccttctcgctctcccccacctacgttcacaagccaaagtatgtcgtctccctcactcccaaatgtgggatgcctctcatcttaaagaacatccatgcttgagaaaagattactggcggcactgtaacttgctaatattatattgtacgttgtgtggcatcgacagatcatatatatatactagaactagtcatgtgcccgtgcgttgctacggattctatatatcacatagataaactctgtttaattgggatatatagttgttcaaacatgtttcaaacatgtacaataatattaattcgacatatttcagtggc

SEQ ID NO: 4315 - protein, 460 aa, Zea mays subsp. mays
  peptide (1)..(460): Ceres Seq. ID no. 12406509
MGADQWPWPWPWATPPPPALLLLASLLPALLLALWRLVWQPRAVARSFARQGIRGPPYCFLAGSLSEAKRLARASRRRVPQLDVASHDIMPILLPPFHRWVVEYGRTFLYWIGPTPAIFSVDLELIKEVLTDRTGLFGKDFMIPVFKVLLGNGLILANGDDWKRHRKVVLPAFNHERIKSMSAVTAEATEQMAQRWCEQLILHSGARQAAEIQVDRAICDLTAEIIGRAAFGTSLQEAGEVLLLMHEMQKMGAAAMVDAPILWYLPTRRNLTVRRLDKLLRAKITAMMAARVAANCGGGYGDDLLGLLLEAWSPEPGRRHAGSDDEGTTTTTLTTGEVIDECKTFFGAGQETTATLLVWTMFLLSTHPQWQDKVREEVLREFRGDVPTTDTLSRLKLLHMVLLETLRLYPPIVYIQRRTASDVVLRGMLQVPRGPWYRSPSACCNGTGRCGAPTPTSSTP

SEQ ID NO: 4316 - protein, 371 aa, Zea mays subsp. mays
  peptide (1)..(371): Ceres Seq. ID no. 12406510
MPILLPPFHRWVVEYGRTFLYWIGPTPAIFSVDLELIKEVLTDRTGLFGKDFMIPVFKVLLGNGLILANGDDWKRHRKVVLPAFNHERIKSMSAVTAEATEQMAQRWCEQLILHSGARQAAEIQVDRAICDLTAEIIGRAAFGTSLQEAGEVLLLMHEMQKMGAAAMVDAPILWYLPTRRNLTVRRLDKLLRAKITAMMAARVAANCGGGYGDDLLGLLLEAWSPEPGRRHAGSDDEGTTTTTLTTGEVIDECKTFFGAGQETTATLLVWTMFLLSTHPQWQDKVREEVLREFRGDVPTTDTLSRLKLLHMVLLETLRLYPPIVYIQRRTASDVVLRGMLQVPRGPWYRSPSACCNGTGRCGAPTPTSSTP

SEQ ID NO: 4317 - protein, 319 aa, Zea mays subsp. mays
  peptide (1)..(319): Ceres Seq. ID no. 12406511
MIPVFKVLLGNGLILANGDDWKRHRKVVLPAFNHERIKSMSAVTAEATEQMAQRWCEQLILHSGARQAAEIQVDRAICDLTAEIIGRAAFGTSLQEAGEVLLLMHEMQKMGAAAMVDAPILWYLPTRRNLTVRRLDKLLRAKITAMMAARVAANCGGGYGDDLLGLLLEAWSPEPGRRHAGSDDEGTTTTTLTTGEVIDECKTFFGAGQETTATLLVWTMFLLSTHPQWQDKVREEVLREFRGDVPTTDTLSRLKLLHMVLLETLRLYPPIVYIQRRTASDVVLRGMLQVPRGPWYRSPSACCNGTGRCGAPTPTSSTP

SEQ ID NO: 4318 - DNA, 1320 bp, Zea mays subsp. mays
  misc_feature (1)..(1320): Ceres Seq. ID no. 12347913
  misc_feature (1)..(1320): Ortholog of  Ceres SEQ ID NO 13647678 as cited in SEQ ID NO 20358
agggttgttggagacggcctaaacccttctccatccgacggcgaacaccagcttccctccgcccgcccacatccctgctgtcagctgcgcctccccgcctgatcttgtcgcgcccgagagaccgcgggccagggaacgtcggccgccggagcctggcctgcattccgggggcagcgagaggatgttgcgttgcgcatacacgcagcggcggtgggcgcaccgccgggggggcttcgtaaccggcagcaccggttggtccaagccgccaccgccgagcctcggccgcgccgcgggggttggtacgaagaagtcggagtggtggacggtggacggggagatgcacgagatcggggaaagcgtgccgcatcgcgagcgcttcgccatcccgcgggacaacctccctaaccgccgccgcaagcagatgcgggagcaattcatgcgccgcacccgcctcgttctcaaagactcggaacacgaaacatggtgcaaaaagtacatggaattataccaagaacttagagaaaactgggaaaggttgtactgggacgaaggttattcaaaaaagattgctgaatctcatgctaattatgactctgccgaagaagatgatattgacttctcgccatacagcaggagaaggcagtccaatgtagaaccaaacaaggaccttggcttcggggtgaacaaacgaggtgaaacgtgggaaagggttactcaaattcgtgacaaatttgaatatgacagagaaaggagaatgagagaacgagcatttgctcccatgaacacggagaacaattttgctcggcgtgacccaagatttagaagccaggatgattcaagttttgctcatacgaacttgagtgatgattttggcttgcatgatcaaacttttggaaaccgttctgatcaaagttatgaaaatgagtcaaatttcaggaataagcgtgattcaagtttccaacatgaaccaagtgtcagaaaccagcgtaatttaaatatccaaaacgaaccaagtttcagaaaccaccgatatccagatttccaaaaccaaggtggcacaagaagtcagacatttgatgagtagagggtgaaaaaaaaagtggctgctgatttgctggcaacgtgagcatgctggttctgctgatttctgtggtggctcgtatgagatgttgtaatttcttctaaaatgattggtgtaagaaattatctcttgtggtagctggttgcaacaaaatagaaaggaagagatctgctgttgtaatcttgtaatatacgttggctacttactaagccaaaaaccgtaagcatcggattttgggc

SEQ ID NO: 4319 - protein, 300 aa, Zea mays subsp. mays
  peptide (1)..(300): Ceres Seq. ID no. 12347914
MLRCAYTQRRWAHRRGGFVTGSTGWSKPPPPSLGRAAGVGTKKSEWWTVDGEMHEIGESVPHRERFAIPRDNLPNRRRKQMREQFMRRTRLVLKDSEHETWCKKYMELYQELRENWERLYWDEGYSKKIAESHANYDSAEEDDIDFSPYSRRRQSNVEPNKDLGFGVNKRGETWERVTQIRDKFEYDRERRMRERAFAPMNTENNFARRDPRFRSQDDSSFAHTNLSDDFGLHDQTFGNRSDQSYENESNFRNKRDSSFQHEPSVRNQRNLNIQNEPSFRNHRYPDFQNQGGTRSQTFDE

SEQ ID NO: 4320 - protein, 248 aa, Zea mays subsp. mays
  peptide (1)..(248): Ceres Seq. ID no. 12347915
MHEIGESVPHRERFAIPRDNLPNRRRKQMREQFMRRTRLVLKDSEHETWCKKYMELYQELRENWERLYWDEGYSKKIAESHANYDSAEEDDIDFSPYSRRRQSNVEPNKDLGFGVNKRGETWERVTQIRDKFEYDRERRMRERAFAPMNTENNFARRDPRFRSQDDSSFAHTNLSDDFGLHDQTFGNRSDQSYENESNFRNKRDSSFQHEPSVRNQRNLNIQNEPSFRNHRYPDFQNQGGTRSQTFDE

SEQ ID NO: 4321 - protein, 220 aa, Zea mays subsp. mays
  peptide (1)..(220): Ceres Seq. ID no. 12347916
MREQFMRRTRLVLKDSEHETWCKKYMELYQELRENWERLYWDEGYSKKIAESHANYDSAEEDDIDFSPYSRRRQSNVEPNKDLGFGVNKRGETWERVTQIRDKFEYDRERRMRERAFAPMNTENNFARRDPRFRSQDDSSFAHTNLSDDFGLHDQTFGNRSDQSYENESNFRNKRDSSFQHEPSVRNQRNLNIQNEPSFRNHRYPDFQNQGGTRSQTFDE

SEQ ID NO: 4322 - DNA, 1000 bp, Zea mays subsp. mays
  misc_feature (1)..(1000): Ceres Seq. ID no. 12409957
  misc_feature (1)..(1000): Ortholog of  Ceres SEQ ID NO 13663942 as cited in SEQ ID NO 67573
acacgctcggctgagcactttcccgccgtcttcagaccgtcacaccctcggtcgtgacaggtttctgcctccactgccttccccgccgccgccatgccctcctccgccgcccgggccctcacatccgtctcccgcgcagccttctcctggaagccgacggggcggccgcagcaaacgctggcggcggcggtgagcaggtcgggcgtggggctccactcgggagcgcgcgtcaccgccacgctgtttccgacgcaagctggagagggtaggtatttcctcgtggagggtgatgaggaggcgagggtggcggcagaggtggggaacgccgagccactgtcgcagctctgcacgacgcttcgtcggggcgatggcgcccacacgcgggtccggacggtggaacaccttctttcggcgatggaggcgcttggcgtcgacaactgccgtatcgaggttagcggcggggatgagattcctttgcttgatggatcagcgcaagagtgggtagaggcagtacaaggcgttggcttgtgtgcggcagaggatgccaatggggaaaagttggataaactggcgcctgaaattcaggagcctgtttacctacggaaacacgattgctttatagctgcattccctagcccacaaatccacataacctgtggcattgatttcccaaaggtgccagcgattgagtgtcaatgggtttctacattcctggatgataatatatactcaagcaagattgcgcctgcaagaactttctgtatatttgaagaggttgaaaaaatgcgtgctgctggactcatcaaaggagggtcactagaaaatgctatggtttgcagcatatctggtggctggctgaatccaccactgcggttcgaggatgagcttccgccacaagattttagatcttattggtgacttctcgctgtttgcacagaatggtaaccagggctttccaattgctcatataattgcctataaggctggtcacgcgctgcac

SEQ ID NO: 4323 - protein, 274 aa, Zea mays subsp. mays
  peptide (1)..(274): Ceres Seq. ID no. 12409958
MPSSAARALTSVSRAAFSWKPTGRPQQTLAAAVSRSGVGLHSGARVTATLFPTQAGEGRYFLVEGDEEARVAAEVGNAEPLSQLCTTLRRGDGAHTRVRTVEHLLSAMEALGVDNCRIEVSGGDEIPLLDGSAQEWVEAVQGVGLCAAEDANGEKLDKLAPEIQEPVYLRKHDCFIAAFPSPQIHITCGIDFPKVPAIECQWVSTFLDDNIYSSKIAPARTFCIFEEVEKMRAAGLIKGGSLENAMVCSISGGWLNPPLRFEDELPPQDFRSYW

SEQ ID NO: 4324 - protein, 167 aa, Zea mays subsp. mays
  peptide (1)..(167): Ceres Seq. ID no. 12409959
MEALGVDNCRIEVSGGDEIPLLDGSAQEWVEAVQGVGLCAAEDANGEKLDKLAPEIQEPVYLRKHDCFIAAFPSPQIHITCGIDFPKVPAIECQWVSTFLDDNIYSSKIAPARTFCIFEEVEKMRAAGLIKGGSLENAMVCSISGGWLNPPLRFEDELPPQDFRSYW

SEQ ID NO: 4325 - DNA, 1391 bp, Zea mays subsp. mays
  misc_feature (1)..(1391): Ceres Seq. ID no. 12348999
  misc_feature (1)..(1391): Ortholog of  Ceres SEQ ID NO 14313471 as cited in SEQ ID NO 64513
  misc_feature (1)..(1391): Ortholog of  Ceres SEQ ID NO 13591377 as cited in SEQ ID NO 66534
atcctgaacccgaaagctgaactaccacacacaacaaataactgacgcaggcgatccatcactccacacaccggtcggaaccgaggccaaccaacgacgccgccgccaatgtcgtcccctgcagcgccggtgcagccgccgccgccgcgcgcggtgcgcttcggcgtcctgggatgcgctgacattgcgcgtaagatctcgcgcgcaatgctgatgctccctccgggcgccgccaccatcgccgccgtaggcagtcgctccgatgacaaggcccgccgcttcatctccgaaatcggcttccccgcggcgcgcgtccacgggtcctacgagtctctcctagaggacccggacgtggaggccgtgtacctcccgctccccaccagtctccacgtgccctgggccacagccgtcgctgcgcgtggcaagcacctgctcctcgagaagcccaccgcgctctgcactgccgaactcgacgccatcctcggcgcctgcgacgcctccggggtccagttcatggacaccaccatgtggatccacaacccgcgcaccgccaagatgcgggagatcgtcagcgacaaggacgcctttggcgacgtcagagtgataaacagtatgtgcagctttcgggcatccgaggaattcctcaagaatgacatcagggtaaagccagaccttgacgccttgggtgtcctcggtgatgttggatggtactgcatccgctcaatcctgtgggctgttgactatgagctgcctgagaccgtgatcgctcaccgccatcctgtcaagaaccaggctggcgtgctccttgcttgcggtgcgaccttgtactgggcagatggcaagactgcaaacttcaactgctcgtttcttgctaacctcgcctttgacgtgaccgtctatggcacaaacggcactctccatgtcactgacctggtcattccgtacgaagagagctctgcggagttcagtgtggcctcgaagtcaagcttcgtcaaacccaccatcggatgggatccattgccagagaagcatgttgttactactgatctgccacaggaggcactcatgatccaggaattcacaaggcttgtgcagaacgtccgcgccggtggcaggcctgagggtaagtggccggctatcacccggaagacgcaggtggtactggatgccgtgaaagcttctattgacaagggatctgaaccagttgaggttgccagctaaatacaacaaatgccagctccttgtgctaggtttgtacttaatggcttctactcgtatttgctgtcgcgcaaatgaaggtagtaattgtaatactgtcacgtaaattgaaactggtaattgtaataatcttaaggaatctggtcaaattgaggagaacatttttacagttt

SEQ ID NO: 4326 - protein, 370 aa, Zea mays subsp. mays
  peptide (1)..(370): Ceres Seq. ID no. 12349000
MSSPAAPVQPPPPRAVRFGVLGCADIARKISRAMLMLPPGAATIAAVGSRSDDKARRFISEIGFPAARVHGSYESLLEDPDVEAVYLPLPTSLHVPWATAVAARGKHLLLEKPTALCTAELDAILGACDASGVQFMDTTMWIHNPRTAKMREIVSDKDAFGDVRVINSMCSFRASEEFLKNDIRVKPDLDALGVLGDVGWYCIRSILWAVDYELPETVIAHRHPVKNQAGVLLACGATLYWADGKTANFNCSFLANLAFDVTVYGTNGTLHVTDLVIPYEESSAEFSVASKSSFVKPTIGWDPLPEKHVVTTDLPQEALMIQEFTRLVQNVRAGGRPEGKWPAITRKTQVVLDAVKASIDKGSEPVEVAS

SEQ ID NO: 4327 - protein, 337 aa, Zea mays subsp. mays
  peptide (1)..(337): Ceres Seq. ID no. 12349001
MLMLPPGAATIAAVGSRSDDKARRFISEIGFPAARVHGSYESLLEDPDVEAVYLPLPTSLHVPWATAVAARGKHLLLEKPTALCTAELDAILGACDASGVQFMDTTMWIHNPRTAKMREIVSDKDAFGDVRVINSMCSFRASEEFLKNDIRVKPDLDALGVLGDVGWYCIRSILWAVDYELPETVIAHRHPVKNQAGVLLACGATLYWADGKTANFNCSFLANLAFDVTVYGTNGTLHVTDLVIPYEESSAEFSVASKSSFVKPTIGWDPLPEKHVVTTDLPQEALMIQEFTRLVQNVRAGGRPEGKWPAITRKTQVVLDAVKASIDKGSEPVEVAS

SEQ ID NO: 4328 - protein, 335 aa, Zea mays subsp. mays
  peptide (1)..(335): Ceres Seq. ID no. 12349002
MLPPGAATIAAVGSRSDDKARRFISEIGFPAARVHGSYESLLEDPDVEAVYLPLPTSLHVPWATAVAARGKHLLLEKPTALCTAELDAILGACDASGVQFMDTTMWIHNPRTAKMREIVSDKDAFGDVRVINSMCSFRASEEFLKNDIRVKPDLDALGVLGDVGWYCIRSILWAVDYELPETVIAHRHPVKNQAGVLLACGATLYWADGKTANFNCSFLANLAFDVTVYGTNGTLHVTDLVIPYEESSAEFSVASKSSFVKPTIGWDPLPEKHVVTTDLPQEALMIQEFTRLVQNVRAGGRPEGKWPAITRKTQVVLDAVKASIDKGSEPVEVAS

SEQ ID NO: 4329 - DNA, 1374 bp, Zea mays subsp. mays
  misc_feature (1)..(1374): Ceres Seq. ID no. 12435065
  misc_feature (1)..(1374): Ortholog of  Ceres SEQ ID NO 15171426 as cited in SEQ ID NO 51543
  misc_feature (1)..(1374): Ortholog of  Ceres SEQ ID NO 14311780 as cited in SEQ ID NO 59241
  misc_feature (1)..(1374): Ortholog of  Ceres SEQ ID NO 13584630 as cited in SEQ ID NO 65282
acgaccgactccctcaattacctgcccgtcccaattgtttccgcaagtcgcccagaccagatttgccagaacgcaacctcggctccgaaaccctagccgcacgcagctgtccacttctactcccctcgcctcgccacacccgccgcgcggcacgatcagacgccatggccgccgagaactactggaggtacgctgatgcgcggcagcagcagcaggcgatggtngccgccgcggcggcgcagcggggatggctcccgcggcgaccgtcgccgcgncccanacggtcgggagtncgncgncgnctatgaaccagcaggctgccgccgccgccatggcgcagcaggccgccgctgcgccgcctctcaagcgcgcgcgccccgacttcggtgatgtgtctggtgggcaagacatgacaggatattatccacgtgaaactgacaggtcaggataccattccctcagagagaacgacacacttggggcatcttatgaccgttacttgcgcaatgggatggcctccgtcggtgcaaatgacacttctagggctgccgggatgggtgctggattggctgcagggatgactgcagggatgggtgctggaatggctgcagggatggctggctatggtgttgatggtcagcgtatgatgggtgttgttggtatggacagcagagggatgggatatggtggcagacctgagccacctcttccgcctgatgcatcaagcactctatatattgagggcttacctgcaaactgcacacgacgggaggtttcacatatatttcgcccatttgttggttttcgtgaagttcgtcttgtcaacaaggagtccagacatcctggtggagatccacatgtgttgtgtttcgtcgattttgacaaccctgctcaggctacaattgctctggaagcattacaaggttataagtttgacgaacacgagcgtgattcagcccatttgcgtctgcaattctcacgctttcccggtccaaggtcagctggtgggcctcgcggtaggcgttaagacgtgcggacctcgtggttgccgaacctatcgtttatacgagcgatccaactacggtgggctaacgcttcgatatgcgctgaatttcggggcggtggctttttagggttcgtcagctcatttcgtgaatgcgtgaaagggacaatgcaataagtgatattctgccatatgttattagatgccgtataatgtgttaggcatggaaagttattcgacatactgtatctgctgccttagctattgtggtctactgtaacttcattaccttgcttcacatccgagacaatttgagtttgttatcatgtggattatctgttttgaaaatgaaaactagatgatgttagcct

SEQ ID NO: 4330 - protein, 259 aa, Zea mays subsp. mays
  peptide (1)..(259): Ceres Seq. ID no. 12435066
  misc_feature (10)..(10): Xaa is any aa, unknown or other
  misc_feature (11)..(11): Xaa is any aa, unknown or other
  misc_feature (16)..(16): Xaa is any aa, unknown or other
  misc_feature (17)..(17): Xaa is any aa, unknown or other
  misc_feature (18)..(18): Xaa is any aa, unknown or other
  misc_feature (19)..(19): Xaa is any aa, unknown or other
MAPAATVAAXXTVGSXXXXMNQQAAAAAMAQQAAAAPPLKRARPDFGDVSGGQDMTGYYPRETDRSGYHSLRENDTLGASYDRYLRNGMASVGANDTSRAAGMGAGLAAGMTAGMGAGMAAGMAGYGVDGQRMMGVVGMDSRGMGYGGRPEPPLPPDASSTLYIEGLPANCTRREVSHIFRPFVGFREVRLVNKESRHPGGDPHVLCFVDFDNPAQATIALEALQGYKFDEHERDSAHLRLQFSRFPGPRSAGGPRGRR

SEQ ID NO: 4331 - protein, 240 aa, Zea mays subsp. mays
  peptide (1)..(240): Ceres Seq. ID no. 12435067
MNQQAAAAAMAQQAAAAPPLKRARPDFGDVSGGQDMTGYYPRETDRSGYHSLRENDTLGASYDRYLRNGMASVGANDTSRAAGMGAGLAAGMTAGMGAGMAAGMAGYGVDGQRMMGVVGMDSRGMGYGGRPEPPLPPDASSTLYIEGLPANCTRREVSHIFRPFVGFREVRLVNKESRHPGGDPHVLCFVDFDNPAQATIALEALQGYKFDEHERDSAHLRLQFSRFPGPRSAGGPRGRR

SEQ ID NO: 4332 - protein, 231 aa, Zea mays subsp. mays
  peptide (1)..(231): Ceres Seq. ID no. 12435068
MAQQAAAAPPLKRARPDFGDVSGGQDMTGYYPRETDRSGYHSLRENDTLGASYDRYLRNGMASVGANDTSRAAGMGAGLAAGMTAGMGAGMAAGMAGYGVDGQRMMGVVGMDSRGMGYGGRPEPPLPPDASSTLYIEGLPANCTRREVSHIFRPFVGFREVRLVNKESRHPGGDPHVLCFVDFDNPAQATIALEALQGYKFDEHERDSAHLRLQFSRFPGPRSAGGPRGRR

SEQ ID NO: 4333 - DNA, 1097 bp, Zea mays subsp. mays
  misc_feature (1)..(1097): Ceres Seq. ID no. 12367604
  misc_feature (1)..(1097): Ortholog of  Ceres SEQ ID NO 14310358 as cited in SEQ ID NO 54582
  misc_feature (1)..(1097): Ortholog of  Ceres SEQ ID NO 15176085 as cited in SEQ ID NO 69305
gctcccctccgcatctccgttcgccatggcatcctcctccgagccctcggcgctgccgacgctcctggtgttccgcgtccgagagctgcggttcctcgcggcgctgcgcgagcggtaccgcgtcctcgacttcttcacgtcgggctcgccgctcgccgccttcctggccgcggcggccggcggcgcggacccgccccgcgcgttggtgaccgtggggggcgactccgtccgcgtggacgccgcgctcctggacgccgtcccgtcgctccgcttcgtccacagcacgggggccgggctggaccacatcgacctcggcgagtgcgcgcgccgcggcgtgggcgtcgccagctccggcacggtctactccaccgacgtcgccgaccacgccgtcggcttgctcgtcgacgtgctccgccgcgtgtccgccgccgaccggttcgtccgccgcgggctctggccgctccacggcgactatcccctcggcagcaagctgggcggcaagcgcgtgggcatcatcggcctgggcaacatcggcacgctgatcgcgaagaggctggcagccttcggctgcgtcatctgctacagctccagaaagcccaaggaatccgtctcctactggtacttccctagcgtccacgacctcgcgtcggaatcggacgtgctcgtcgtcgcgtgcgcgctgaccagggagacgcgccacatcgtgaacaaggacgtgctggcggcgctcgggaaggacggggtcgtggtaaacatcggccggggcccgaacatcgacgaggcggagctggtcgcggcgctcaaggaggggaggatcgccggagccagcctggatgtctttgataaggagcctaaggtgccggcagaggctcttctccatggacaatgtggtgctgacgcatcacgtcgcggtcttcacgacagagtccaggtccgacctccgtgacgtcaccatcagtaaccttgaagctttcttcgccggtaggccgctgcttaacccggtgcttcactcttgatggtttgttcgtgttattgcagcaggtcgatccatgtacgtgtaggaatgtgatttgttgaatacattttattttcgaccc

SEQ ID NO: 4334 - protein, 314 aa, Zea mays subsp. mays
  peptide (1)..(314): Ceres Seq. ID no. 12367605
LPSASPFAMASSSEPSALPTLLVFRVRELRFLAALRERYRVLDFFTSGSPLAAFLAAAAGGADPPRALVTVGGDSVRVDAALLDAVPSLRFVHSTGAGLDHIDLGECARRGVGVASSGTVYSTDVADHAVGLLVDVLRRVSAADRFVRRGLWPLHGDYPLGSKLGGKRVGIIGLGNIGTLIAKRLAAFGCVICYSSRKPKESVSYWYFPSVHDLASESDVLVVACALTRETRHIVNKDVLAALGKDGVVVNIGRGPNIDEAELVAALKEGRIAGASLDVFDKEPKVPAEALLHGQCGADASRRGLHDRVQVRPP

SEQ ID NO: 4335 - protein, 306 aa, Zea mays subsp. mays
  peptide (1)..(306): Ceres Seq. ID no. 12367606
MASSSEPSALPTLLVFRVRELRFLAALRERYRVLDFFTSGSPLAAFLAAAAGGADPPRALVTVGGDSVRVDAALLDAVPSLRFVHSTGAGLDHIDLGECARRGVGVASSGTVYSTDVADHAVGLLVDVLRRVSAADRFVRRGLWPLHGDYPLGSKLGGKRVGIIGLGNIGTLIAKRLAAFGCVICYSSRKPKESVSYWYFPSVHDLASESDVLVVACALTRETRHIVNKDVLAALGKDGVVVNIGRGPNIDEAELVAALKEGRIAGASLDVFDKEPKVPAEALLHGQCGADASRRGLHDRVQVRPP

SEQ ID NO: 4336 - protein, 209 aa, Zea mays subsp. mays
  peptide (1)..(209): Ceres Seq. ID no. 12367607
APLRISVRHGILLRALGAADAPGVPRPRAAVPRGAARAVPRPRLLHVGLAARRLPGRGGRRRGPAPRVGDRGGRLRPRGRRAPGRRPVAPLRPQHGGRAGPHRPRRVRAPRRGRRQLRHGLLHRRRRPRRRLARRRAPPRVRRRPVRPPRALAAPRRLSPRQQAGRQARGHHRPGQHRHADREEAGSLRLRHLLQLQKAQGIRLLLVLP

SEQ ID NO: 4337 - DNA, 1017 bp, Zea mays subsp. mays
  misc_feature (1)..(1017): Ceres Seq. ID no. 12409953
  misc_feature (1)..(1017): Ortholog of  Ceres SEQ ID NO 13595667 as cited in SEQ ID NO 56786
aaaccctaacccctctctttcgttgcccatcctcgtgacggctcctcgccagtcgcctcgtctctccctgccgcgtcgcctccagttccgacgccagcgcgcctcccgcctccgccgcgcctgacgaacgcagtgtaggactgtgcaggtagagaggaggagggtccggcgagatggggatgcgagataagaagcggaaccagaagcgagtgctcgcgcgccgtaccgcggtaccgcgcccaggcgagggcaaggacttcctgccgctggaaggaggccccggtaagaagctgcggaaggtgcagcagcctgaagagcccgaaaacacagccacagtcgtctacattgggcatgtcccccatggtttctacgaggacgagatgaaagggttctttaagcagtttggggatattaagaggcttaggatcgctcgtaaccgcaagacaggaaagtccaagcactatggattcattgagtttgagaaccctgctgtggcaaaggttgtagcagatgagatgaataactatctcttgtttgagcgcaccttgcaagttgcacttgttgagccggagaaagttcatcctaaattatggaaaggggtgcgaaggggatttatacctgttgatcgagtagcaattgaacggaagagacacaacaaggataagactgtagcagagcacaaaaagatggttgaaggaattgtaaagcgggatggaaagcgtcgcaaaagaatcaaggcagctggtattgactatgagtgtccagctcttatagggagcattcgaccatcagcgaaaaagatcaagttcgatgaggcatagtattttactctaatttactctaatgggctgttggatccttagtagacgaggcggtggaatggttgagcaatatattcaccttttgaggagacggcagacaactatgtatttcacttttgaatttctctatgttttatgaatgacaccgacacagatgttacaacttaagtatgaaaatgcaatgagctgtgttctt

SEQ ID NO: 4338 - protein, 215 aa, Zea mays subsp. mays
  peptide (1)..(215): Ceres Seq. ID no. 12409954
MGMRDKKRNQKRVLARRTAVPRPGEGKDFLPLEGGPGKKLRKVQQPEEPENTATVVYIGHVPHGFYEDEMKGFFKQFGDIKRLRIARNRKTGKSKHYGFIEFENPAVAKVVADEMNNYLLFERTLQVALVEPEKVHPKLWKGVRRGFIPVDRVAIERKRHNKDKTVAEHKKMVEGIVKRDGKRRKRIKAAGIDYECPALIGSIRPSAKKIKFDEA

SEQ ID NO: 4339 - protein, 213 aa, Zea mays subsp. mays
  peptide (1)..(213): Ceres Seq. ID no. 12409955
MRDKKRNQKRVLARRTAVPRPGEGKDFLPLEGGPGKKLRKVQQPEEPENTATVVYIGHVPHGFYEDEMKGFFKQFGDIKRLRIARNRKTGKSKHYGFIEFENPAVAKVVADEMNNYLLFERTLQVALVEPEKVHPKLWKGVRRGFIPVDRVAIERKRHNKDKTVAEHKKMVEGIVKRDGKRRKRIKAAGIDYECPALIGSIRPSAKKIKFDEA

SEQ ID NO: 4340 - protein, 146 aa, Zea mays subsp. mays
  peptide (1)..(146): Ceres Seq. ID no. 12409956
MKGFFKQFGDIKRLRIARNRKTGKSKHYGFIEFENPAVAKVVADEMNNYLLFERTLQVALVEPEKVHPKLWKGVRRGFIPVDRVAIERKRHNKDKTVAEHKKMVEGIVKRDGKRRKRIKAAGIDYECPALIGSIRPSAKKIKFDEA

SEQ ID NO: 4341 - DNA, 1276 bp, Zea mays subsp. mays
  misc_feature (1)..(1276): Ceres Seq. ID no. 12405671
  misc_feature (1)..(1276): Ortholog of  Ceres SEQ ID NO 14315518 as cited in SEQ ID NO 60467
  misc_feature (1)..(1276): Ortholog of  Ceres SEQ ID NO 12585444 as cited in SEQ ID NO 62814
tctctctctctctctctcgtgcgtgtcgaagactcgaagtcgaactcaaaacacgcaacacgcaagtcacgaacgcacgacaaaaggaagaaaaacccaagaaatatctctgcggccctgctcgtcccgagccgagccggcgagatggcggggatgtctcgcgcgatccgcaacttcgccgccgcgtcccggcgaaccctgaccgctgcttcggggccggcgctgccgaaggaggcggcggcgcgggtgagggcgggggcgcccgggcgcatggggcgggatcaggaggacgggaggcgcgtgcagtgggtgttcctcgggtgccccggggtggggaagggcacctacgccagccgcctctcgcagctgctcggcgtcccgcacatcgccaccggcgacctcgtccgcgacgccctggccacccctggccccttctccaacaagcttgctgagattgtcaatcatggaaaactggtgtctgatgagatcatcataaatctgctgtcaagacgtctggaagagggagaggaaaagggtgaattggggttcatccttgatggctttcctcgaaccataggacaagcggagatacttgaaggagtcacagacattgatttggtgatcaatctcaaactccgagaagaagctctgcttgcgaaatgccttggcaggaggatgtgcagccagtgtggagggaacttcaatgtggcctccattgatattgagggtgaagacggcgggcctcgaatgtacatgcccccactgttgcctcctccacagtgtgaatcgaagctgattgctagagcagacgatactgaagaagtggtaaaagagcggctgcgtgtgtaccatgatttgactgaaccagtggaggagttctacagagcacgtgggaaactgctggagttcaatctgcctggtgggatacccgaatcatggccgaagttactgcaggccctgaacatagaagaccccgacaataagcgatctgcagcagcatgattcttgttttgttataggaatgcacattctaaattgaacatctgtagactatgtcaaagctagtcaaattggtgggcattccttacatctttgggaagcctactccattctggatccagattattgtggcatggcactcaactgtacagtagattgatcatcgattggcaaggtcgatcgatggatgtgctgactgtgatcctcgaacgtaaggtgtgtaaaaaggcaagaaaataattgttgggcgtcgagacattcacttgtaggtcgtacc

SEQ ID NO: 4342 - protein, 333 aa, Zea mays subsp. mays
  peptide (1)..(333): Ceres Seq. ID no. 12405672
SLSLSLVRVEDSKSNSKHATRKSRTHDKRKKNPRNISAALLVPSRAGEMAGMSRAIRNFAAASRRTLTAASGPALPKEAAARVRAGAPGRMGRDQEDGRRVQWVFLGCPGVGKGTYASRLSQLLGVPHIATGDLVRDALATPGPFSNKLAEIVNHGKLVSDEIIINLLSRRLEEGEEKGELGFILDGFPRTIGQAEILEGVTDIDLVINLKLREEALLAKCLGRRMCSQCGGNFNVASIDIEGEDGGPRMYMPPLLPPPQCESKLIARADDTEEVVKERLRVYHDLTEPVEEFYRARGKLLEFNLPGGIPESWPKLLQALNIEDPDNKRSAAA

SEQ ID NO: 4343 - protein, 285 aa, Zea mays subsp. mays
  peptide (1)..(285): Ceres Seq. ID no. 12405673
MAGMSRAIRNFAAASRRTLTAASGPALPKEAAARVRAGAPGRMGRDQEDGRRVQWVFLGCPGVGKGTYASRLSQLLGVPHIATGDLVRDALATPGPFSNKLAEIVNHGKLVSDEIIINLLSRRLEEGEEKGELGFILDGFPRTIGQAEILEGVTDIDLVINLKLREEALLAKCLGRRMCSQCGGNFNVASIDIEGEDGGPRMYMPPLLPPPQCESKLIARADDTEEVVKERLRVYHDLTEPVEEFYRARGKLLEFNLPGGIPESWPKLLQALNIEDPDNKRSAAA

SEQ ID NO: 4344 - protein, 282 aa, Zea mays subsp. mays
  peptide (1)..(282): Ceres Seq. ID no. 12405674
MSRAIRNFAAASRRTLTAASGPALPKEAAARVRAGAPGRMGRDQEDGRRVQWVFLGCPGVGKGTYASRLSQLLGVPHIATGDLVRDALATPGPFSNKLAEIVNHGKLVSDEIIINLLSRRLEEGEEKGELGFILDGFPRTIGQAEILEGVTDIDLVINLKLREEALLAKCLGRRMCSQCGGNFNVASIDIEGEDGGPRMYMPPLLPPPQCESKLIARADDTEEVVKERLRVYHDLTEPVEEFYRARGKLLEFNLPGGIPESWPKLLQALNIEDPDNKRSAAA

SEQ ID NO: 4345 - DNA, 422 bp, Zea mays subsp. mays
  misc_feature (1)..(422): Ceres Seq. ID no. 13564422
  misc_feature (1)..(422): Ortholog of  Ceres SEQ ID NO 13654238 as cited in SEQ ID NO 67874
ggccggcaactcgacagggaaaaggaagacgcaccgctagagctgagatgtccttcttcttccgcatggcgtcgcggctgcggccgtcgacgccggaggaggtggtgcgctccatcaaggactccttcctcgcgctccacacgcgcacccacgccaaggctctggaagaggtcgagaaaaatatgtcatctttgagattgttgatctttggtgatggagaagtcgaaccaaatgaagagcaggtcctgcaaataaccctcgagatttgcaaggaggacgtcatttccctgatcgtccaggatctgccttccttgggctggggagtaagaaaagatctggctatctgctggtgcatcttgcttargcagaargttgatgaaacttattgctgtgtgcagtatcttgaaaatcatctgnagctt

SEQ ID NO: 4346 - protein, 140 aa, Zea mays subsp. mays
  peptide (1)..(140): Ceres Seq. ID no. 13564423
  misc_feature (121)..(121): Xaa is any aa, unknown or other
  misc_feature (123)..(123): Xaa is any aa, unknown or other
  misc_feature (139)..(139): Xaa is any aa, unknown or other
PATRQGKGRRTARAEMSFFFRMASRLRPSTPEEVVRSIKDSFLALHTRTHAKALEEVEKNMSSLRLLIFGDGEVEPNEEQVLQITLEICKEDVISLIVQDLPSLGWGVRKDLAICWCILLXQXVDETYCCVQYLENHLXL

SEQ ID NO: 4347 - protein, 125 aa, Zea mays subsp. mays
  peptide (1)..(125): Ceres Seq. ID no. 13564424
  misc_feature (106)..(106): Xaa is any aa, unknown or other
  misc_feature (108)..(108): Xaa is any aa, unknown or other
  misc_feature (124)..(124): Xaa is any aa, unknown or other
MSFFFRMASRLRPSTPEEVVRSIKDSFLALHTRTHAKALEEVEKNMSSLRLLIFGDGEVEPNEEQVLQITLEICKEDVISLIVQDLPSLGWGVRKDLAICWCILLXQXVDETYCCVQYLENHLXL

SEQ ID NO: 4348 - protein, 119 aa, Zea mays subsp. mays
  peptide (1)..(119): Ceres Seq. ID no. 13564425
  misc_feature (100)..(100): Xaa is any aa, unknown or other
  misc_feature (102)..(102): Xaa is any aa, unknown or other
  misc_feature (118)..(118): Xaa is any aa, unknown or other
MASRLRPSTPEEVVRSIKDSFLALHTRTHAKALEEVEKNMSSLRLLIFGDGEVEPNEEQVLQITLEICKEDVISLIVQDLPSLGWGVRKDLAICWCILLXQXVDETYCCVQYLENHLXL

SEQ ID NO: 4349 - DNA, 1622 bp, Zea mays subsp. mays
  misc_feature (1)..(1622): Ceres Seq. ID no. 12351540
  misc_feature (1)..(1622): Ortholog of  Ceres SEQ ID NO 14313463 as cited in SEQ ID NO 64209
aattccttcctctcctctcgccccacgcccctctccatctgctcccgctccgcctcgcctagggttttgcccccaaacctagcctcccccgaatctcccacgccatggacgtcgagggcgaggtccccgccgccgccgcggcggcggtggcgaacggcctgggcggcgcgggcgcggaggaggcctctccggcgccggtctcggctgagcagctcgacgtggaggcgtacgcggcgcagtactcggggcggacccgcctcgtgcgcctcctctttgtcgccgaccggtgcggggtggaggcgatgcagctcgaggcgctgcggatggcttacgacgagatcaagcgcggggaggacgtgcagctccaccgcgacgtcgtcaccaagatcggcggccgcctcggtccgcgctacggcctcgaccaggcgtgggtcttcagcgtctcccgccgcgccgaccagcgcaaggagaagctcgagagcgagctcaatggatacaggactaacttaatcaaagagagcatcagaatgggctacaatgacattggtgatttcttctatgcccatggccaactttcagatgctttcaaaagctacatcaggactcgggactattgcaccacttccaaacatatagttcagatgtgcatgaatgtgattctggttagcattgagctggggcaatatgcacatgtttcaaactatgtcagcaaagcagagcaaacccccgactctctggatcctaccattgttgcaaagctgaaggcagctgcaggattagccaacttggaaacaaagaaatacaaatttgctgctcgtaagtttgttgagacaggaattgaactaggaaacaacttctctgaagtcatagctcctcaagacgtggcagtctatggtgccctttgtgcacttgcttcttttgaccgttcagacctgaagagcaaagtcattgacaatatcaacttccgtaactttctggacctggtgcctgaagtaagggagctggttaatgatttttatgcaagtcgctatggatcttgcttgggtcatcttgagaagctaaagcctaacctgctcctggatatccatttgcatcagcatgtagagactctgtatatggagattcgccacaaagcgatcatacagtacacacttccttttatatctgttgacctcaacacgatggcagccgcctttaagacttcggtctccatgctgcagaaggagctggccgcactgattactgaggacaaaatacaggcccggatagactcccacaacaagatcctttacgcaaggcatgctgaccagagaaatgcaactttccagcgtgtccttcaaaccggcaatgactttgagagagatgtcaagtccatgcttctgcgtgccaacctcctcaagcatgattacattcagaagacaagcggaccaaggaagatgtaaagattgcgggcgtcgctgctaggcaaggcttcctgctgcatgcctctccacttttttttttgaagaattgttctgtgacataaaagggaccgaagtctgtctaaatgccctccccctctttctttttattggttgatgaaagttattgtcgaagtaatgtatggttgagcatctggatgt

SEQ ID NO: 4350 - protein, 445 aa, Zea mays subsp. mays
  peptide (1)..(445): Ceres Seq. ID no. 12351541
MDVEGEVPAAAAAAVANGLGGAGAEEASPAPVSAEQLDVEAYAAQYSGRTRLVRLLFVADRCGVEAMQLEALRMAYDEIKRGEDVQLHRDVVTKIGGRLGPRYGLDQAWVFSVSRRADQRKEKLESELNGYRTNLIKESIRMGYNDIGDFFYAHGQLSDAFKSYIRTRDYCTTSKHIVQMCMNVILVSIELGQYAHVSNYVSKAEQTPDSLDPTIVAKLKAAAGLANLETKKYKFAARKFVETGIELGNNFSEVIAPQDVAVYGALCALASFDRSDLKSKVIDNINFRNFLDLVPEVRELVNDFYASRYGSCLGHLEKLKPNLLLDIHLHQHVETLYMEIRHKAIIQYTLPFISVDLNTMAAAFKTSVSMLQKELAALITEDKIQARIDSHNKILYARHADQRNATFQRVLQTGNDFERDVKSMLLRANLLKHDYIQKTSGPRKM

SEQ ID NO: 4351 - protein, 379 aa, Zea mays subsp. mays
  peptide (1)..(379): Ceres Seq. ID no. 12351542
MQLEALRMAYDEIKRGEDVQLHRDVVTKIGGRLGPRYGLDQAWVFSVSRRADQRKEKLESELNGYRTNLIKESIRMGYNDIGDFFYAHGQLSDAFKSYIRTRDYCTTSKHIVQMCMNVILVSIELGQYAHVSNYVSKAEQTPDSLDPTIVAKLKAAAGLANLETKKYKFAARKFVETGIELGNNFSEVIAPQDVAVYGALCALASFDRSDLKSKVIDNINFRNFLDLVPEVRELVNDFYASRYGSCLGHLEKLKPNLLLDIHLHQHVETLYMEIRHKAIIQYTLPFISVDLNTMAAAFKTSVSMLQKELAALITEDKIQARIDSHNKILYARHADQRNATFQRVLQTGNDFERDVKSMLLRANLLKHDYIQKTSGPRKM

SEQ ID NO: 4352 - protein, 372 aa, Zea mays subsp. mays
  peptide (1)..(372): Ceres Seq. ID no. 12351543
MAYDEIKRGEDVQLHRDVVTKIGGRLGPRYGLDQAWVFSVSRRADQRKEKLESELNGYRTNLIKESIRMGYNDIGDFFYAHGQLSDAFKSYIRTRDYCTTSKHIVQMCMNVILVSIELGQYAHVSNYVSKAEQTPDSLDPTIVAKLKAAAGLANLETKKYKFAARKFVETGIELGNNFSEVIAPQDVAVYGALCALASFDRSDLKSKVIDNINFRNFLDLVPEVRELVNDFYASRYGSCLGHLEKLKPNLLLDIHLHQHVETLYMEIRHKAIIQYTLPFISVDLNTMAAAFKTSVSMLQKELAALITEDKIQARIDSHNKILYARHADQRNATFQRVLQTGNDFERDVKSMLLRANLLKHDYIQKTSGPRKM

SEQ ID NO: 4353 - DNA, 1181 bp, Zea mays subsp. mays
  misc_feature (1)..(1181): Ceres Seq. ID no. 12413563
  misc_feature (1)..(1181): Ortholog of  Ceres SEQ ID NO 13585382 as cited in SEQ ID NO 63889
aaatttccccacacgcgcccacctcctccgggtcctcccctctagtcctctctcccgaccccacctctgccgtccgtgcgtccgtccggcaaccgcgacgcaacaatggcggccgggcgagagctggtggtgagtttcggcgagatgctgatagacttcgtgccgaccgtggcgggggtctcgctggccgaggcgccggccttcctcaaggcggccgggggcgcgcccgccaacgtcgccatcgcggtctcgcgcctcggtggcggggccgccttcgttggcaagctcggcgacgacgagttcggccgcatgctcgccgccatcctccgcgacaacggcgtcgacggcggcggcgtcgtcttcgacgcgggcgcgcgcaccggnntnttnccttcgtcaccctgcgcgccgacggcgagcgcgagttcatgttctaccgcaaccccagcgccgacatgctcctcactgccgacgagctcaacgtcgggctcatccggagggctgcggtctttcactacggatcaataagcttgattgctgagccttgccggacagcacatctccgtgccatggaaattgccaaagaggctggtgcactgctctcttacgacccaaacctgagggaggcactttggccatcccgtgaggaggcccgcacccagatcttgagcatctgggaccaggcagatatcgtcaaggtcagcgaagtcgagcttgagttcttgacaggcatcaactcagtggaggacgatgttgtcatgaagctgtggcgacctaccatgaagctgctcctggtgactcttggagatcaaggatgcaagtactataccagggatttccatggagctgtcccttccttcaaagtacaacaagtcgatacgactggcgcaggcgatgcgtttgttggtgcgctgctccgaaggatcgttaaagatccatcctcgctacaagacgagaagaagcttgtagagtctattaaattcgctaatgcgtgtggagcaatcaccgccacgaagaagggtgcgatcccgtctttgcccactgaaactgaggtcttgcagctaatagagaaggcatagatagatcactgtaattgctttggttttcactagcttccacttctgcaaattgcaaaatgtattgtattctgatctggaacagaagaagtgggtgctccatcc

SEQ ID NO: 4354 - protein, 358 aa, Zea mays subsp. mays
  peptide (1)..(358): Ceres Seq. ID no. 12413564
  misc_feature (128)..(128): Xaa is any aa, unknown or other
  misc_feature (129)..(129): Xaa is any aa, unknown or other
  misc_feature (130)..(130): Xaa is any aa, unknown or other
ISPHAPTSSGSSPLVLSPDPTSAVRASVRQPRRNNGGRARAGGEFRRDADRLRADRGGGLAGRGAGLPQGGRGRARQRRHRGLAPRWRGRLRWQARRRRVRPHARRHPPRQRRRRRRRRLRRGRAHRXXXFVTLRADGEREFMFYRNPSADMLLTADELNVGLIRRAAVFHYGSISLIAEPCRTAHLRAMEIAKEAGALLSYDPNLREALWPSREEARTQILSIWDQADIVKVSEVELEFLTGINSVEDDVVMKLWRPTMKLLLVTLGDQGCKYYTRDFHGAVPSFKVQQVDTTGAGDAFVGALLRRIVKDPSSLQDEKKLVESIKFANACGAITATKKGAIPSLPTETEVLQLIEKA

SEQ ID NO: 4355 - protein, 216 aa, Zea mays subsp. mays
  peptide (1)..(216): Ceres Seq. ID no. 12413565
MFYRNPSADMLLTADELNVGLIRRAAVFHYGSISLIAEPCRTAHLRAMEIAKEAGALLSYDPNLREALWPSREEARTQILSIWDQADIVKVSEVELEFLTGINSVEDDVVMKLWRPTMKLLLVTLGDQGCKYYTRDFHGAVPSFKVQQVDTTGAGDAFVGALLRRIVKDPSSLQDEKKLVESIKFANACGAITATKKGAIPSLPTETEVLQLIEKA

SEQ ID NO: 4356 - protein, 207 aa, Zea mays subsp. mays
  peptide (1)..(207): Ceres Seq. ID no. 12413566
MLLTADELNVGLIRRAAVFHYGSISLIAEPCRTAHLRAMEIAKEAGALLSYDPNLREALWPSREEARTQILSIWDQADIVKVSEVELEFLTGINSVEDDVVMKLWRPTMKLLLVTLGDQGCKYYTRDFHGAVPSFKVQQVDTTGAGDAFVGALLRRIVKDPSSLQDEKKLVESIKFANACGAITATKKGAIPSLPTETEVLQLIEKA

SEQ ID NO: 4357 - DNA, 710 bp, Zea mays subsp. mays
  misc_feature (1)..(710): Ceres Seq. ID no. 12343668
  misc_feature (1)..(710): Ortholog of  Ceres SEQ ID NO 13583505 as cited in SEQ ID NO 62240
atgtgatagcccggcccaacactacaactgcctctcctcggcgtcgccactactccttgcctcacgccgccgctcaaacagcagaagggagaagagaagcacgcccaaaaattccaaggtttttcacctcttggagcgcaccaacaccacccggagaccggagcgactcgccaccggcgcggaaaaggagggcggaggttcgatggcggatgagaatcaggctggaaagaaagaggaggaggaatttagcacaggccctctgtcagtcctaatgatgagtgttaagaacaacacccaggtcctcatcaattgtcgcaacaacaagaagctgcttggccgtgttcgtgcttttgatcgccactgtaacatggtgctcgaaaacgtgcgtgagatgtggacagagatccccaagactggcaagggcaaaaagaaggctctgcctgtgaacaaggatagattcatcagtaagatgttcctcaggggcgactcggtcatcatagtgctgaggaacccgaagtgatcgcccaaccagtcacattgcagcagttatgccctttctctgggttcacggaatccgtgcctctattgaaaaaactgtagcttatgtgtgtcttggcggattagctggttatcttgaactgacgttcatgtgacatggcaatggcacatgaacatacgtttcatgagtttggttgttaattggcgcttgc

SEQ ID NO: 4358 - protein, 172 aa, Zea mays subsp. mays
  peptide (1)..(172): Ceres Seq. ID no. 12343669
CDSPAQHYNCLSSASPLLLASRRRSNSRREKRSTPKNSKVFHLLERTNTTRRPERLATGAEKEGGGSMADENQAGKKEEEEFSTGPLSVLMMSVKNNTQVLINCRNNKKLLGRVRAFDRHCNMVLENVREMWTEIPKTGKGKKKALPVNKDRFISKMFLRGDSVIIVLRNPK

SEQ ID NO: 4359 - protein, 105 aa, Zea mays subsp. mays
  peptide (1)..(105): Ceres Seq. ID no. 12343670
MADENQAGKKEEEEFSTGPLSVLMMSVKNNTQVLINCRNNKKLLGRVRAFDRHCNMVLENVREMWTEIPKTGKGKKKALPVNKDRFISKMFLRGDSVIIVLRNPK

SEQ ID NO: 4360 - protein, 89 aa, Zea mays subsp. mays
  peptide (1)..(89): Ceres Seq. ID no. 12343671
VIARPNTTTASPRRRHYSLPHAAAQTAEGRREARPKIPRFFTSWSAPTPPGDRSDSPPARKRRAEVRWRMRIRLERKRRRNLAQALCQS

SEQ ID NO: 4361 - DNA, 1572 bp, Zea mays subsp. mays
  misc_feature (1)..(1572): Ceres Seq. ID no. 12373300
  misc_feature (1)..(1572): Ortholog of  Ceres SEQ ID NO 12605597 as cited in SEQ ID NO 20378
  misc_feature (1)..(1572): Ortholog of  Ceres SEQ ID NO 13494050 as cited in SEQ ID NO 20553
  misc_feature (1)..(1572): Ortholog of  Ceres SEQ ID NO 15177308 as cited in SEQ ID NO 52713
gaatatccgggcatccggcccaggcatgaacggtcggttaaaccggccaatcttcctctcaagcctcgacgcagcacggcgcgccggcgcgggacgacggcatgacgccgccgtccatcttccaccaccatcgctgcctcgtctccctcccctccgcttccccgacctggacctcgtcccgtcgtctcatccatcaactcgcaaaacccacagtcctgtccctacatctgcgtccagtcttatcctcttccttcgcggttgccgccgtcggcgacgacgaggatgtcgtagtcggggattgcctcgtgttcgacgacgacgctttcgaggaaccggacctggacctcccctcgtccccgtggccgtcggctagcgcctcacgccacggccggaggtcggaggcaggcgagagcgacagcctggtgccggagaggtggaggcatgccgaggaggagatcaacctgacgaagaaggataagcgccgcatcgcgcacgggctgcggttcgggagccgcctcgagcggcgggcgcccccagctgttgctgctcctgatgaattccgcgcgtaccgcaaggggatgctgagcgctgagcgtgagcatgtttctcatgtataccgggggccgctggagaggactcctccgccggaagtgaaggaacatccaccgccggagccggagcctgggacgcgtgtggccccgaggaatccgaggatggggatgggcgttggcacccttgacgacattgatgagtttttcagaagtagggaatatgttcaggatgagatggaggacagcaagagtcctaagggccgtcagaagttgttctcaaatgaggagaagattcttctgaacaagcgagtgcctgatctggaaacagctacttctagtaaatggcttccacttcacacccttgctgcatctggtgatttctatctattgaatagccttttaaaacataacgtggacataaatgcgcttgataaggatggcttaccagcgatccacaaagcaattctttcaaagaaggctgctattatcaattatcttttaaggaactcagcaaatccattcatccaagataaagatggtgcgactctaatgcattatgcggtccaaacagcatgtagtcagaccataaagacacttttactgtacaatgttgacatcaaccgtccagatgattatggatggacacctttgcatcttgcggtacaaacacagaggactgacattgtgaagctgcttttaataaagggcgctgatagaactattagaacccaagatggattgaccccgttggagttgtgcctccggttgggtcatgatgtgcggacgtatgagcttatcaaactacttaaaagtttccgaggacaaaagcagcatgatttagtttagcaactggagggtgtgtgaccctctttgaaccagtgaggttaaccagtgtggtggccttctgggaggccagttttcaatgtaccattcatgattcatggaatcgctcctggtttgagataggtacatgccaacttcattgtatttgtatcatttatatatttcattggcctaaacc

SEQ ID NO: 4362 - protein, 431 aa, Zea mays subsp. mays
  peptide (1)..(431): Ceres Seq. ID no. 12373301
MTPPSIFHHHRCLVSLPSASPTWTSSRRLIHQLAKPTVLSLHLRPVLSSSFAVAAVGDDEDVVVGDCLVFDDDAFEEPDLDLPSSPWPSASASRHGRRSEAGESDSLVPERWRHAEEEINLTKKDKRRIAHGLRFGSRLERRAPPAVAAPDEFRAYRKGMLSAEREHVSHVYRGPLERTPPPEVKEHPPPEPEPGTRVAPRNPRMGMGVGTLDDIDEFFRSREYVQDEMEDSKSPKGRQKLFSNEEKILLNKRVPDLETATSSKWLPLHTLAASGDFYLLNSLLKHNVDINALDKDGLPAIHKAILSKKAAIINYLLRNSANPFIQDKDGATLMHYAVQTACSQTIKTLLLYNVDINRPDDYGWTPLHLAVQTQRTDIVKLLLIKGADRTIRTQDGLTPLELCLRLGHDVRTYELIKLLKSFRGQKQHDLV

SEQ ID NO: 4363 - protein, 272 aa, Zea mays subsp. mays
  peptide (1)..(272): Ceres Seq. ID no. 12373302
MLSAEREHVSHVYRGPLERTPPPEVKEHPPPEPEPGTRVAPRNPRMGMGVGTLDDIDEFFRSREYVQDEMEDSKSPKGRQKLFSNEEKILLNKRVPDLETATSSKWLPLHTLAASGDFYLLNSLLKHNVDINALDKDGLPAIHKAILSKKAAIINYLLRNSANPFIQDKDGATLMHYAVQTACSQTIKTLLLYNVDINRPDDYGWTPLHLAVQTQRTDIVKLLLIKGADRTIRTQDGLTPLELCLRLGHDVRTYELIKLLKSFRGQKQHDLV

SEQ ID NO: 4364 - protein, 227 aa, Zea mays subsp. mays
  peptide (1)..(227): Ceres Seq. ID no. 12373303
MGMGVGTLDDIDEFFRSREYVQDEMEDSKSPKGRQKLFSNEEKILLNKRVPDLETATSSKWLPLHTLAASGDFYLLNSLLKHNVDINALDKDGLPAIHKAILSKKAAIINYLLRNSANPFIQDKDGATLMHYAVQTACSQTIKTLLLYNVDINRPDDYGWTPLHLAVQTQRTDIVKLLLIKGADRTIRTQDGLTPLELCLRLGHDVRTYELIKLLKSFRGQKQHDLV

SEQ ID NO: 4365 - DNA, 999 bp, Zea mays subsp. mays
  misc_feature (1)..(999): Ceres Seq. ID no. 12373297
  misc_feature (1)..(999): Ortholog of  Ceres SEQ ID NO 14315878 as cited in SEQ ID NO 60086
tgcgaggtgcgacaaaccgacaagccaacaatggcgtcgtcagctgctacgaccgcgaagccgatcgcgctcccgccggcgccaacccgcggcggctgctgctgctggaggacacgcaggcccgcgatccccgcggcggcggcacgcctcaaggtctccgcctccgccgcctcgtcggacgtgccggacttcctctcgtccaattggcttgaaacccgcaagagaaagcccttcggtcccaggttgaattttagtgcagaagaagcagtcgaataccagcttgagtccttaaagtacaatgatctgccccgcccagattatgggatagaggtcatgtaccggtttgcaggctttgaccctttcgagaggtcaacttactttggacgacagtttgatctaggacagttcgagcgcttccggcgtctgttttcaccactcaacctacagagtgctgctgggccacagagagagaagaatattgagcagtttatgggttgaagagaaccagttcaagcaaagagtttgggtacaaggagcccgtcccgaggaagaagagatatttcaattcacaatggttcagagggtcggaggatcatgggatggttactggctgacagagagcttaataaacgatggagacgcgttctcgggtgggattgcttactgatgtagtgatgattggtgtaaatcgatcaggtgcagactagcaggtggcgtgaaaaagctgagagacatgttggtgtgtagaatttgccctggctttctggagatgtttggcagtgtcggacacgctagtattgtacaggaagagacctctcacggcgcccatagcaccagatggccaagcatgctgtcatggaccttcggtccatgagatagctgtcttctccggcgaggttatacccctctgccgcaggcttggttctagggtagcagccctaggcgcttgagagggtcattgcaagggagagagattggtttgataatgatcttgcttgc

SEQ ID NO: 4366 - protein, 165 aa, Zea mays subsp. mays
  peptide (1)..(165): Ceres Seq. ID no. 12373298
CEVRQTDKPTMASSAATTAKPIALPPAPTRGGCCCWRTRRPAIPAAAARLKVSASAASSDVPDFLSSNWLETRKRKPFGPRLNFSAEEAVEYQLESLKYNDLPRPDYGIEVMYRFAGFDPFERSTYFGRQFDLGQFERFRRLFSPLNLQSAAGPQREKNIEQFMG

SEQ ID NO: 4367 - protein, 155 aa, Zea mays subsp. mays
  peptide (1)..(155): Ceres Seq. ID no. 12373299
MASSAATTAKPIALPPAPTRGGCCCWRTRRPAIPAAAARLKVSASAASSDVPDFLSSNWLETRKRKPFGPRLNFSAEEAVEYQLESLKYNDLPRPDYGIEVMYRFAGFDPFERSTYFGRQFDLGQFERFRRLFSPLNLQSAAGPQREKNIEQFMG

SEQ ID NO: 4368 - DNA, 1896 bp, Zea mays subsp. mays
  misc_feature (1)..(1896): Ceres Seq. ID no. 12566503
  misc_feature (1)..(1896): Ortholog of  Ceres SEQ ID NO 12612314 as cited in SEQ ID NO 51420
  misc_feature (1)..(1896): Ortholog of  Ceres SEQ ID NO 14306493 as cited in SEQ ID NO 53170
  misc_feature (1)..(1896): Ortholog of  Ceres SEQ ID NO 14311095 as cited in SEQ ID NO 53197
accccggaccgacaaagcagagcacgcgctggcagccaagtgcacacagacacgtctctctgttcgttctcagcttgctatagcaacctctagtaggtagccatggagatggtcctggactggcgctcgctgggctccctgctggcgaccgtcgtggtgttccgcaccgcgctgcgtaacttcctgccgccggaggccgagatgctcctgcgccgcttcctcgcgtgggtcgccgccgcgttccgcccgcccagcgacaccatcctcatcgacgaggcggacgggcccacggggagcgccaacgacctctacgagtcggcgcagctctacctcagcgcgcgctgcctcgccaccgcgcccgccgtgcgcctgcacaagccgcgccagtcgccgcgccccgtggcgtcgctcccggactcgcacaccaccgacgacaccttccgcggggtccgcgtcaagtggacctccaccacgcgcaccgtcgaccgcagcggcagcggcggcggcggtaacccgtacaacatattcggccgcggcggcgaccagcgcggcctcgagctccagttcccgcgccagcaccgggacctcgtccaccaccactacatcccgcacctcatcgacgaggccacccggatgcggctcaagtcgcgggagcgccgcctctacaccaaccgcggccacggggccctgcgacgaccaccaccgcctctggacgtcgcacgccttcgcgcacccgtccacgttcgacacgctggcgctcgacccggcgctgcgcgacgaggtccgcgccgacctgctgcgcttcgccgcgcgccgggaccactacgcgcgcgtcggccgcgcctggaagcgggggtacctgctccacggcccgcccggcacgggcaagaccagcctcgtcgctgccatcgccaacctgctcgacttcgacgtctacgacctggagctcaccacggtgcccaccaactcccacctccgccgcctgctcgtctccaccacgcccaagtccgtcgtcgtcgtcgaggacatcgactgctccctcgacctctccgaccgcaacaagaagacaaagaagggtgctggcgtcggcgtcggcatcggcaccgccggcgacgaagacgccgcagcacagctcgccgtcatgtcggtgtcgccggtcgcggcggccgtgatggggcgcgagtccgtcagcctctccggggtgctcaacttcgtcgacgggctctggtcgtcctgcgtcggcgagcgcctgatggtgttcacgaccaaccacccggagcggctcgacccggcgctgctccgcccgggccgcatggaccgcaagatcgagctcggctactgcacgccgcccgcgctgcgtgtgctcgccaagaactacctcggcgtcggcgacgagggctgcgacgacgccgacgcggaccccgacacggtcaacgccctcatggcggaggccgagggcctgctcgccgccgccgaggtgcaaatcacacccgccgacatcgccgaggtgttcatgggctgcgacggcgcgggcgccgccgccgcgctgaggaagctcgtgggcgagctgcggcggaggcgggatgctgctgcccttgccacggccgtagcaccgccggaataaaaccagccagggatcctacgtagcgcgccaccatgcatagctgcctagtcagcttccattactttgatgctaggtggtttatttattgagtcgtgacggtgcaatgcgaagtgtcgtgtgtcaggtgtttcccttctcatttagtttgggttcgtgtttttgtgtcgtgctagtacgtacggatcccgtaggctaggcagccaataagccaataatggacgctgattacccaggcacaacaatactgttatatgacagagctcgcccattgc

SEQ ID NO: 4369 - protein, 514 aa, Zea mays subsp. mays
  peptide (1)..(514): Ceres Seq. ID no. 12566504
MEMVLDWRSLGSLLATVVVFRTALRNFLPPEAEMLLRRFLAWVAAAFRPPSDTILIDEADGPTGSANDLYESAQLYLSARCLATAPAVRLHKPRQSPRPVASLPDSHTTDDTFRGVRVKWTSTTRTVDRSGSGGGGNPYNIFGRGGDQRGLELQFPRQHRDLVHHHYIPHLIDEATRMRLKSRERRLYTNRGHGALRRPPPPLDVARLRAPVHVRHAGARPGAARRGPRRPAALRRAPGPLRARRPRLEAGVPAPRPARHGQDQPRRCHRQPARLRRLRPGAHHGAHQLPPPPPARLHHAQVRRRRRGHRLLPRPLRPQQEDKEGCWRRRRHRHRRRRRRRSTARRHVGVAGRGGRDGARVRQPLRGAQLRRRALVVLRRRAPDGVHDQPPGAARPGAAPPGPHGPQDRARLLHAARAACARQELPRRRRRGLRRRRRGPRHGQRPHGGGRGPARRRRGANHTRRHRRGVHGLRRRGRRRRAEEARGRAAAEAGCCCPCHGRSTAGIKPARDPT

SEQ ID NO: 4370 - protein, 512 aa, Zea mays subsp. mays
  peptide (1)..(512): Ceres Seq. ID no. 12566505
MVLDWRSLGSLLATVVVFRTALRNFLPPEAEMLLRRFLAWVAAAFRPPSDTILIDEADGPTGSANDLYESAQLYLSARCLATAPAVRLHKPRQSPRPVASLPDSHTTDDTFRGVRVKWTSTTRTVDRSGSGGGGNPYNIFGRGGDQRGLELQFPRQHRDLVHHHYIPHLIDEATRMRLKSRERRLYTNRGHGALRRPPPPLDVARLRAPVHVRHAGARPGAARRGPRRPAALRRAPGPLRARRPRLEAGVPAPRPARHGQDQPRRCHRQPARLRRLRPGAHHGAHQLPPPPPARLHHAQVRRRRRGHRLLPRPLRPQQEDKEGCWRRRRHRHRRRRRRRSTARRHVGVAGRGGRDGARVRQPLRGAQLRRRALVVLRRRAPDGVHDQPPGAARPGAAPPGPHGPQDRARLLHAARAACARQELPRRRRRGLRRRRRGPRHGQRPHGGGRGPARRRRGANHTRRHRRGVHGLRRRGRRRRAEEARGRAAAEAGCCCPCHGRSTAGIKPARDPT

SEQ ID NO: 4371 - protein, 481 aa, Zea mays subsp. mays
  peptide (1)..(481): Ceres Seq. ID no. 12566506
MLLRRFLAWVAAAFRPPSDTILIDEADGPTGSANDLYESAQLYLSARCLATAPAVRLHKPRQSPRPVASLPDSHTTDDTFRGVRVKWTSTTRTVDRSGSGGGGNPYNIFGRGGDQRGLELQFPRQHRDLVHHHYIPHLIDEATRMRLKSRERRLYTNRGHGALRRPPPPLDVARLRAPVHVRHAGARPGAARRGPRRPAALRRAPGPLRARRPRLEAGVPAPRPARHGQDQPRRCHRQPARLRRLRPGAHHGAHQLPPPPPARLHHAQVRRRRRGHRLLPRPLRPQQEDKEGCWRRRRHRHRRRRRRRSTARRHVGVAGRGGRDGARVRQPLRGAQLRRRALVVLRRRAPDGVHDQPPGAARPGAAPPGPHGPQDRARLLHAARAACARQELPRRRRRGLRRRRRGPRHGQRPHGGGRGPARRRRGANHTRRHRRGVHGLRRRGRRRRAEEARGRAAAEAGCCCPCHGRSTAGIKPARDPT

SEQ ID NO: 4372 - DNA, 1772 bp, Zea mays subsp. mays
  misc_feature (1)..(1772): Ceres Seq. ID no. 12367879
  misc_feature (1)..(1772): Ortholog of  Ceres SEQ ID NO 13596816 as cited in SEQ ID NO 62287
aaagcaagtcctccccatgctcctcccgctcctcctcctcgccgccttcctccatggcttggcggaggcgcagggcggcctcccgtcgctgccgatcggggtgaactacggcgcgaacgcagacaacctaccctcgcccgccgccgtggcggcgttcctggccaagagcacgaccatcgaccgcgtgaagctgttcgacgcgaacccggccttcctcgacgcgttcgccgccaacgcgccctccatcgccctcgccgtctccatccccaactccgccctcccgtccttcgccgacagatccacgggcctggacgcggcgcgcgggtgggtccgcgacaacctgtccccgcacgtgtccgcgggcgccaacatcaccctcctcatggcggggaacgaggtgctgggccccaccgtggtgcccgacctcgtcgtggcgctgctcccggccatgcgccgcctgtaccaggcgctgcagctggagggcctgcccaaggtccgcgtcaccacgccgcactacctcggcatcctggcgccctcggacgggatcccctccaacgcgagcttccgcccggggctggacgccaaggtgctggcgcccatgctcaggttccacaacgacaccggctcccccttcatggtgaacgcctacccctacttcagctacaacgccgccacgctggactacgcggtgttccgccccaacgccggcgtgtacgacccggcgacgcggctcaactacaccagcatgttcgacgcgcagatggacgccatccacacggcgatgaagaagctcgggtacggcggcgtgcagatcgcggtgggcgaggccgggtggcccaccaaggcggaggccgggcaggtcggcgtaggccccgaggaggccagggatttcaacgccggcatgatccgggtgtgcagcggcgggaagggcacgccgctgatgcctgggaggacgttcgagacgtacgtcttctcgctgttcgacgagaaccagaagcccgggccggtcgcggagcggaacttcggcatcttcaacacggatctcacacccaaatacgacctggggctgctccgccaaggaccgcagtctggatctccaaccccatctccggagccctcgccgtcggtcggcggaggcaagtggtgcgtggccaagtccggcgcgagcgcaaccgacctgcagaacaacattaactacgcctgtgcctacgtcgactgtaggccgatccagagcggcggcgcgtgcttggaccccaacaacatccactcacatgcctcgtacgtcatgaacgcgtactaccaggccaatggcatgcacgactatgactgcgacttcaagggcaccggcgtggtcacctccagtgaccccagttacgggagctgcaaatacaacgcctcctcctgacggcgcgcagcaagtccagctggcactactgcaccagcctccagtccacatcgtcctccagctccaggctccagccatggccacgctggggacgggaggaggtccgtactgccgccgggcttgcgccacatacttgtatactcatgtctcacacccatgcttcttgttgctctcaaccactactagcactactatttgtctagttccataattacaagtccctctcccctcatgttaacttgatcattgtccgtgtgtagtggactagtggtggtgaataaaatagcttccattccatgtagacaaacaaacaaattgtaacatctgttatccttgggttatttgatatatttatttttcatatagt

SEQ ID NO: 4373 - protein, 467 aa, Zea mays subsp. mays
  peptide (1)..(467): Ceres Seq. ID no. 12367880
KQVLPMLLPLLLLAAFLHGLAEAQGGLPSLPIGVNYGANADNLPSPAAVAAFLAKSTTIDRVKLFDANPAFLDAFAANAPSIALAVSIPNSALPSFADRSTGLDAARGWVRDNLSPHVSAGANITLLMAGNEVLGPTVVPDLVVALLPAMRRLYQALQLEGLPKVRVTTPHYLGILAPSDGIPSNASFRPGLDAKVLAPMLRFHNDTGSPFMVNAYPYFSYNAATLDYAVFRPNAGVYDPATRLNYTSMFDAQMDAIHTAMKKLGYGGVQIAVGEAGWPTKAEAGQVGVGPEEARDFNAGMIRVCSGGKGTPLMPGRTFETYVFSLFDENQKPGPVAERNFGIFNTDLTPKYDLGLLRQGPQSGSPTPSPEPSPSVGGGKWCVAKSGASATDLQNNINYACAYVDCRPIQSGGACLDPNNIHSHASYVMNAYYQANGMHDYDCDFKGTGVVTSSDPSYGSCKYNASS

SEQ ID NO: 4374 - protein, 462 aa, Zea mays subsp. mays
  peptide (1)..(462): Ceres Seq. ID no. 12367881
MLLPLLLLAAFLHGLAEAQGGLPSLPIGVNYGANADNLPSPAAVAAFLAKSTTIDRVKLFDANPAFLDAFAANAPSIALAVSIPNSALPSFADRSTGLDAARGWVRDNLSPHVSAGANITLLMAGNEVLGPTVVPDLVVALLPAMRRLYQALQLEGLPKVRVTTPHYLGILAPSDGIPSNASFRPGLDAKVLAPMLRFHNDTGSPFMVNAYPYFSYNAATLDYAVFRPNAGVYDPATRLNYTSMFDAQMDAIHTAMKKLGYGGVQIAVGEAGWPTKAEAGQVGVGPEEARDFNAGMIRVCSGGKGTPLMPGRTFETYVFSLFDENQKPGPVAERNFGIFNTDLTPKYDLGLLRQGPQSGSPTPSPEPSPSVGGGKWCVAKSGASATDLQNNINYACAYVDCRPIQSGGACLDPNNIHSHASYVMNAYYQANGMHDYDCDFKGTGVVTSSDPSYGSCKYNASS

SEQ ID NO: 4375 - protein, 397 aa, Zea mays subsp. mays
  peptide (1)..(397): Ceres Seq. ID no. 12367882
KASPPHAPPAPPPRRLPPWLGGGAGRPPVAADRGELRRERRQPTLARRRGGVPGQEHDHRPREAVRREPGLPRRVRRQRALHRPRRLHPQLRPPVLRRQIHGPGRGARVGPRQPVPARVRGRQHHPPHGGERGAGPHRGARPRRGAAPGHAPPVPGAAAGGPAQGPRHHAALPRHPGALGRDPLQRELPPGAGRQGAGAHAQVPQRHRLPLHGERLPLLQLQRRHAGLRGVPPQRRRVRPGDAAQLHQHVRRADGRHPHGDEEARVRRRADRGGRGRVAHQGGGRAGRRRPRGGQGFQRRHDPGVQRREGHAADAWEDVRDVRLLAVRREPEARAGRGAELRHLQHGSHTQIRPGAAPPRTAVWISNPISGALAVGRRRQVVRGQVRRERNRPAEQH

SEQ ID NO: 4376 - DNA, 1652 bp, Zea mays subsp. mays
  misc_feature (1)..(1652): Ceres Seq. ID no. 12566507
  misc_feature (1)..(1652): Ortholog of  Ceres SEQ ID NO 12611971 as cited in SEQ ID NO 53205
  misc_feature (1)..(1652): Ortholog of  Ceres SEQ ID NO 12615976 as cited in SEQ ID NO 62440
aacaaccacatctgcatctcccgtcatctactcgaactcaactcatcgcctcatccgtgtctcacccattccgtctccgtctccgtctccgtctgaactctccatctataaagcttctctgaggcacaagacgagaaggccacagcccacaagcatgcccggcgagttggaaaagcgcagaatctgcgagacaagaaagcactaggaagggagaaacagggagagaggttgcgtcccagccccacctgccatcgcctcttcttccgctccctcggcggctttccaggattcagattcagattgggggccttttgctgctgcgcggcaattctcgtcgctccagtccccacttcgctgttcctgagcgggaggcgccggccggactcgcgatggggcaggacggccagcagatccgccgcgacaagctcatcatcgacacggatcccggcatcgatgatagcatgacgatcctaatggcgttcagagcacctagtgtggaaatcattgggctcacgaccatattcggcaacgtcgacacaaagggtgcaacacgtaacgcgctattgctgtgtgagagagcaggatgccctgaagttccagtagcagagggcagccatgagcccctaaagggaggaaagccccgtgttgctgatttcgttcatgggtcagatggcattgggaatctgtttcttcctgcaccctctgctaagaaggttgaggaaagtgctgctgatttcctgattaataaggtctctgagtttccaggagaggtctctgtgcttgcgttgggacccctgacaaatgtagcattggccatcaaaagagacccttcctttgcaagcaaggttaagaaaatagttgtactgggtggagctttctttgcggctggaaatgtcaaccctgctgctgaagcaaatatccatggagacccagaagcagctgacatagtttttacttcaggagcagatatcgttgtggttggcattaacataacaacacaagtctgcctgacagatgaggatctcttggagctaagaaactcgaaggggaagcatgcagcgttcttatatgagatgtgcaagttctacagagattggcatgccaagtctgatggttttcatggaattttccttcatgatcctgtgagcttcactgccgtacttcatccagagtacttcacattcaagaagggtgtggtgagagtagagacccagggcatttgcactggccacactttgatggatcagggattgaaaaagtggaattcagagaacccatggtcagggtataaaccgatttcagttgcatggacggttgatgtgccaaaggtcatcagctttataaagaagctgctcatggcaccatgagcaaagtacaaccatttaacgacatgtcaacatcagcgctctctgatgtccaagaaaatttgacgagtacagatgctctttcttagctgcactgtaattagttcctggacctaggatggttcctattcctccaatagtaagaggaacctttcattgtgaaaggtcatgcagcagtctcgaataccatgaagcaaattctggcatacgacatcatgtctcacacatttgtatcaatacatttagaatcaataaagtttccctcactctttactgtgcacttttccc

SEQ ID NO: 4377 - protein, 325 aa, Zea mays subsp. mays
  peptide (1)..(325): Ceres Seq. ID no. 12566508
MGQDGQQIRRDKLIIDTDPGIDDSMTILMAFRAPSVEIIGLTTIFGNVDTKGATRNALLLCERAGCPEVPVAEGSHEPLKGGKPRVADFVHGSDGIGNLFLPAPSAKKVEESAADFLINKVSEFPGEVSVLALGPLTNVALAIKRDPSFASKVKKIVVLGGAFFAAGNVNPAAEANIHGDPEAADIVFTSGADIVVVGINITTQVCLTDEDLLELRNSKGKHAAFLYEMCKFYRDWHAKSDGFHGIFLHDPVSFTAVLHPEYFTFKKGVVRVETQGICTGHTLMDQGLKKWNSENPWSGYKPISVAWTVDVPKVISFIKKLLMAP

SEQ ID NO: 4378 - protein, 301 aa, Zea mays subsp. mays
  peptide (1)..(301): Ceres Seq. ID no. 12566509
MTILMAFRAPSVEIIGLTTIFGNVDTKGATRNALLLCERAGCPEVPVAEGSHEPLKGGKPRVADFVHGSDGIGNLFLPAPSAKKVEESAADFLINKVSEFPGEVSVLALGPLTNVALAIKRDPSFASKVKKIVVLGGAFFAAGNVNPAAEANIHGDPEAADIVFTSGADIVVVGINITTQVCLTDEDLLELRNSKGKHAAFLYEMCKFYRDWHAKSDGFHGIFLHDPVSFTAVLHPEYFTFKKGVVRVETQGICTGHTLMDQGLKKWNSENPWSGYKPISVAWTVDVPKVISFIKKLLMAP

SEQ ID NO: 4379 - protein, 297 aa, Zea mays subsp. mays
  peptide (1)..(297): Ceres Seq. ID no. 12566510
MAFRAPSVEIIGLTTIFGNVDTKGATRNALLLCERAGCPEVPVAEGSHEPLKGGKPRVADFVHGSDGIGNLFLPAPSAKKVEESAADFLINKVSEFPGEVSVLALGPLTNVALAIKRDPSFASKVKKIVVLGGAFFAAGNVNPAAEANIHGDPEAADIVFTSGADIVVVGINITTQVCLTDEDLLELRNSKGKHAAFLYEMCKFYRDWHAKSDGFHGIFLHDPVSFTAVLHPEYFTFKKGVVRVETQGICTGHTLMDQGLKKWNSENPWSGYKPISVAWTVDVPKVISFIKKLLMAP

SEQ ID NO: 4380 - DNA, 1549 bp, Zea mays subsp. mays
  misc_feature (1)..(1549): Ceres Seq. ID no. 12345645
  misc_feature (1)..(1549): Ortholog of  Ceres SEQ ID NO 15169655 as cited in SEQ ID NO 64922
  misc_feature (1)..(1549): Ortholog of  Ceres SEQ ID NO 13596004 as cited in SEQ ID NO 68212
agtccgcccctcccgcctcgttctctccgccatcgtcgccgccgcctccattcctccaccagtccaccatcgccacctacgcccaaccaaacccaactccatctcttccgactataaacgcaacccaccaccgctgccgcgaacctctgcgctccgaataccccagacccccgatcctcccaatggccaccgcattttcgctgcgcgctgcggccccggccaccactccccgcgccgtctcccgatccacctccgcggcgagggtcgtgcccgtggcctcggcactggcgggacgcggaaggctggtggcgcgtgcagcagttacagcaaaggcggatgtgccatcgagcacgtccgacggccatgaggtcttgctgtttgaagctcttcgtgaggccttgatggaagagatggaattagatccaacagtgtgtgtatttggtgaagatgttggccattacggtggttcttacaaggtgacaaaaggtttggctgatacgtttggagaccttcgagttctggacacccctattgcggagaactcgtttactggcatgggagttggagcgggaatgaaagggttgagacccgtcgttgaaggcatgaacatgggattcctgctccttgcttacaaccagatctcaaataactgtggcatgcttcattacacttccggcggccagttcaaaatcccacttgtgatccgtggccccggtggtgtgggtcgtcagcttggagcagagcactcgcagcgcctggaatcgtatttccagtccatcccaggcctgcagatggtcgcctgctcgactccttacaacgctaagggcctgatgaaagctgccatcaggagcgagaaccctgtggtgctgtttgagcacgtccttctgtacaacctgaaggagaaaatcccggacgaggagtacgtgctctgcttggaggaggccgagatggtgcggcctggggagcacgtgactatactcacatactcgcgcatgaggtaccacgtgatgcaggcagcgaagacgctggtgaacaaagggtacgatcccgaggtcatcgacatcaggtcgttgaagccgtttgatctgcacactattggcaactccatcaagaagacccaccgcgtgctgatcgtggaggagtgcatgcgcacgggtgggatcggcgccagccttaggtcggccatcgtcgacaatttctgggactaccttgacgcccccatcatgtgcctgtcatctcaggatgtgcctacgccatatgctgcgactctggaggatgcaaccgttgtgcagcctgcccagatcgtggctgcggtggaacaactatgtgcatagattgtggcctgggacgtttgggagactgttgttgccatgaaaaagccttccgtttgttagttttgtgctgtaacaagcattctttggagacttaaggtgtaggcttatagtcgttttgttcttgttttaagaagtataatccagcttcgtagctgcacggactcgatcttcttgttcctaaatctgcgctatgcaatgccgaatttgatggttcg

SEQ ID NO: 4381 - protein, 443 aa, Zea mays subsp. mays
  peptide (1)..(443): Ceres Seq. ID no. 12345646
SAPPASFSPPSSPPPPFLHQSTIATYAQPNPTPSLPTINATHHRCREPLRSEYPRPPILPMATAFSLRAAAPATTPRAVSRSTSAARVVPVASALAGRGRLVARAAVTAKADVPSSTSDGHEVLLFEALREALMEEMELDPTVCVFGEDVGHYGGSYKVTKGLADTFGDLRVLDTPIAENSFTGMGVGAGMKGLRPVVEGMNMGFLLLAYNQISNNCGMLHYTSGGQFKIPLVIRGPGGVGRQLGAEHSQRLESYFQSIPGLQMVACSTPYNAKGLMKAAIRSENPVVLFEHVLLYNLKEKIPDEEYVLCLEEAEMVRPGEHVTILTYSRMRYHVMQAAKTLVNKGYDPEVIDIRSLKPFDLHTIGNSIKKTHRVLIVEECMRTGGIGASLRSAIVDNFWDYLDAPIMCLSSQDVPTPYAATLEDATVVQPAQIVAAVEQLCA

SEQ ID NO: 4382 - protein, 383 aa, Zea mays subsp. mays
  peptide (1)..(383): Ceres Seq. ID no. 12345647
MATAFSLRAAAPATTPRAVSRSTSAARVVPVASALAGRGRLVARAAVTAKADVPSSTSDGHEVLLFEALREALMEEMELDPTVCVFGEDVGHYGGSYKVTKGLADTFGDLRVLDTPIAENSFTGMGVGAGMKGLRPVVEGMNMGFLLLAYNQISNNCGMLHYTSGGQFKIPLVIRGPGGVGRQLGAEHSQRLESYFQSIPGLQMVACSTPYNAKGLMKAAIRSENPVVLFEHVLLYNLKEKIPDEEYVLCLEEAEMVRPGEHVTILTYSRMRYHVMQAAKTLVNKGYDPEVIDIRSLKPFDLHTIGNSIKKTHRVLIVEECMRTGGIGASLRSAIVDNFWDYLDAPIMCLSSQDVPTPYAATLEDATVVQPAQIVAAVEQLCA

SEQ ID NO: 4383 - protein, 310 aa, Zea mays subsp. mays
  peptide (1)..(310): Ceres Seq. ID no. 12345648
MEEMELDPTVCVFGEDVGHYGGSYKVTKGLADTFGDLRVLDTPIAENSFTGMGVGAGMKGLRPVVEGMNMGFLLLAYNQISNNCGMLHYTSGGQFKIPLVIRGPGGVGRQLGAEHSQRLESYFQSIPGLQMVACSTPYNAKGLMKAAIRSENPVVLFEHVLLYNLKEKIPDEEYVLCLEEAEMVRPGEHVTILTYSRMRYHVMQAAKTLVNKGYDPEVIDIRSLKPFDLHTIGNSIKKTHRVLIVEECMRTGGIGASLRSAIVDNFWDYLDAPIMCLSSQDVPTPYAATLEDATVVQPAQIVAAVEQLCA

SEQ ID NO: 4384 - DNA, 1250 bp, Zea mays subsp. mays
  misc_feature (1)..(1250): Ceres Seq. ID no. 12566511
  misc_feature (1)..(1250): Ortholog of  Ceres SEQ ID NO 12612333 as cited in SEQ ID NO 56421
gcacgagaccattacctagaacatcctaatcgaaaaacagaacagcccgtcgcgcgccgctgcgttgagccaaggcgcaatggcaacctccacctcagttcccgtcctcctgctcctcgccgccgccgccggcctcctcctgctccccggctcgctggcgtggcagagcagcaactgtgcaccgggcgcgcccggcagtggctcgccgacgtggccttcacccggctccggctccggcggcggccacagcaagccgcccaagcaccaccatggcaagccgcccaagtgcccgccgtgcaaccctccgtacgtgcctccgacgcctcggccgtcaccgccgtacgtgccaccgtatgtcccgccgacgcctcggccgtcaccgccctacgtgccaccatacgtccccgtcccgccgacgcctcggccctcaccgccgtacgtgccaccatacgtccccgtccccccgacgcctcggccctcaccgccctacgtgccaccatacgtccccgtcccgccgacgcctcggccgtcaccgccgtacgtacccccgacgccacggccgccgactccgccctacgtcccaccgacgccgccctacgtcccaccgacgcctcggccatcaccaccaccgtacgtgccaccctacgtccccccgacgcctcggccatcaccaccctacgtgccaccgtacgttccgccgacgccgccggcggtgcggacgtgcccgatcgacacgctgaagctgaacgcgtgcgtggacgtgctgagcgggctgatccacctggtgatcgggcaggaggccaggtccaagtgctgcccgctggtgcagggggtggcggacctggacgcggcgctgtgcctctgcaccaccatccgcgcgcgcctgctcaacatcaacatctacctccccatcgcgctcaacctgctcatcacctgcggcaagcacgcgccgtcgggcttccagtgcccgccgctctacgactgatgagcaccaccaccagccaacacttctatacgcgccgccatgcatgcatgatgtgatggcatcctgtgcaagctagcgctagcgctagtagtagcatgtccgtaatttctctagttcttgctctcgcgagtatgcgtacgtaatgcgttgcttctcgtcagtactcgggatcgatcgggaacttttccaactccgatgctaagcgtgtagcttgcttaatcagtcgatgtaccatgttaatcaagtgctagccctttctctgctc

SEQ ID NO: 4385 - protein, 346 aa, Zea mays subsp. mays
  peptide (1)..(346): Ceres Seq. ID no. 12566512
ARDHYLEHPNRKTEQPVARRCVEPRRNGNLHLSSRPPAPRRRRRPPPAPRLAGVAEQQLCTGRARQWLADVAFTRLRLRRRPQQAAQAPPWQAAQVPAVQPSVRASDASAVTAVRATVCPADASAVTALRATIRPRPADASALTAVRATIRPRPPDASALTALRATIRPRPADASAVTAVRTPDATAADSALRPTDAALRPTDASAITTTVRATLRPPDASAITTLRATVRSADAAGGADVPDRHAEAERVRGRAERADPPGDRAGGQVQVLPAGAGGGGPGRGAVPLHHHPRAPAQHQHLPPHRAQPAHHLRQARAVGLPVPAALRLMSTTTSQHFYTRRHACMM

SEQ ID NO: 4386 - protein, 301 aa, Zea mays subsp. mays
  peptide (1)..(301): Ceres Seq. ID no. 12566513
MATSTSVPVLLLLAAAAGLLLLPGSLAWQSSNCAPGAPGSGSPTWPSPGSGSGGGHSKPPKHHHGKPPKCPPCNPPYVPPTPRPSPPYVPPYVPPTPRPSPPYVPPYVPVPPTPRPSPPYVPPYVPVPPTPRPSPPYVPPYVPVPPTPRPSPPYVPPTPRPPTPPYVPPTPPYVPPTPRPSPPPYVPPYVPPTPRPSPPYVPPYVPPTPPAVRTCPIDTLKLNACVDVLSGLIHLVIGQEARSKCCPLVQGVADLDAALCLCTTIRARLLNINIYLPIALNLLITCGKHAPSGFQCPPLYD

SEQ ID NO: 4387 - DNA, 1421 bp, Zea mays subsp. mays
  misc_feature (1)..(1421): Ceres Seq. ID no. 12566476
  misc_feature (1)..(1421): Ortholog of  Ceres SEQ ID NO 12474685 as cited in SEQ ID NO 88
  misc_feature (1)..(1421): Ortholog of  Ceres SEQ ID NO 13638574 as cited in SEQ ID NO 51223
  misc_feature (1)..(1421): Ortholog of  Ceres SEQ ID NO 14311531 as cited in SEQ ID NO 51466
  misc_feature (1)..(1421): Ortholog of  Ceres SEQ ID NO 15170465 as cited in SEQ ID NO 52798
  misc_feature (1)..(1421): Ortholog of  Ceres SEQ ID NO 15177112 as cited in SEQ ID NO 55956
  misc_feature (1)..(1421): Ortholog of  Ceres SEQ ID NO 12610790 as cited in SEQ ID NO 56123
  misc_feature (1)..(1421): Ortholog of  Ceres SEQ ID NO 14315399 as cited in SEQ ID NO 57112
  misc_feature (1)..(1421): Ortholog of  Ceres SEQ ID NO 13655636 as cited in SEQ ID NO 63519
  misc_feature (1)..(1421): Ortholog of  Ceres SEQ ID NO 13655896 as cited in SEQ ID NO 64970
aaacgaggatgtactaatgttgtggtaaataatatggacgatagtcgataacgtgaccagtggtggtgtggtgtatggtctgtattgattacatgcagcctaactaatttgccagcgagtgatgcggtgacgtgctgctgctgttgtagtaggtggtggagcaagcccagtccccaatcccaccctgccacccaaccttgcttcttctccgatagctatttctctggtttctccccaatcttcccgggtttccctgattaaagatggctgagtcctttgttctcaataccggctcgaggatcccatcggttgggcttggcgtatggcaaatacaacctgacgctgccaacgacgccatctacgctgctgtcaaggctgggtatcggcatattgactgtgcagcagcatacaacaatgagaaggaggtgggcctggctttgaagaaattatttgaagatggtgtggttaagcgtgatgatttgtttatcacctctaagctatgggctgctaatcatgcacctgaagatgtggaagagggaatcgacaccacacttcaagatttgcagcttgactacttggacttgtacctcatccatggtccaatccgcatcaaaaaaggaactagcacgatgacccctgaaaactttctccctacagatatccctgctacatgggcagcgatggagaagttatacgactctggcaaagctcgtgcaatcggcgtgagtaacttctcttgtaagaagctgcatgatttgcttgccgttgcacgagtgcctccagcagtcaaccaggttgagtgtcatccggtttggcagcaagacaagctccggaagctatgccaatccaatggtgttcatctttctgcattctcgcctttaggctcacctggatctccttggatcaatgggccaagtgtcctcaagaaccccattgtggtctctgttgcagacaagttgcagaaaacgcctgcccaggtcgctctacgctggggaatccaaatgggccatagtgtactcccgaaaagcgccaatgagtccaggattaaggagaacattgacatatttggctggtctattcctgaagatttgatggccaagttctctgaaatcaaacaggtcaggctgctgacagctgagtttgtagttcaccctcaggccggctacaatacattggaggacttttgggatggtgaaatataaaagcatacaaatttgttcagaataaaagagccaggcgaggaaacaaccacaaaaaaggggagatcgaatgcataggccccaatacgatgaatttgggggtttacgtgattgctgaacacaagtattgtgtgactaatctgtgttttgatgtggttcattggttgaagcatgatgtaaaccgtaaaggatattcatgaaaactaaggacgctatagagcg

SEQ ID NO: 4388 - protein, 312 aa, Zea mays subsp. mays
  peptide (1)..(312): Ceres Seq. ID no. 12566477
MAESFVLNTGSRIPSVGLGVWQIQPDAANDAIYAAVKAGYRHIDCAAAYNNEKEVGLALKKLFEDGVVKRDDLFITSKLWAANHAPEDVEEGIDTTLQDLQLDYLDLYLIHGPIRIKKGTSTMTPENFLPTDIPATWAAMEKLYDSGKARAIGVSNFSCKKLHDLLAVARVPPAVNQVECHPVWQQDKLRKLCQSNGVHLSAFSPLGSPGSPWINGPSVLKNPIVVSVADKLQKTPAQVALRWGIQMGHSVLPKSANESRIKENIDIFGWSIPEDLMAKFSEIKQVRLLTAEFVVHPQAGYNTLEDFWDGEI

SEQ ID NO: 4389 - protein, 190 aa, Zea mays subsp. mays
  peptide (1)..(190): Ceres Seq. ID no. 12566478
MTPENFLPTDIPATWAAMEKLYDSGKARAIGVSNFSCKKLHDLLAVARVPPAVNQVECHPVWQQDKLRKLCQSNGVHLSAFSPLGSPGSPWINGPSVLKNPIVVSVADKLQKTPAQVALRWGIQMGHSVLPKSANESRIKENIDIFGWSIPEDLMAKFSEIKQVRLLTAEFVVHPQAGYNTLEDFWDGEI

SEQ ID NO: 4390 - protein, 173 aa, Zea mays subsp. mays
  peptide (1)..(173): Ceres Seq. ID no. 12566479
MEKLYDSGKARAIGVSNFSCKKLHDLLAVARVPPAVNQVECHPVWQQDKLRKLCQSNGVHLSAFSPLGSPGSPWINGPSVLKNPIVVSVADKLQKTPAQVALRWGIQMGHSVLPKSANESRIKENIDIFGWSIPEDLMAKFSEIKQVRLLTAEFVVHPQAGYNTLEDFWDGEI

SEQ ID NO: 4391 - DNA, 1990 bp, Zea mays subsp. mays
  misc_feature (1)..(1990): Ceres Seq. ID no. 12566790
  misc_feature (1)..(1990): Ortholog of  Ceres SEQ ID NO 15175923 as cited in SEQ ID NO 54037
  misc_feature (1)..(1990): Ortholog of  Ceres SEQ ID NO 14303366 as cited in SEQ ID NO 54418
  misc_feature (1)..(1990): Ortholog of  Ceres SEQ ID NO 13503610 as cited in SEQ ID NO 62416
  misc_feature (1)..(1990): Ortholog of  Ceres SEQ ID NO 13657610 as cited in SEQ ID NO 66165
  misc_feature (1)..(1990): Ortholog of  Ceres SEQ ID NO 13598312 as cited in SEQ ID NO 68448
  misc_feature (1)..(1990): Ortholog of  Ceres SEQ ID NO 13596100 as cited in SEQ ID NO 68573
gcacgagaccattacctagaacatcctaatcgaaaaattaaaccaccgagctgggcgcctccccgtggcgctcgcggccgcattagcgcggagatcgagagacaagagagggaaggcggcggcttgccggcttaagccttctctccctccgtcgtcgcctcctccttacgtccgcttcttcctcctgaatggagacgtcagcgccgcccaatgcccccgctccgccggcgcagccacggaggcggttgccggacttccagcagtcagtgcggctcaagtacgtgaagctggggtaccactacctcatatcccacgggatgtacctgctgctgtcgccgctgatggcgctcgtcgccgtgcagctctccaccgtctccccgcatgacctcgccgacctgtgggagcagctccgcttcaacctcctctccgtcgtcgcctgctccacgctgctcgtcttcctctccaccgtttacttcctcacccgcccgcgccccgtgtacctgctcgacttcgcctgctacaagccggagtcggagcgcaagtgcacgcgcgagaccttcatgcactgctccaagctcaccggatccttcacggacgagaacctcgagttccagcgcaagatcctcgagcgctccggcctcggcgaggacacgtaccttccccccgccgtgctccgggtgccccctaacccgtgcatggacgaggcgcgtaaggaggcgcgcgccttcatgttcggcgccatcgaccagctgctcgagaagaccggtgtcaggcccaaggacattggcgtcctagtggtcaactgcagcttgttcaacccgacgccgtcgctgtcagccatggtggtgaaccattacaagctgagggggaatattgtgagctacaacctcggcgggatgggctgcagcgccgggcttctgtccatcgacctcgccaaggatctgctgcaggtgcaccccaactcttacgccctggtgatcagcatggagaacatcacactgaattggtactttgggaacaaccggtccatgcttgtgtcgaattgcctgttccggatgggtggcgcggccatcctgctctcgaacaggcggtctgacaggcggaggtccaagtatgagctggtgcacacggtgcgcacgcacaagggcgccgacgacaagtgctttggctgcgtgacacaggaggaagatgatattggcaagattggcgtgtcactgtccaaggacctcatggcagtggccggagacgcacttaagaccaacatcaccacgctggggccgttggtgctcccattatcagagcaacttctcttcatgggcacattgattgccaagaaggtgctcaagatgaagatcaagccatacatccctgacttcaagctggctttcgagcacttctgcatccacgctggcggacgcgccgtgctggatgagctggagaagaacctggagctcaccgactggcacatggagccatcgaggatgaccctgtacaggtttagcaacacatcaagcagctcactctggtacgagctggcgtacactgaggcaaagggtaggatcaggaagcgcgacaggatctggcagatcgcattcggttctggattcaagtgcaacagcgccgtctggaaggcactccggacggtgaacccggccaaggagaagagcccctggatggatgagattgacaacttcccggtggatgttccaaagatttcaaaggttggtggcgcttgaagaaccattcttcttattattaggtggcaagtggagttgggtgattgtcaggggctgggcagagatttattccatcgtttccaccgttggttcttgtattcagttgtagcatggcatctgtgaaggaacttgagtagatgattcggttaggtagaaagggtgtgttcttcggctcgctagggttgtctgaatgcctgatatgtcctatttattcagattggagagagcaatcgatttgcattctttgctgcctg

SEQ ID NO: 4392 - protein, 515 aa, Zea mays subsp. mays
  peptide (1)..(515): Ceres Seq. ID no. 12566791
METSAPPNAPAPPAQPRRRLPDFQQSVRLKYVKLGYHYLISHGMYLLLSPLMALVAVQLSTVSPHDLADLWEQLRFNLLSVVACSTLLVFLSTVYFLTRPRPVYLLDFACYKPESERKCTRETFMHCSKLTGSFTDENLEFQRKILERSGLGEDTYLPPAVLRVPPNPCMDEARKEARAFMFGAIDQLLEKTGVRPKDIGVLVVNCSLFNPTPSLSAMVVNHYKLRGNIVSYNLGGMGCSAGLLSIDLAKDLLQVHPNSYALVISMENITLNWYFGNNRSMLVSNCLFRMGGAAILLSNRRSDRRRSKYELVHTVRTHKGADDKCFGCVTQEEDDIGKIGVSLSKDLMAVAGDALKTNITTLGPLVLPLSEQLLFMGTLIAKKVLKMKIKPYIPDFKLAFEHFCIHAGGRAVLDELEKNLELTDWHMEPSRMTLYRFSNTSSSSLWYELAYTEAKGRIRKRDRIWQIAFGSGFKCNSAVWKALRTVNPAKEKSPWMDEIDNFPVDVPKISKVGGA

SEQ ID NO: 4393 - protein, 472 aa, Zea mays subsp. mays
  peptide (1)..(472): Ceres Seq. ID no. 12566792
MYLLLSPLMALVAVQLSTVSPHDLADLWEQLRFNLLSVVACSTLLVFLSTVYFLTRPRPVYLLDFACYKPESERKCTRETFMHCSKLTGSFTDENLEFQRKILERSGLGEDTYLPPAVLRVPPNPCMDEARKEARAFMFGAIDQLLEKTGVRPKDIGVLVVNCSLFNPTPSLSAMVVNHYKLRGNIVSYNLGGMGCSAGLLSIDLAKDLLQVHPNSYALVISMENITLNWYFGNNRSMLVSNCLFRMGGAAILLSNRRSDRRRSKYELVHTVRTHKGADDKCFGCVTQEEDDIGKIGVSLSKDLMAVAGDALKTNITTLGPLVLPLSEQLLFMGTLIAKKVLKMKIKPYIPDFKLAFEHFCIHAGGRAVLDELEKNLELTDWHMEPSRMTLYRFSNTSSSSLWYELAYTEAKGRIRKRDRIWQIAFGSGFKCNSAVWKALRTVNPAKEKSPWMDEIDNFPVDVPKISKVGGA

SEQ ID NO: 4394 - protein, 464 aa, Zea mays subsp. mays
  peptide (1)..(464): Ceres Seq. ID no. 12566793
MALVAVQLSTVSPHDLADLWEQLRFNLLSVVACSTLLVFLSTVYFLTRPRPVYLLDFACYKPESERKCTRETFMHCSKLTGSFTDENLEFQRKILERSGLGEDTYLPPAVLRVPPNPCMDEARKEARAFMFGAIDQLLEKTGVRPKDIGVLVVNCSLFNPTPSLSAMVVNHYKLRGNIVSYNLGGMGCSAGLLSIDLAKDLLQVHPNSYALVISMENITLNWYFGNNRSMLVSNCLFRMGGAAILLSNRRSDRRRSKYELVHTVRTHKGADDKCFGCVTQEEDDIGKIGVSLSKDLMAVAGDALKTNITTLGPLVLPLSEQLLFMGTLIAKKVLKMKIKPYIPDFKLAFEHFCIHAGGRAVLDELEKNLELTDWHMEPSRMTLYRFSNTSSSSLWYELAYTEAKGRIRKRDRIWQIAFGSGFKCNSAVWKALRTVNPAKEKSPWMDEIDNFPVDVPKISKVGGA

SEQ ID NO: 4395 - DNA, 1831 bp, Zea mays subsp. mays
  misc_feature (1)..(1831): Ceres Seq. ID no. 12344017
  misc_feature (1)..(1831): Ortholog of  Ceres SEQ ID NO 15173929 as cited in SEQ ID NO 61739
agcgtggcctcccgttctgacttcggagtccctcggtctcaacgactagttgagagctcgcggctccgttcgggcgaggggaggaggttcatgaggctgctgtaggctccgttgcagccgccgcgggcgggagtccgtgattttggacgccccaccgcggcaagatccggaagcgcgttggctgttgtgccgtgagtttcagtttcggtggtcgattgcttcagcctgctgagaagtaggaggggcggccatggcggggtcgaggttcgggtcgttcaagtcggagaagggcgactccgcctccgcagcggcggcagcgggtggagcggcgcagaggagggacccgtacgaggtgctcggggtgggccgcaccgccaccgaccaggagatcaagagtgcgttccgacgcatggcgctcaagtaccatccggacaagaatggcgatgaccctgttgcatcagacaggttccaggaagtcacattctcctataacatcctgtcagatcccgataagaggcggcagtacgatacatcaggatttgatgcaatcgaatctgatagtcaggaactggagctggacttgtcgagtctcaacactgtaaacacggtgtttgcagctctttttagtaagcttggtgtgccaattaaaacaactgtttcagctacagttttagaggaggcattgaatggttcggttatggtttctcaactccagctaggaaactcagtgcagagaaaggtggaaaagcaatcggcccatttctattctgtggatataactgaaaaacaagctaaaatggggctagtttgtcgtgttcactcaaacgataaaagcaaattcaagttgctatattttgagcttgaagaaaatggcgggcttagtcttgcactacaggaagacagtgtgaaggttgggaaagttactgctgcagggatgtatttccttggttttcctgtgtaccgttttgaacaaaataacctggcagctgctgcaaaagattctgatggtgcattctttaaaagattggatagctttcagccatgtgacatacatgaactgaaacctggaacacacttctttgctgtctacggtgacaacttcttcaagagcgctagttatactatagaggttgtatgtggtgaatcttttcctgccgaaaaggagatgctacgaaatgtggaggccaagatactcacaaaacgagctgaactttccaaatttgagtcagagtatagggaggttttggcgaagttcactgaaatgaccagcaaatacacacaagaaatgcaagcgattgatggccttctgaaggaaaggaatgagatccatgcttcctataccaacaatccacctctaaaacggagttccagcaggaataaagccaagtcgccttcgaaagtggccaaaactggtacagaaaaacatcatcagaaggaaaagaaggtgaaggatcactgcatggagggatgtggaagtgacagcgataactcaagtgaaaagaaatcaaaagagcggttcccaaggaagaaatggctgaaccttccattcaaacttgacaggagaaagacgtgctgagcaatgtattatatgttccgttgctattctatcctgttatgcataatcctgagctgaactcacatttcttctctttctcatgcttttataggaagtccctctcggcccaacactagattgatatacagagaatttccactgtggcctcccgaaccaagccctctcccactgctaccaccttccttcgttgtacccggattatttcgtgtaaagatcacatgtgatcctaagaattaaaacgtgagtcgttttagc

SEQ ID NO: 4396 - protein, 441 aa, Zea mays subsp. mays
  peptide (1)..(441): Ceres Seq. ID no. 12344018
MAGSRFGSFKSEKGDSASAAAAAGGAAQRRDPYEVLGVGRTATDQEIKSAFRRMALKYHPDKNGDDPVASDRFQEVTFSYNILSDPDKRRQYDTSGFDAIESDSQELELDLSSLNTVNTVFAALFSKLGVPIKTTVSATVLEEALNGSVMVSQLQLGNSVQRKVEKQSAHFYSVDITEKQAKMGLVCRVHSNDKSKFKLLYFELEENGGLSLALQEDSVKVGKVTAAGMYFLGFPVYRFEQNNLAAAAKDSDGAFFKRLDSFQPCDIHELKPGTHFFAVYGDNFFKSASYTIEVVCGESFPAEKEMLRNVEAKILTKRAELSKFESEYREVLAKFTEMTSKYTQEMQAIDGLLKERNEIHASYTNNPPLKRSSSRNKAKSPSKVAKTGTEKHHQKEKKVKDHCMEGCGSDSDNSSEKKSKERFPRKKWLNLPFKLDRRKTC

SEQ ID NO: 4397 - protein, 388 aa, Zea mays subsp. mays
  peptide (1)..(388): Ceres Seq. ID no. 12344019
MALKYHPDKNGDDPVASDRFQEVTFSYNILSDPDKRRQYDTSGFDAIESDSQELELDLSSLNTVNTVFAALFSKLGVPIKTTVSATVLEEALNGSVMVSQLQLGNSVQRKVEKQSAHFYSVDITEKQAKMGLVCRVHSNDKSKFKLLYFELEENGGLSLALQEDSVKVGKVTAAGMYFLGFPVYRFEQNNLAAAAKDSDGAFFKRLDSFQPCDIHELKPGTHFFAVYGDNFFKSASYTIEVVCGESFPAEKEMLRNVEAKILTKRAELSKFESEYREVLAKFTEMTSKYTQEMQAIDGLLKERNEIHASYTNNPPLKRSSSRNKAKSPSKVAKTGTEKHHQKEKKVKDHCMEGCGSDSDNSSEKKSKERFPRKKWLNLPFKLDRRKTC

SEQ ID NO: 4398 - protein, 292 aa, Zea mays subsp. mays
  peptide (1)..(292): Ceres Seq. ID no. 12344020
MVSQLQLGNSVQRKVEKQSAHFYSVDITEKQAKMGLVCRVHSNDKSKFKLLYFELEENGGLSLALQEDSVKVGKVTAAGMYFLGFPVYRFEQNNLAAAAKDSDGAFFKRLDSFQPCDIHELKPGTHFFAVYGDNFFKSASYTIEVVCGESFPAEKEMLRNVEAKILTKRAELSKFESEYREVLAKFTEMTSKYTQEMQAIDGLLKERNEIHASYTNNPPLKRSSSRNKAKSPSKVAKTGTEKHHQKEKKVKDHCMEGCGSDSDNSSEKKSKERFPRKKWLNLPFKLDRRKTC

SEQ ID NO: 4399 - DNA, 1812 bp, Zea mays subsp. mays
  misc_feature (1)..(1812): Ceres Seq. ID no. 13498787
  misc_feature (1)..(1812): Ortholog of  Ceres SEQ ID NO 14314480 as cited in SEQ ID NO 52362
  misc_feature (1)..(1812): Ortholog of  Ceres SEQ ID NO 13593854 as cited in SEQ ID NO 53403
  misc_feature (1)..(1812): Ortholog of  Ceres SEQ ID NO 12581680 as cited in SEQ ID NO 55019
  misc_feature (1)..(1812): Ortholog of  Ceres SEQ ID NO 15172112 as cited in SEQ ID NO 59632
attaaaaaagggttccccacagcaccaagcgcgacgtgagcgaggaggcaggcgcgcacggcgtgtcggcgtcgcaccgaacccgacacggctcggcctacggcccccacacatccggctgggccgttccgttccgtttcgttcccttcccattcttctcgtacgcggccgattgctgaccctcgctcgccctcgcttccccaccacagcaccgaaactgccccgcctccgcagccgccgcccgcgcccgctcgtcctccccgcgccgcctcggggacgccccggtcggcgatgtggcgggagcatgctaggcccgctcctcaggctcctctcggcgtgcggcggggtctggcccacctcgccggcccccggcgccgcggcctcctcttccgcctcctccggggacgactctgagggccgcgacggccttctctggtggcgcgacctcgcgcgctgccacgccggcgacgtctccgtcgccgtcgcccaggccaaccaggtgctcgaggaccagtgccgcctcgactccgccccgtccatcggcaccgtcgtcggcgtcttcgacggccacggcggccccgacgccgcccgcttcgcctgcgaccaccttgtccccaacctccgagaggcgtcctccggcccgcggggcgtcaccgcagacgccatcagggaggccttcctggccacggaggaaggattcctcgcgctcgtgtcaagcctctgggaggcccagccggacatcgccacggccgggacatgctgccttgtcggcgtcgtgcacaacaggacccttttcgtcgccaacctcggcgactcccgggccgtcctcgggaagaaggcgggccgcgctggccagatcgccgcggagcagttgtccagcgagcacaatgccaaccaggaggctgtcaggcaggagctcatggcgcaacacccagatgatgctcagattgttgcgctcaagcatggggtctggagagtgaggggcctcatacaggtgtctagatcaatcggtgatgtatacctgaaacatgcaaagtataacacagaccagatcaaacccaagttcaggcttcccgaatcattcagcaagccactattgagtgccgatccatctatcatctcccgcgatcttgaaccaaatgactgtttcatcatattcgcatcagatggattgtgggagcacctcagcaatcaagaagccgttgagattgttcacagccatcaacgtgctggaagcgcaagaagactcattaaagccgctctacaagaagcagcgcggaagcgtgagatgcgttactcggatcttacaaagatcgataagaaagttcgcaggcatttccatgatgacattactgtcatcgtcttatttataaactatgacctattattgaaaggtgctccgcagggacaacccctctccatcagatgtgccctagattattgacagtgagctagttcacccactggtattcaagctcctgcgggcagccatatccagagtcagctgacatggtcaaccggttgtgaaaagcgcacaacctccggcaccagtttccttttcgtttccccttttttgcacataaaattgacaagtcgctgaaattgccagttttcccctcttggattatgtcggataaaatgcgtatactcttcggttttggagatatatgtctagactctagagcgtgagggaaggttataaagtcttgtatgtctttgttctcttgcagtcttgcttacagttacagctagctctttttgtatgtaacaattgtcagcaatcagcatgtttaaccacctccgtgacgtttt

SEQ ID NO: 4400 - protein, 480 aa, Zea mays subsp. mays
  peptide (1)..(480): Ceres Seq. ID no. 13498788
LKKGSPQHQARRERGGRRARRVGVAPNPTRLGLRPPHIRLGRSVPFRSLPILLVRGRLLTLARPRFPTTAPKLPRLRSRRPRPLVLPAPPRGRPGRRCGGSMLGPLLRLLSACGGVWPTSPAPGAAASSSASSGDDSEGRDGLLWWRDLARCHAGDVSVAVAQANQVLEDQCRLDSAPSIGTVVGVFDGHGGPDAARFACDHLVPNLREASSGPRGVTADAIREAFLATEEGFLALVSSLWEAQPDIATAGTCCLVGVVHNRTLFVANLGDSRAVLGKKAGRAGQIAAEQLSSEHNANQEAVRQELMAQHPDDAQIVALKHGVWRVRGLIQVSRSIGDVYLKHAKYNTDQIKPKFRLPESFSKPLLSADPSIISRDLEPNDCFIIFASDGLWEHLSNQEAVEIVHSHQRAGSARRLIKAALQEAARKREMRYSDLTKIDKKVRRHFHDDITVIVLFINYDLLLKGAPQGQPLSIRCALDY

SEQ ID NO: 4401 - protein, 379 aa, Zea mays subsp. mays
  peptide (1)..(379): Ceres Seq. ID no. 13498789
MLGPLLRLLSACGGVWPTSPAPGAAASSSASSGDDSEGRDGLLWWRDLARCHAGDVSVAVAQANQVLEDQCRLDSAPSIGTVVGVFDGHGGPDAARFACDHLVPNLREASSGPRGVTADAIREAFLATEEGFLALVSSLWEAQPDIATAGTCCLVGVVHNRTLFVANLGDSRAVLGKKAGRAGQIAAEQLSSEHNANQEAVRQELMAQHPDDAQIVALKHGVWRVRGLIQVSRSIGDVYLKHAKYNTDQIKPKFRLPESFSKPLLSADPSIISRDLEPNDCFIIFASDGLWEHLSNQEAVEIVHSHQRAGSARRLIKAALQEAARKREMRYSDLTKIDKKVRRHFHDDITVIVLFINYDLLLKGAPQGQPLSIRCALDY

SEQ ID NO: 4402 - DNA, 1181 bp, Zea mays subsp. mays
  misc_feature (1)..(1181): Ceres Seq. ID no. 12419652
  misc_feature (1)..(1181): Ortholog of  Ceres SEQ ID NO 13656050 as cited in SEQ ID NO 64724
  misc_feature (1)..(1181): Ortholog of  Ceres SEQ ID NO 14316017 as cited in SEQ ID NO 67028
ggcacgtactcacagctctcaggcaggctttcttcataccacacacacacacaaagagaacacagtcgtcgtccgctccgaaatggcctacgcgacgcagcatcggcgccgagccattcttaccctggccgccatcgccctcctcctggcgtctcccatggcagccgccgccgccgccgccgccgggtgcgagggcgacaagctccccgcgggccggatctacgcgcactgcgcggcgctcccgtccctcggcgccaggctgcactggacgtacgacgccaagacggggtcgctgtccgtggcgttcgtggccaagccggcgggcgcgggcggcgccgggtgggtgtcgtgggcgatcaacccggcgggcgagggcatgaagggcgcgcaggcgctgctggccctcaagagccccgccgccccctcgtcgtcctacgtagtcaacacctacaacgtgaccgggtacaccgcgctcggngccgcgtncacgcccatcgcgtacagggccgcggagctcgccgccgacganagcggcggcggggaggtgcgcatctacgggaagctgcagctggcacccggcctggagaaggtgagccacatctggcaggtgggatccacggtggccaacggcgcgccggtcaagcacgcgttcgacacggccaacctccaggccaagggcacgctcgtcctctccggcgccgcgctgcccgtggaggcggcgccggctcccgccccggtgggctctggtggtgcctcgcccgcgaagggaggaggcgatagtggagccgccccgtctactggcgggagcagcaactcggcggctgctaaggccaccacctacgtgtctgtttcagtgctcacgctgctggcggcggcattggcaggtgcaggttcctttgcgatgtaacaaacagctccgagtcatacggccaagtagttcctgccttcttagcggtggcacgtacgtacgctgacaagcgggagagagatgacacaatcacacaacacacacatgagattaagattattagcatcctcttgtcttgctagctgatgcatatgcctgcgcgcaatcctgttctcgttagctgttggcacgcgttcggtttcgccatctgatttaccctgtatgttgtgttgttgttccgagtgttgtctcgttcttaaatacgtagtacggc

SEQ ID NO: 4403 - protein, 301 aa, Zea mays subsp. mays
  peptide (1)..(301): Ceres Seq. ID no. 12419653
  misc_feature (159)..(159): Xaa is any aa, unknown or other
  misc_feature (162)..(162): Xaa is any aa, unknown or other
  misc_feature (176)..(176): Xaa is any aa, unknown or other
ARTHSSQAGFLHTTHTHKENTVVVRSEMAYATQHRRRAILTLAAIALLLASPMAAAAAAAAGCEGDKLPAGRIYAHCAALPSLGARLHWTYDAKTGSLSVAFVAKPAGAGGAGWVSWAINPAGEGMKGAQALLALKSPAAPSSSYVVNTYNVTGYTALXAAXTPIAYRAAELAADXSGGGEVRIYGKLQLAPGLEKVSHIWQVGSTVANGAPVKHAFDTANLQAKGTLVLSGAALPVEAAPAPAPVGSGGASPAKGGGDSGAAPSTGGSSNSAAAKATTYVSVSVLTLLAAALAGAGSFAM

SEQ ID NO: 4404 - protein, 274 aa, Zea mays subsp. mays
  peptide (1)..(274): Ceres Seq. ID no. 12419654
  misc_feature (132)..(132): Xaa is any aa, unknown or other
  misc_feature (135)..(135): Xaa is any aa, unknown or other
  misc_feature (149)..(149): Xaa is any aa, unknown or other
MAYATQHRRRAILTLAAIALLLASPMAAAAAAAAGCEGDKLPAGRIYAHCAALPSLGARLHWTYDAKTGSLSVAFVAKPAGAGGAGWVSWAINPAGEGMKGAQALLALKSPAAPSSSYVVNTYNVTGYTALXAAXTPIAYRAAELAADXSGGGEVRIYGKLQLAPGLEKVSHIWQVGSTVANGAPVKHAFDTANLQAKGTLVLSGAALPVEAAPAPAPVGSGGASPAKGGGDSGAAPSTGGSSNSAAAKATTYVSVSVLTLLAAALAGAGSFAM

SEQ ID NO: 4405 - protein, 259 aa, Zea mays subsp. mays
  peptide (1)..(259): Ceres Seq. ID no. 12419655
  misc_feature (160)..(160): Xaa is any aa, unknown or other
  misc_feature (162)..(162): Xaa is any aa, unknown or other
  misc_feature (177)..(177): Xaa is any aa, unknown or other
GTYSQLSGRLSSYHTHTQREHSRRPLRNGLRDAASAPSHSYPGRHRPPPGVSHGSRRRRRRRVRGRQAPRGPDLRALRGAPVPRRQAALDVRRQDGVAVRGVRGQAGGRGRRRVGVVGDQPGGRGHEGRAGAAGPQEPRRPLVVLRSQHLQRDRVHRARXRXHAHRVQGRGARRRRXRRRGGAHLREAAAGTRPGEGEPHLAGGIHGGQRRAGQARVRHGQPPGQGHARPLRRRAARGGGAGSRPGGLWWCLAREGRRR

SEQ ID NO: 4406 - DNA, 1564 bp, Zea mays subsp. mays
  misc_feature (1)..(1564): Ceres Seq. ID no. 12369436
  misc_feature (1)..(1564): Ortholog of  Ceres SEQ ID NO 14311870 as cited in SEQ ID NO 51574
  misc_feature (1)..(1564): Ortholog of  Ceres SEQ ID NO 15174583 as cited in SEQ ID NO 53693
  misc_feature (1)..(1564): Ortholog of  Ceres SEQ ID NO 13581563 as cited in SEQ ID NO 58942
  misc_feature (1)..(1564): Ortholog of  Ceres SEQ ID NO 13658707 as cited in SEQ ID NO 66286
  misc_feature (1)..(1564): Ortholog of  Ceres SEQ ID NO 13654528 as cited in SEQ ID NO 68080
aaccttttgtttgttcttttgttgccttccttttctccgcactcatcgcttgttgcggttcgctctctacaaggaggcggcttgcgcggggggcatcgtgcaatggcgcggcggtgcccgtgcaggctgctgctagccgtggcggcggnggccgtgctcgtggccgcggcagcgcaggcgcaggagacgtgctcggggaccgtccccgcgccgccgcgccgcggggcgcgggtgtccgtggccagcttcggcggcgcgggcgacggacggacgctcaacacggcggcgttcgcgcgcgccgtcgccagcatcgagcgccgcgccgcgccgggcggggcggagctctacgtgccgcccggggtgtggctcacggggcccttcaacctcacctcgcgcatgacgctcttcctcgcgcgcggcgccgtcatccgcgccacgcaggacacatcaagctggcctctgattgaaccgctgccctcatacgggagaggacgtgagctgcccggcggaagatacataggtttaatccatggcaatgggcttcaggatgttgtcatcacaggcgagaatggaactattgatggtcaaggcagcgcgtggtgggatatgtggaagaacaggacactgctctacacaaggcctcaccttcttgagctgatgagctcttctgatatcattgtctccaatgtcgtctttcaggattcgccattctggaacatccatcctgtttattgcagcaatgttgtgatcagaaacgtgactatcctagctccacatgactcccccaacacggatggaattgatccagattccagcagcaacatctgcatcgaggattgctacatttcgactggtgacgattccatcgccatcaagagtggctgggatgagtatggaatcgcctatggccgccccagttctggaatcaccgtgcggcggatcacaggctcctccccgtttgctggcttcgcggtcggaagcgagacatcaggtggcgtggagaacgtccttgcagaacacttgaacttcttcaactcagggtttgggatccatgtcaagaccaacacaggcaggggaggcttcatcaggaacatcactgtctcggatgtgacgctggataacgtccggtacggcctgcggatcgttggcgatgtcggcaatcaccccgacaacagctacaaccagagtgcgctcccgatcgtcgacacccttatggtaaagaatgtccagggccagaacgtcagggaggctgggctgatcaagggcatcgccaactcggccttctcccggatctgcctgtcgaacgtcaagttcactggtggtgcgcctgtccggccgtggaagtgcgaggctgtcagcggtggcgctctcgacgtgcagccgtccccgtgcacagaactgacttccacgtctgggacgagcttctgtacaaattcgctttgatgctttgccagctagctgagcctgagctgctgctatgcttctgtatctacgagtatgtatactggtgctttaaagcttgggcacccaagtatttatcttcccgaaaattaatttggtttcc

SEQ ID NO: 4407 - protein, 480 aa, Zea mays subsp. mays
  peptide (1)..(480): Ceres Seq. ID no. 12369437
  misc_feature (50)..(50): Xaa is any aa, unknown or other
NLLFVLLLPSFSPHSSLVAVRSLQGGGLRGGHRAMARRCPCRLLLAVAAXAVLVAAAAQAQETCSGTVPAPPRRGARVSVASFGGAGDGRTLNTAAFARAVASIERRAAPGGAELYVPPGVWLTGPFNLTSRMTLFLARGAVIRATQDTSSWPLIEPLPSYGRGRELPGGRYIGLIHGNGLQDVVITGENGTIDGQGSAWWDMWKNRTLLYTRPHLLELMSSSDIIVSNVVFQDSPFWNIHPVYCSNVVIRNVTILAPHDSPNTDGIDPDSSSNICIEDCYISTGDDSIAIKSGWDEYGIAYGRPSSGITVRRITGSSPFAGFAVGSETSGGVENVLAEHLNFFNSGFGIHVKTNTGRGGFIRNITVSDVTLDNVRYGLRIVGDVGNHPDNSYNQSALPIVDTLMVKNVQGQNVREAGLIKGIANSAFSRICLSNVKFTGGAPVRPWKCEAVSGGALDVQPSPCTELTSTSGTSFCTNSL

SEQ ID NO: 4408 - protein, 446 aa, Zea mays subsp. mays
  peptide (1)..(446): Ceres Seq. ID no. 12369438
  misc_feature (16)..(16): Xaa is any aa, unknown or other
MARRCPCRLLLAVAAXAVLVAAAAQAQETCSGTVPAPPRRGARVSVASFGGAGDGRTLNTAAFARAVASIERRAAPGGAELYVPPGVWLTGPFNLTSRMTLFLARGAVIRATQDTSSWPLIEPLPSYGRGRELPGGRYIGLIHGNGLQDVVITGENGTIDGQGSAWWDMWKNRTLLYTRPHLLELMSSSDIIVSNVVFQDSPFWNIHPVYCSNVVIRNVTILAPHDSPNTDGIDPDSSSNICIEDCYISTGDDSIAIKSGWDEYGIAYGRPSSGITVRRITGSSPFAGFAVGSETSGGVENVLAEHLNFFNSGFGIHVKTNTGRGGFIRNITVSDVTLDNVRYGLRIVGDVGNHPDNSYNQSALPIVDTLMVKNVQGQNVREAGLIKGIANSAFSRICLSNVKFTGGAPVRPWKCEAVSGGALDVQPSPCTELTSTSGTSFCTNSL

SEQ ID NO: 4409 - protein, 348 aa, Zea mays subsp. mays
  peptide (1)..(348): Ceres Seq. ID no. 12369439
MTLFLARGAVIRATQDTSSWPLIEPLPSYGRGRELPGGRYIGLIHGNGLQDVVITGENGTIDGQGSAWWDMWKNRTLLYTRPHLLELMSSSDIIVSNVVFQDSPFWNIHPVYCSNVVIRNVTILAPHDSPNTDGIDPDSSSNICIEDCYISTGDDSIAIKSGWDEYGIAYGRPSSGITVRRITGSSPFAGFAVGSETSGGVENVLAEHLNFFNSGFGIHVKTNTGRGGFIRNITVSDVTLDNVRYGLRIVGDVGNHPDNSYNQSALPIVDTLMVKNVQGQNVREAGLIKGIANSAFSRICLSNVKFTGGAPVRPWKCEAVSGGALDVQPSPCTELTSTSGTSFCTNSL

SEQ ID NO: 4410 - DNA, 1740 bp, Zea mays subsp. mays
  misc_feature (1)..(1740): Ceres Seq. ID no. 13498786
  misc_feature (1)..(1740): Ortholog of  Ceres SEQ ID NO 13503499 as cited in SEQ ID NO 68684
gggctgcctgctcacacttcgccactactgctgctgcgcgttggcgagcgcgcgtggttcacgagcgagctccaccacaagcccagtcgcgcacggcagccgttttgcttgttttgtttgctttccgcctcttccgtgcttcctcttttgggcggcctggctgggctagctagctgttctgttcattccgagttcccggcatagaacacgaggttggagttagaggcttaccgagggagcagacagcagaggtcactagcgatttcacagtcacgcacctgcatttcttcttttttttcttcttcttttctttagcaagctctctttcttttcttgctcttgttttgtttgtcctccctgtaataactcttgcctgccttcccctaccctggtctctttccttcttcctgcactgcaggacactataagagtagctagccctacccaatatcttcagccgtgcttgccaacttggagagagagagagagagagagagagagagagagagagagagagagagagagagagagagagagagagagagagagagagagagagagagagagagaagagaagagaagagragagaagggagtgagtgatcgcaggaaggaggatcggagtgatgggagacgcagcagagaccaacaagactcttcacaactggatgggcgagccgaggccgaggtcgagcgaccagcgcgacgaggaggagacgcttcagctcagcctcggcctccccggaggaggagcaagtgcgggtggtggggtagcacccgccgcctggagaatgctgccggccagagacgaggagatgcgctctgctgctgctgtcgtcgacacctccctgctctctctcggctactccgccccagctttctcgccccgctcaccaggcaaggcaaaggggtccccagcagcagctacagagaatgcccttgcatccaccaacaacgcctcccagagaagatctccaaataccccggttattgggtggcctccagttcgtgccttcagaagaaatctggccacctctagcagagcatcccttgaacatcagaatgggaagaaggaagacaaacctgaacagaccacaaaaagagctccatttgtaaagatcaacatggacggcatccctattggtagaaaaatcgatctgagtgccctcggtagttacgatgagctgtctctgtctgtcgacaagctattccgggggcttsttgcagcacaacaagaccctctggctgccggcgcaaaggagtgttcacaggaagaggtggcgatatcgggtttactagatggaactggggagtacactctggtttatgaggattatgaaggcgatagggtgctggttggcgatgtcccctgggggatgtttgtttcttcggtgaagagstgcgcgttctgaagacatctgacctctcttcatctctaacagcacctcctggccagaagaggacggtaactgagtgtccagtgtttacctcttagacacttccttgcagtgatgttggtgtgctgtgaagaagaaaacgtcttctgagcttgtatcatctttcttcgtggtttcttcctcttcttttccctactttctcttggaagggatcatcaaagaaccgaaccgaccttttgggttttcctgctcttgtttattttgtttctctttccgggaagcgatgtgaccttttgggttgtatgtaaatgttcagacgaaccagctctatgtttatgcagcc

SEQ ID NO: 4411 - protein, 261 aa, Zea mays subsp. mays
  peptide (1)..(261): Ceres Seq. ID no. 15223050
  misc_feature (199)..(199): Xaa is any aa, unknown or other
  misc_feature (258)..(258): Xaa is any aa, unknown or other
MGDAAETNKTLHNWMGEPRPRSSDQRDEEETLQLSLGLPGGGASAGGGVAPAAWRMLPARDEEMRSAAAVVDTSLLSLGYSAPAFSPRSPGKAKGSPAAATENALASTNNASQRRSPNTPVIGWPPVRAFRRNLATSSRASLEHQNGKKEDKPEQTTKRAPFVKINMDGIPIGRKIDLSALGSYDELSLSVDKLFRGLXAAQQDPLAAGAKECSQEEVAISGLLDGTGEYTLVYEDYEGDRVLVGDVPWGMFVSSVKXCAF

SEQ ID NO: 4412 - protein, 247 aa, Zea mays subsp. mays
  peptide (1)..(247): Ceres Seq. ID no. 15223051
  misc_feature (185)..(185): Xaa is any aa, unknown or other
  misc_feature (244)..(244): Xaa is any aa, unknown or other
MGEPRPRSSDQRDEEETLQLSLGLPGGGASAGGGVAPAAWRMLPARDEEMRSAAAVVDTSLLSLGYSAPAFSPRSPGKAKGSPAAATENALASTNNASQRRSPNTPVIGWPPVRAFRRNLATSSRASLEHQNGKKEDKPEQTTKRAPFVKINMDGIPIGRKIDLSALGSYDELSLSVDKLFRGLXAAQQDPLAAGAKECSQEEVAISGLLDGTGEYTLVYEDYEGDRVLVGDVPWGMFVSSVKXCAF

SEQ ID NO: 4413 - protein, 206 aa, Zea mays subsp. mays
  peptide (1)..(206): Ceres Seq. ID no. 15223052
  misc_feature (144)..(144): Xaa is any aa, unknown or other
  misc_feature (203)..(203): Xaa is any aa, unknown or other
MLPARDEEMRSAAAVVDTSLLSLGYSAPAFSPRSPGKAKGSPAAATENALASTNNASQRRSPNTPVIGWPPVRAFRRNLATSSRASLEHQNGKKEDKPEQTTKRAPFVKINMDGIPIGRKIDLSALGSYDELSLSVDKLFRGLXAAQQDPLAAGAKECSQEEVAISGLLDGTGEYTLVYEDYEGDRVLVGDVPWGMFVSSVKXCAF

SEQ ID NO: 4414 - DNA, 1715 bp, Zea mays subsp. mays
  misc_feature (1)..(1715): Ceres Seq. ID no. 12347925
  misc_feature (1)..(1715): Ortholog of  Ceres SEQ ID NO 13594727 as cited in SEQ ID NO 52169
  misc_feature (1)..(1715): Ortholog of  Ceres SEQ ID NO 13595367 as cited in SEQ ID NO 56045
  misc_feature (1)..(1715): Ortholog of  Ceres SEQ ID NO 13596474 as cited in SEQ ID NO 62169
  misc_feature (1)..(1715): Ortholog of  Ceres SEQ ID NO 13598714 as cited in SEQ ID NO 62656
  misc_feature (1)..(1715): Ortholog of  Ceres SEQ ID NO 13596969 as cited in SEQ ID NO 63375
  misc_feature (1)..(1715): Ortholog of  Ceres SEQ ID NO 14302240 as cited in SEQ ID NO 64162
  misc_feature (1)..(1715): Ortholog of  Ceres SEQ ID NO 13584480 as cited in SEQ ID NO 64751
  misc_feature (1)..(1715): Ortholog of  Ceres SEQ ID NO 13597519 as cited in SEQ ID NO 64759
  misc_feature (1)..(1715): Ortholog of  Ceres SEQ ID NO 15170183 as cited in SEQ ID NO 65667
  misc_feature (1)..(1715): Ortholog of  Ceres SEQ ID NO 13595926 as cited in SEQ ID NO 67778
  misc_feature (1)..(1715): Ortholog of  Ceres SEQ ID NO 13596362 as cited in SEQ ID NO 67877
acacgcctctcttgctcaccattctcttctaaccagccaagccaaggcgcatctagcgagctgagcagcaatggcggctgctacttcttctaggcgccctgcagctgctctgctggtcctggcagcagccgtcgtggccctggcggccgagggggccaggtacccgccgctggcgccgggcctgtcgttcgacttctacaagaagagctgccccaaggcggagtccatcgtgcgggagttcctggcgtcggcggtccggcagaacgtggggctcgccgcggcgctgatccggctccacttccacgactgcttcgtgcagggctgcgacgcctccatcctgctggacgccacgcccacccagcccagcgagcagcagtcgccgcccaacctcacgctccgccccgccgcgttcaaggccgtcaacgacatccgcgcccgcctcgaccaggcctgcggccgcgtcgtctcctgcgccgacatcgtcgcgctcgccgcacgtgaatccgtcgccctgggtggcggcccggcgtacaagttgccactgggcaggcgcgacgggctggcgccggcatcgaacgccgccgtcctagcggcgctcccaccgccgacgtccaaggtgccgacgctgctgtccttcctggcgaagatcaacctggacgtgacggacctggtggcgctgtcgggcgggcacacggtgggcatcgcgcactgcggctccttcgacaaccggctgttcccgacgcaggacccgacgctgaacaagttcttcgcggggcagctgtaccggacctgcccgaccaacgcgacggtgaacacgacggccaacgacgtccgcacgcccaacgccttcgacaacaagtactacgtggacctgctcaaccgggagggcctcttcacgtcggaccaggacctgctgaccaacgccaccacgcgccccatcgtcacgcgcttcgccgtcgaccaggacgccttcttcgaccagttcgtctactcctacgtcaagatggggcaggtcaacgtgctcacgggctcccagggacaggtccgcgccaactgctccgcgcgcaacggcgccgctgctggtgacagtgacctgccgtggtcgtccgtcgtcatcgagacagtcgccgacgccgccggtagcctcgtgctctagataataagcaaataagtagtttgaagctttcttcgcatgcatgttgcaacaaataagcagctagtagcgttggaaataaagcagctagtagcgatcgttattacagaaacgacgacgacgtcgatggcaatggcagcatgctctgcagggagagcgctggcgcgggcaccagtagatgatccctgtccgcgcgggcccgggctcagccgaccaatcgatgtcaaccgcggcagcagtagcatagctaaggcatccgccgccgcacgccgactcggccacgtgatcgctgtcggactggaacacgatccagcctcgctcgctccatcgtctaataagagggtggcggtggcgaatattggaattggaccttccgggagaaaatatatcttggatgcccgtcaagacatctttcaatggtttccacagaaataatttaaaggaggctgactaatgtcagccacgtgtctcccgggtctgaacctagctaggttggaaccccttgacgcaaggaatcctctaaattgtatactctaaaaaaagaatatttatagttcttttt

SEQ ID NO: 4415 - protein, 361 aa, Zea mays subsp. mays
  peptide (1)..(361): Ceres Seq. ID no. 12347926
MAAATSSRRPAAALLVLAAAVVALAAEGARYPPLAPGLSFDFYKKSCPKAESIVREFLASAVRQNVGLAAALIRLHFHDCFVQGCDASILLDATPTQPSEQQSPPNLTLRPAAFKAVNDIRARLDQACGRVVSCADIVALAARESVALGGGPAYKLPLGRRDGLAPASNAAVLAALPPPTSKVPTLLSFLAKINLDVTDLVALSGGHTVGIAHCGSFDNRLFPTQDPTLNKFFAGQLYRTCPTNATVNTTANDVRTPNAFDNKYYVDLLNREGLFTSDQDLLTNATTRPIVTRFAVDQDAFFDQFVYSYVKMGQVNVLTGSQGQVRANCSARNGAAAGDSDLPWSSVVIETVADAAGSLVL

SEQ ID NO: 4416 - DNA, 1378 bp, Zea mays subsp. mays
  misc_feature (1)..(1378): Ceres Seq. ID no. 13494429
  misc_feature (1)..(1378): Ortholog of  Ceres SEQ ID NO 14303631 as cited in SEQ ID NO 62864
aaaacacccacttcacctccgaccacttcacctccgatcccgccaccactacccaccctttcctttgacgtcccgatggcacctgtagatctaacccccaagcagcccaggaaggcctacggcggcgacggcggcgcctactacgagtggagccccgccgacctgcccatgctcggcgtcgcctccatcggcgcagccaagctctcgctcgccgccggcgggctcgcgctccccagctactccgactcagccaaggtcgcctacgtcctccaaggcacgggcacctgcggcatcgtcctcccagaggcgacgaaggagaaggtggtggccgtgaaggagggcgacgcgctggcgctgcccttcggcgtggtgacgtggtggcacaacggccccgccgcgccgaccccgctcacggtgctcttcctcggcgacacctccaagggccacaggccggggcaattcaccaacttccagctgacgggcgcgaccggcatcttcacgggcttctccaccgagttcgtgtcgcgcgcgtgggaccttccggaggcggacgcggcggcgctggtgtcgagccagccggcctcgggcatcgtccgggcgtcctcgtccccgctgccggcgccgtcgccgcgggaccgcgagggggtggcgctcaactgcctggaggcgccgctggacgtggacatcccgggcgggggccgcgtcgtggtgctcaacacggccaacctgccgctggtcaaggaggtcgggctgggcgccgacctggtccgcatcgacgcccactccatgtgctccccgggcttctcgtgcgactcggcgtaccaggtcacctacatcgtccgcggcagcggccgcgtccaggtggtcgggcccgacggggtgcgcgtcctggagacgcgcgtcgagggcggcttcctcttcatcgtgccccgcttccacgtcgtctccaagatcgccgacgcgtccggcatggagtggttctccatcatcaccacccccaacccgatcttcagccacctggccgggaagacgtcggtgtggaaggccatctcggcggaggtgctgcaggcgtcgttcaacaccacgccggagatggagaagctgttccggtccaagaggctcgactcggagatcttcttcgctcccccatccaactgagaaaataggccggaagccccacggtggagtcctctcgttaggtcgtcgtgcttagattaggttagctagcttgcctttaataaaaagagagtggtggtcgtcggcgtcggcttcggcggtctgcttcttcttcattcagtgcgtcggtcggtttagagtctgtcacgtgtcccgtcattgaactgcagtttttgttaataaagtattgttattattaggt

SEQ ID NO: 4417 - protein, 385 aa, Zea mays subsp. mays
  peptide (1)..(385): Ceres Seq. ID no. 13494430
KTPTSPPTTSPPIPPPLPTLSFDVPMAPVDLTPKQPRKAYGGDGGAYYEWSPADLPMLGVASIGAAKLSLAAGGLALPSYSDSAKVAYVLQGTGTCGIVLPEATKEKVVAVKEGDALALPFGVVTWWHNGPAAPTPLTVLFLGDTSKGHRPGQFTNFQLTGATGIFTGFSTEFVSRAWDLPEADAAALVSSQPASGIVRASSSPLPAPSPRDREGVALNCLEAPLDVDIPGGGRVVVLNTANLPLVKEVGLGADLVRIDAHSMCSPGFSCDSAYQVTYIVRGSGRVQVVGPDGVRVLETRVEGGFLFIVPRFHVVSKIADASGMEWFSIITTPNPIFSHLAGKTSVWKAISAEVLQASFNTTPEMEKLFRSKRLDSEIFFAPPSN

SEQ ID NO: 4418 - protein, 360 aa, Zea mays subsp. mays
  peptide (1)..(360): Ceres Seq. ID no. 13494431
MAPVDLTPKQPRKAYGGDGGAYYEWSPADLPMLGVASIGAAKLSLAAGGLALPSYSDSAKVAYVLQGTGTCGIVLPEATKEKVVAVKEGDALALPFGVVTWWHNGPAAPTPLTVLFLGDTSKGHRPGQFTNFQLTGATGIFTGFSTEFVSRAWDLPEADAAALVSSQPASGIVRASSSPLPAPSPRDREGVALNCLEAPLDVDIPGGGRVVVLNTANLPLVKEVGLGADLVRIDAHSMCSPGFSCDSAYQVTYIVRGSGRVQVVGPDGVRVLETRVEGGFLFIVPRFHVVSKIADASGMEWFSIITTPNPIFSHLAGKTSVWKAISAEVLQASFNTTPEMEKLFRSKRLDSEIFFAPPSN

SEQ ID NO: 4419 - protein, 329 aa, Zea mays subsp. mays
  peptide (1)..(329): Ceres Seq. ID no. 13494432
MLGVASIGAAKLSLAAGGLALPSYSDSAKVAYVLQGTGTCGIVLPEATKEKVVAVKEGDALALPFGVVTWWHNGPAAPTPLTVLFLGDTSKGHRPGQFTNFQLTGATGIFTGFSTEFVSRAWDLPEADAAALVSSQPASGIVRASSSPLPAPSPRDREGVALNCLEAPLDVDIPGGGRVVVLNTANLPLVKEVGLGADLVRIDAHSMCSPGFSCDSAYQVTYIVRGSGRVQVVGPDGVRVLETRVEGGFLFIVPRFHVVSKIADASGMEWFSIITTPNPIFSHLAGKTSVWKAISAEVLQASFNTTPEMEKLFRSKRLDSEIFFAPPSN

SEQ ID NO: 4420 - DNA, 1597 bp, Zea mays subsp. mays
  misc_feature (1)..(1597): Ceres Seq. ID no. 12566728
  misc_feature (1)..(1597): Ortholog of  Ceres SEQ ID NO 15178246 as cited in SEQ ID NO 52038
gcacgagaccattacctagaacatcctaatcgaaaaggctcgtcggcaacgctagggtttttggctactccgcctccgctctcccccctgctgcgcgctactcgcccgatctcgcggtgctggtagcggtgaaaatatctgagatcgagtgaagctagcttttcatcgatatggcgcttgtactgcatgctggcagtagtaacaaaaatgcattcaaaacactaattgccgcggattacagcggcatcaaggttgagttggtaaaagactttcaaatgggggtttccaacaaaacaccagagttcctcaagatgaaccctattgggaaggttcctgtcctggagacacctgatggtcctgtctttgagagcaatgcaatagcaagatatgttactcgcttgaaggctaacaacccactttacggatcttcactgattgattatgcccatattgagcagtggatggactttgctgcgacagaggttgatgccagcattggaaagtggttgtacccacgtatggggttttatccctatgctgctgtgacagaagaatcagccattgctgctttgaagagagcattcggttccctgaacacccatcttgcatcaaacacattccttgttgggcattcagtgacacttgcggatattgtgctgacatgcaatctttatatgggctttagccgtatcttgactaagagttttacctcagagttccctcatattgagaggtacttctggaccatggttaaccagccaaacttcaaaaaggtcattggtgacgtgaagcaggcagaagctgtgccacttcttccaaagaagattgctccggccaaagagcagaagcctaaggaagccaaaaaggaggccccgaagcctaaggaagctgagaaaccagcagaggaagaggaggctccaaagcctaagccaaagaatccccttgatttgcttcctccgagcaagttgattcttgacgattggaagaggctgtattctaacacgaaaaccaacttccgtgaggttgctattaaaggtttctgggacatgtatgacccagagggctactccctgtggttctgtgactacaagtacaatgacgagaacacagtgtcgtttgtgactatgaacaaggttggtggcttcctgcagcggatggatctgttccgcaaatacgcctttggcaagatgcttgtggttggctctgagccccctttcaaggtcaaggggctctggctcttccgtggccccgaaatccccaagtttgtcatggatgaggtctatgacatggagctctatgagtggaccaaggtcgacctctctgatgaggcccagaaggagcgggtcaatgccatgatcgaggaccaggagccttttgagggcgaggccttgctagatgcaaaatgcttcaagtgagcctcatctctttggagtgctgctcaggaaagagttgtttaggtttttgggtctaattctaaaacagctatgaatgttagttttgatctggggttattttctgtgctgtgttgagacttttggtcatggtaagggaatcggggaaggttttaggcgcgtgcaatattatggattatcgcatt

SEQ ID NO: 4421 - protein, 414 aa, Zea mays subsp. mays
  peptide (1)..(414): Ceres Seq. ID no. 12566729
MALVLHAGSSNKNAFKTLIAADYSGIKVELVKDFQMGVSNKTPEFLKMNPIGKVPVLETPDGPVFESNAIARYVTRLKANNPLYGSSLIDYAHIEQWMDFAATEVDASIGKWLYPRMGFYPYAAVTEESAIAALKRAFGSLNTHLASNTFLVGHSVTLADIVLTCNLYMGFSRILTKSFTSEFPHIERYFWTMVNQPNFKKVIGDVKQAEAVPLLPKKIAPAKEQKPKEAKKEAPKPKEAEKPAEEEEAPKPKPKNPLDLLPPSKLILDDWKRLYSNTKTNFREVAIKGFWDMYDPEGYSLWFCDYKYNDENTVSFVTMNKVGGFLQRMDLFRKYAFGKMLVVGSEPPFKVKGLWLFRGPEIPKFVMDEVYDMELYEWTKVDLSDEAQKERVNAMIEDQEPFEGEALLDAKCFK

SEQ ID NO: 4422 - protein, 379 aa, Zea mays subsp. mays
  peptide (1)..(379): Ceres Seq. ID no. 12566730
MGVSNKTPEFLKMNPIGKVPVLETPDGPVFESNAIARYVTRLKANNPLYGSSLIDYAHIEQWMDFAATEVDASIGKWLYPRMGFYPYAAVTEESAIAALKRAFGSLNTHLASNTFLVGHSVTLADIVLTCNLYMGFSRILTKSFTSEFPHIERYFWTMVNQPNFKKVIGDVKQAEAVPLLPKKIAPAKEQKPKEAKKEAPKPKEAEKPAEEEEAPKPKPKNPLDLLPPSKLILDDWKRLYSNTKTNFREVAIKGFWDMYDPEGYSLWFCDYKYNDENTVSFVTMNKVGGFLQRMDLFRKYAFGKMLVVGSEPPFKVKGLWLFRGPEIPKFVMDEVYDMELYEWTKVDLSDEAQKERVNAMIEDQEPFEGEALLDAKCFK

SEQ ID NO: 4423 - protein, 367 aa, Zea mays subsp. mays
  peptide (1)..(367): Ceres Seq. ID no. 12566731
MNPIGKVPVLETPDGPVFESNAIARYVTRLKANNPLYGSSLIDYAHIEQWMDFAATEVDASIGKWLYPRMGFYPYAAVTEESAIAALKRAFGSLNTHLASNTFLVGHSVTLADIVLTCNLYMGFSRILTKSFTSEFPHIERYFWTMVNQPNFKKVIGDVKQAEAVPLLPKKIAPAKEQKPKEAKKEAPKPKEAEKPAEEEEAPKPKPKNPLDLLPPSKLILDDWKRLYSNTKTNFREVAIKGFWDMYDPEGYSLWFCDYKYNDENTVSFVTMNKVGGFLQRMDLFRKYAFGKMLVVGSEPPFKVKGLWLFRGPEIPKFVMDEVYDMELYEWTKVDLSDEAQKERVNAMIEDQEPFEGEALLDAKCFK

SEQ ID NO: 4424 - DNA, 982 bp, Zea mays subsp. mays
  misc_feature (1)..(982): Ceres Seq. ID no. 12566158
  misc_feature (1)..(982): Ortholog of  Ceres SEQ ID NO 13662677 as cited in SEQ ID NO 63824
gcacgagaccattacctagaacatcctaatcgaaaaaaaaacgcgggacgcggattgatgatatcggtcgccgacgagcggggccggagcactctctgcttctccccctacttcccctacgtaccaggaagctaccactcccccagagtgaaggaagagagagctctccgcctctctcctccgccttagagcgacgtcgctgccggagctcgatacctatgggtggcttcgggacctcgcgccctgcctccgtcgccctctgcgccttcctcaccttcctcaacctcttcgccgtccttctcgccgtcggcgccgagcgccgccgcagcaccgggaaggtgatgccggacgagtacgacgagcggtcctactgcctctacgacactgacgcctccacggtgtacggcgtctccgctttcttcgtgctcctgctccagcaggccattgtcaacgtcgccacgtggtgcctctgcttcggacccgtgctctcctcccgcggctgtgccgtaacggcattcgtcctctcctggataacattcctcgtcgcagaagcttgtctcataggaggatcggtgaggaatgcaaagcacaccaagtatttaggctactacatgaagcatgatttggtgtcgtgcgccgcccttcgcaagggagtctttgcagcagctgctgcaatgatgatcatcaacctcctggcgtccctggtgtactactggagttactcaaaagctgcgacgggtgggttcatgaagcaccaaaatgaggttggtgtgggcatgacggattacggccttgacaagggtgtttctgggccctgagtgagatggaatcttattggcctctgtgcggtattaatactatcgtcgaaatgtatgtggatgaagttgagttgtttctctacggtgtgctgtgaatgatataccataactgtacaatggcatgggtggtgatattgtagggttcgtgctgtgaaaaatgcggt

SEQ ID NO: 4425 - protein, 199 aa, Zea mays subsp. mays
  peptide (1)..(199): Ceres Seq. ID no. 12566159
MGGFGTSRPASVALCAFLTFLNLFAVLLAVGAERRRSTGKVMPDEYDERSYCLYDTDASTVYGVSAFFVLLLQQAIVNVATWCLCFGPVLSSRGCAVTAFVLSWITFLVAEACLIGGSVRNAKHTKYLGYYMKHDLVSCAALRKGVFAAAAAMMIINLLASLVYYWSYSKAATGGFMKHQNEVGVGMTDYGLDKGVSGP

SEQ ID NO: 4426 - protein, 158 aa, Zea mays subsp. mays
  peptide (1)..(158): Ceres Seq. ID no. 12566160
MPDEYDERSYCLYDTDASTVYGVSAFFVLLLQQAIVNVATWCLCFGPVLSSRGCAVTAFVLSWITFLVAEACLIGGSVRNAKHTKYLGYYMKHDLVSCAALRKGVFAAAAAMMIINLLASLVYYWSYSKAATGGFMKHQNEVGVGMTDYGLDKGVSGP

SEQ ID NO: 4427 - DNA, 1412 bp, Zea mays subsp. mays
  misc_feature (1)..(1412): Ceres Seq. ID no. 12566951
  misc_feature (1)..(1412): Ortholog of  Ceres SEQ ID NO 15180447 as cited in SEQ ID NO 0
atctctcatttcccttgcaactggaagcgagctctctgcctcgtacgtcgtcggcgctgcgggagcgtgcattgttgagcgagtgcggccaagcaacgcgggctcgaggagatgatgctgagcgggcacggcggcgagaggcgcctgttcacggcgtcgcagtggcaggagctcgagcaccaggcgctcatcttcaagtacatggcctcgggcgcgcccgtgccgcacgacctcgtcctaccgctccgcctcgccaccggcgtcgacaccgcgccctccctcgccttcccgccgcagccttcgccgtcgctggcgtactggggctgctacggcgcgggggcgccgttcggccgcaaggcggcggaggacacggagccggggcggtgccggcggacggacggcaagaagtggcggtgctccagggaggcccacggcgactccaagtactgcgagaagcacattcaccgcgggaagagccgttcaagaaagcctgtggaagtgacctcctcccccgccgccggcgccgctgcggcgtaccgaccgtccgcgatctccaccatctcgccgccccgcgcggccgacgcgccgccgccgagcctcgcctacccgcagcagcatctcctccacggcgcctcctcctccgcagcagcccgcgcccccgctggcgctctccagctccacctcgacgcgagcctgcacgcggcggcggcggcggcgtcgccatcgccgccgccgtcctaccacaggtacgcccactacacaccgccagcgtcgtcgctcttcccgggcggcggctacggctacgactacgactacgggcagtccaaggagctccgggacgcggcggagctcaggcgacggcacttccacgcgctcggggccgacctgagcctcgacaagccgctgcccgagcccgacaccggctccgacgagaagcagcccctgcggcgtttcctcgacgagtggccgcgggagagcggcgacatggcggcggacgacgccacgcagctttccatctccatccccgcggcctcgccctccgacctcgctgctgcctccgccgccgccgcgcgattccacaacggggagtgatcggtccatctcctagctgcagccctgcaacatcgtggattgaccgctggctgcaactgcaagcctgcaacagcgagcagtaagccagtgacgtggatgcatctcgtagcggcaaaccctgcttctgcctctgcgctgcgcgggacggctcaggctgaggctcaaaaaagtctgaaccgagtcattgagtcaagcagtactagggactctatgacttggtcttttgttcttttgtagcagtacgttactcgtaccaaatgttgtttattttttgtgtgacatttttcatttcttccggttccagtctgtgatgcaagccc

SEQ ID NO: 4428 - protein, 390 aa, Zea mays subsp. mays
  peptide (1)..(390): Ceres Seq. ID no. 12566952
LSFPLQLEASSLPRTSSALRERALLSECGQATRARGDDAERARRREAPVHGVAVAGARAPGAHLQVHGLGRARAARPRPTAPPRHRRRHRALPRLPAAAFAVAGVLGLLRRGGAVRPQGGGGHGAGAVPADGRQEVAVLQGGPRRLQVLREAHSPREEPFKKACGSDLLPRRRRRCGVPTVRDLHHLAAPRGRRAAAEPRLPAAASPPRRLLLRSSPRPRWRSPAPPRREPARGGGGGVAIAAAVLPQVRPLHTASVVALPGRRLRLRLRLRAVQGAPGRGGAQATALPRARGRPEPRQAAARARHRLRREAAPAAFPRRVAAGERRHGGGRRHAAFHLHPRGLALRPRCCLRRRRAIPQRGVIGPSPSCSPATSWIDRWLQLQACNSEQ

SEQ ID NO: 4429 - protein, 326 aa, Zea mays subsp. mays
  peptide (1)..(326): Ceres Seq. ID no. 12566953
MMLSGHGGERRLFTASQWQELEHQALIFKYMASGAPVPHDLVLPLRLATGVDTAPSLAFPPQPSPSLAYWGCYGAGAPFGRKAAEDTEPGRCRRTDGKKWRCSREAHGDSKYCEKHIHRGKSRSRKPVEVTSSPAAGAAAAYRPSAISTISPPRAADAPPPSLAYPQQHLLHGASSSAAARAPAGALQLHLDASLHAAAAAASPSPPPSYHRYAHYTPPASSLFPGGGYGYDYDYGQSKELRDAAELRRRHFHALGADLSLDKPLPEPDTGSDEKQPLRRFLDEWPRESGDMAADDATQLSISIPAASPSDLAAASAAAARFHNGE

SEQ ID NO: 4430 - protein, 325 aa, Zea mays subsp. mays
  peptide (1)..(325): Ceres Seq. ID no. 12566954
MLSGHGGERRLFTASQWQELEHQALIFKYMASGAPVPHDLVLPLRLATGVDTAPSLAFPPQPSPSLAYWGCYGAGAPFGRKAAEDTEPGRCRRTDGKKWRCSREAHGDSKYCEKHIHRGKSRSRKPVEVTSSPAAGAAAAYRPSAISTISPPRAADAPPPSLAYPQQHLLHGASSSAAARAPAGALQLHLDASLHAAAAAASPSPPPSYHRYAHYTPPASSLFPGGGYGYDYDYGQSKELRDAAELRRRHFHALGADLSLDKPLPEPDTGSDEKQPLRRFLDEWPRESGDMAADDATQLSISIPAASPSDLAAASAAAARFHNGE

SEQ ID NO: 4431 - DNA, 1398 bp, Zea mays subsp. mays; identical to SEQ ID NO: 2844
  misc_feature (1)..(1398): Ceres Seq. ID no. 13498659
  misc_feature (1)..(1398): Ortholog of  Ceres SEQ ID NO 15176130 as cited in SEQ ID NO 1136
  misc_feature (1)..(1398): Ortholog of  Ceres SEQ ID NO 15171728 as cited in SEQ ID NO 57131
  misc_feature (1)..(1398): Ortholog of  Ceres SEQ ID NO 14308198 as cited in SEQ ID NO 59072
  misc_feature (1)..(1398): Ortholog of  Ceres SEQ ID NO 13654213 as cited in SEQ ID NO 60614
  misc_feature (1)..(1398): Ortholog of  Ceres SEQ ID NO 12617527 as cited in SEQ ID NO 64697

SEQ ID NO: 4432 - protein, 71 aa, Zea mays subsp. mays; identical to SEQ ID NO: 2845
  peptide (1)..(71): Ceres Seq. ID no. 13498660

SEQ ID NO: 4433 - protein, 59 aa, Zea mays subsp. mays; identical to SEQ ID NO: 2846
  peptide (1)..(59): Ceres Seq. ID no. 13498661

SEQ ID NO: 4434 - protein, 55 aa, Zea mays subsp. mays; identical to SEQ ID NO: 2847
  peptide (1)..(55): Ceres Seq. ID no. 13498662

SEQ ID NO: 4435 - DNA, 1060 bp, Zea mays subsp. mays
  misc_feature (1)..(1060): Ceres Seq. ID no. 12566522
  misc_feature (1)..(1060): Ortholog of  Ceres SEQ ID NO 13595808 as cited in SEQ ID NO 50995
  misc_feature (1)..(1060): Ortholog of  Ceres SEQ ID NO 12609096 as cited in SEQ ID NO 52019
  misc_feature (1)..(1060): Ortholog of  Ceres SEQ ID NO 15177207 as cited in SEQ ID NO 58287
  misc_feature (1)..(1060): Ortholog of  Ceres SEQ ID NO 15178854 as cited in SEQ ID NO 0
ataacaaccccggcctgccatgtgccacaaccgtagcctgtagcttcatccgttgcgctgcgcccggttccctcgcgcggtgcggaatttaacatggccgtgccggaggtggtggtcgacggcgtcgtcttcccgccggtggcccgcccgccgggctccgccggctcgcacttcctcggcggcgcaggcgtgcgaggcgtcgagatcggaggcaacttcatcaagttcacggccatcggcgtgtacctggaggacgcggccgtgcccgcgctggccaagaagtggggcggcaagacggccgacgagctcgcctccgacgccgccttcttccgcgacgtcgtcacgggcgacttcgagaagttcacgagggtgacgatgatcctcccgctgacgggcgagcagtacgcggagaaagtgacggagaactgcgtggcgttctggaaggccgccggcctgtacacggacgccgagggcgtcgccgtggagaagttcagggaggtgttcaagccagagactttcgcgccgggcgcctccatcctcttcacgcactcgcccgccggagtcctcaccgtcgccttctccaaggactcgtcggtgccagcggccggcggcgtggcgatcgagaacaagcgcctctgcgaggccgtgctggagtccatcatcggggagcgcggcgtgtcgccggccgcgaagctgagcctcgccgcgagggtgtcggagctcctcgccaaggagaccgccgcggccgccgacgcgccgcaggcggagcccgtctccatcaccgcctgaggcgaggagcgggcgggcgggcgagcgaacgaaccgcgaggagaaagaaagcaaccagacggttgggcggcacggcgtctcacacctgccgcctgcgcttgcgtgctccggagtccggactggagagacgccgcgcgggtgcagtgcatccgtcgcgtcttgtctgtccgcgctatggcgtcgtgttcctgcctttctggtcgcgtagttgtcttgtgttcgctgttggtcgttctgggtaacatttgaataaaacaagcggatttgttgc

SEQ ID NO: 4436 - protein, 231 aa, Zea mays subsp. mays
  peptide (1)..(231): Ceres Seq. ID no. 12566523
MAVPEVVVDGVVFPPVARPPGSAGSHFLGGAGVRGVEIGGNFIKFTAIGVYLEDAAVPALAKKWGGKTADELASDAAFFRDVVTGDFEKFTRVTMILPLTGEQYAEKVTENCVAFWKAAGLYTDAEGVAVEKFREVFKPETFAPGASILFTHSPAGVLTVAFSKDSSVPAAGGVAIENKRLCEAVLESIIGERGVSPAAKLSLAARVSELLAKETAAAADAPQAEPVSITA

SEQ ID NO: 4437 - protein, 137 aa, Zea mays subsp. mays
  peptide (1)..(137): Ceres Seq. ID no. 12566524
MILPLTGEQYAEKVTENCVAFWKAAGLYTDAEGVAVEKFREVFKPETFAPGASILFTHSPAGVLTVAFSKDSSVPAAGGVAIENKRLCEAVLESIIGERGVSPAAKLSLAARVSELLAKETAAAADAPQAEPVSITA

SEQ ID NO: 4438 - DNA, 1076 bp, Zea mays subsp. mays
  misc_feature (1)..(1076): Ceres Seq. ID no. 12337188
  misc_feature (1)..(1076): Ortholog of  Ceres SEQ ID NO 14304848 as cited in SEQ ID NO 54575
  misc_feature (1)..(1076): Ortholog of  Ceres SEQ ID NO 12617447 as cited in SEQ ID NO 65185
caaaaccccattccgcaatgagacccgcagccgcagcagccaccgctaccaccgccgcgctccgtctccgcgccgcctccctctcgccttctctcgctgcctccctctcgccttctctcgccgccctcctttctcatcgtagatcctccctcattcttcctccgctgcgccgcatctgctcccttgcgcctccccactcctccgccgcccccaattcgcagcccccgccgcagttgctctctcccatcatggacgcgcagttcgagctcttccgcgcgcagctcgacgagtcttccaccctccgcgaccgcatccgtgccgtcgtcgccgagattgagtccgcctcccgcgtcgccaccgccgcgctcctcctagtccaccagcccgtccccctggcagatgtgcttgtgaaagccaaggcgcaggtagaggtgatcaaggggttgtacgcgcgcctggcggaagtcctcaaggaatgccctgggcagtactacaggtaccatgctgattggaggactgagacacatatggtagtgtcgatgcttgcattcatgcactggctggagacaggtggcctactcatgcatgctgaagcccaggagaagctagggttgtgctctggggagtttggccttgatgttgaggactacctgacaggactgtgcttcatgtccaatgaatttcctagatttgtagtaaatcgcgtcactgctggcgactatgactgtcctaaaagggttttgggcttcttgaccgatcttcatgcttcgtttaggatgctgaatctgcgcaatgacttcttgcgtaagaaatttgatgggatgaagtatgatttgaggagggtggaagaggtctactatgatgtgaagatccgtggacttgtacctgcgtagttgaaacaagagacttagaatccttggtaatgttagattgttaacatactgtggtttggcttttgtcatccataacgtgttcatctagctaaaatgtgaaatatattctgttggagcgtatgtgttatggactgaacttgagggcactcgaatgaccttgctcatttcttttactgtggcgcc

SEQ ID NO: 4439 - protein, 296 aa, Zea mays subsp. mays
  peptide (1)..(296): Ceres Seq. ID no. 12337189
KPHSAMRPAAAAATATTAALRLRAASLSPSLAASLSPSLAALLSHRRSSLILPPLRRICSLAPPHSSAAPNSQPPPQLLSPIMDAQFELFRAQLDESSTLRDRIRAVVAEIESASRVATAALLLVHQPVPLADVLVKAKAQVEVIKGLYARLAEVLKECPGQYYRYHADWRTETHMVVSMLAFMHWLETGGLLMHAEAQEKLGLCSGEFGLDVEDYLTGLCFMSNEFPRFVVNRVTAGDYDCPKRVLGFLTDLHASFRMLNLRNDFLRKKFDGMKYDLRRVEEVYYDVKIRGLVPA

SEQ ID NO: 4440 - protein, 291 aa, Zea mays subsp. mays
  peptide (1)..(291): Ceres Seq. ID no. 12337190
MRPAAAAATATTAALRLRAASLSPSLAASLSPSLAALLSHRRSSLILPPLRRICSLAPPHSSAAPNSQPPPQLLSPIMDAQFELFRAQLDESSTLRDRIRAVVAEIESASRVATAALLLVHQPVPLADVLVKAKAQVEVIKGLYARLAEVLKECPGQYYRYHADWRTETHMVVSMLAFMHWLETGGLLMHAEAQEKLGLCSGEFGLDVEDYLTGLCFMSNEFPRFVVNRVTAGDYDCPKRVLGFLTDLHASFRMLNLRNDFLRKKFDGMKYDLRRVEEVYYDVKIRGLVPA

SEQ ID NO: 4441 - protein, 214 aa, Zea mays subsp. mays
  peptide (1)..(214): Ceres Seq. ID no. 12337191
MDAQFELFRAQLDESSTLRDRIRAVVAEIESASRVATAALLLVHQPVPLADVLVKAKAQVEVIKGLYARLAEVLKECPGQYYRYHADWRTETHMVVSMLAFMHWLETGGLLMHAEAQEKLGLCSGEFGLDVEDYLTGLCFMSNEFPRFVVNRVTAGDYDCPKRVLGFLTDLHASFRMLNLRNDFLRKKFDGMKYDLRRVEEVYYDVKIRGLVPA

SEQ ID NO: 4442 - DNA, 1943 bp, Zea mays subsp. mays
  misc_feature (1)..(1943): Ceres Seq. ID no. 12387936
  misc_feature (1)..(1943): Ortholog of  Ceres SEQ ID NO 15225553 as cited in SEQ ID NO 51170
ggaaaaggaaaaaaaaaaaagaaccgcgcacgcttcttcttccctcccccacaaagggaagaaaaaaaatttccgtgtacggtttcgcccggcgccgcctttggcagttgctttgcttgctcttgccctgttgagctccaaaggatctccatttcaccactcccatcgatcccactaccggtccgcatcaagcagccggcgatggggtccgcgtccgcccgcatcgccaccgccgccgtgcacctcgtcaccgcggccgccatcctcctcatgctcgcgcgaggcggcgaggccgtcagtctctggctcccgccgccgaccgccggaggagggggcttcctcggcggcgcggaccgttacctgactcgggaggagcactggatgaaccaaaccctggatcacttcaacccgacggaccatcggcaattcaaacagcggtactacgaatttctcgactactaccgagctccaaatggcccgatcttcctatacatctgtggagaatctacgtgcaatgggattggcaataactacttagctgtggtggcaaagaaatttggtgctgcattggtttctcctgagcatcgatactatggaaagagttctccttttaacagtttgacaacagaaaatctacagttcttgtcatcaaagcaggctttatttgatcttgctgttttccgccaatattatcaggaaaccttaaatgccaagtataatcgctctggggcaaacagttcttggtttgtttttggagggtcatatgctggagcactcagtgcttggttcaggttgaagtttcctcacttgacatgtggaagccttgcaagttcaggggttgttcttgctgtatacaactttaccgattttgacaaacagattgggatctctgctggtcctgaatgcaaggcagcacttcaagaaataacaggacttgttgatggacagcttcagtctggccgtaactcggttaaggagttgtttggagcgacaaagttagaaaatgatggtgacttcctctacttactggcagatgctgctgctattgcgttccaatatggtaatcctgatgtcttgtgctccccactagctgaagcaaagaagaatgggacagatttggtggaaacatttgctagttacgtgaaagattattacattggaaaatttggggcgtcagtagcatcatatgatcagcaatatttgaagaacacaactcctgctgaatcctcatatagactatggtggtaccaagtttgcagtgaggttgcatatttccaggtggcaccaaaaaacgatagtgttcgttccccaaagatcgacacgaggtaccatttggacttgtgcagaaatgttttcggcgaaggagtctaccctgatgtctttatgacaaacttatactatggaggcacaggaattgcaggttctaaaattgtttttgcaaatggatctcaagacccatggcgccacgcttctaagcagaaatcatcagacgaattgccatcatacctaattgagtgcaagaactgcggacactgcagtgatctctctggatgccctcaagctccttcaaacattgaaggtgattcatccaagtgctcacctcccgaagctctgaacaaagtaaggaaggagattgtcgatcacattgacctgtggctatcagaatgccaagagcaaggacatgacaaggagccatggctgggaagcatatggagcatagctgctatttgatcaatctgtgaagctataagcatgtgctgctagagtaaccaaggcaaatatgctttctttttcttgcagcactgtggtttatcgtttcggcaaacaatgtgggctgctgagtaagaggacatatctggtgcaccaatcttccatgtgcattagatatgttctcgctgagtaatccacctgtggcgaataaataaagcagtcagttctcagtc

SEQ ID NO: 4443 - protein, 576 aa, Zea mays subsp. mays
  peptide (1)..(576): Ceres Seq. ID no. 12387937
GKGKKKKNRARFFFPPPQREEKKFPCTVSPGAAFGSCFACSCPVELQRISISPLPSIPLPVRIKQPAMGSASARIATAAVHLVTAAAILLMLARGGEAVSLWLPPPTAGGGGFLGGADRYLTREEHWMNQTLDHFNPTDHRQFKQRYYEFLDYYRAPNGPIFLYICGESTCNGIGNNYLAVVAKKFGAALVSPEHRYYGKSSPFNSLTTENLQFLSSKQALFDLAVFRQYYQETLNAKYNRSGANSSWFVFGGSYAGALSAWFRLKFPHLTCGSLASSGVVLAVYNFTDFDKQIGISAGPECKAALQEITGLVDGQLQSGRNSVKELFGATKLENDGDFLYLLADAAAIAFQYGNPDVLCSPLAEAKKNGTDLVETFASYVKDYYIGKFGASVASYDQQYLKNTTPAESSYRLWWYQVCSEVAYFQVAPKNDSVRSPKIDTRYHLDLCRNVFGEGVYPDVFMTNLYYGGTGIAGSKIVFANGSQDPWRHASKQKSSDELPSYLIECKNCGHCSDLSGCPQAPSNIEGDSSKCSPPEALNKVRKEIVDHIDLWLSECQEQGHDKEPWLGSIWSIAAI

SEQ ID NO: 4444 - protein, 509 aa, Zea mays subsp. mays
  peptide (1)..(509): Ceres Seq. ID no. 12387938
MGSASARIATAAVHLVTAAAILLMLARGGEAVSLWLPPPTAGGGGFLGGADRYLTREEHWMNQTLDHFNPTDHRQFKQRYYEFLDYYRAPNGPIFLYICGESTCNGIGNNYLAVVAKKFGAALVSPEHRYYGKSSPFNSLTTENLQFLSSKQALFDLAVFRQYYQETLNAKYNRSGANSSWFVFGGSYAGALSAWFRLKFPHLTCGSLASSGVVLAVYNFTDFDKQIGISAGPECKAALQEITGLVDGQLQSGRNSVKELFGATKLENDGDFLYLLADAAAIAFQYGNPDVLCSPLAEAKKNGTDLVETFASYVKDYYIGKFGASVASYDQQYLKNTTPAESSYRLWWYQVCSEVAYFQVAPKNDSVRSPKIDTRYHLDLCRNVFGEGVYPDVFMTNLYYGGTGIAGSKIVFANGSQDPWRHASKQKSSDELPSYLIECKNCGHCSDLSGCPQAPSNIEGDSSKCSPPEALNKVRKEIVDHIDLWLSECQEQGHDKEPWLGSIWSIAAI

SEQ ID NO: 4445 - protein, 486 aa, Zea mays subsp. mays
  peptide (1)..(486): Ceres Seq. ID no. 12387939
MLARGGEAVSLWLPPPTAGGGGFLGGADRYLTREEHWMNQTLDHFNPTDHRQFKQRYYEFLDYYRAPNGPIFLYICGESTCNGIGNNYLAVVAKKFGAALVSPEHRYYGKSSPFNSLTTENLQFLSSKQALFDLAVFRQYYQETLNAKYNRSGANSSWFVFGGSYAGALSAWFRLKFPHLTCGSLASSGVVLAVYNFTDFDKQIGISAGPECKAALQEITGLVDGQLQSGRNSVKELFGATKLENDGDFLYLLADAAAIAFQYGNPDVLCSPLAEAKKNGTDLVETFASYVKDYYIGKFGASVASYDQQYLKNTTPAESSYRLWWYQVCSEVAYFQVAPKNDSVRSPKIDTRYHLDLCRNVFGEGVYPDVFMTNLYYGGTGIAGSKIVFANGSQDPWRHASKQKSSDELPSYLIECKNCGHCSDLSGCPQAPSNIEGDSSKCSPPEALNKVRKEIVDHIDLWLSECQEQGHDKEPWLGSIWSIAAI

SEQ ID NO: 4446 - DNA, 1823 bp, Zea mays subsp. mays
  misc_feature (1)..(1823): Ceres Seq. ID no. 12566533
  misc_feature (1)..(1823): Ortholog of  Ceres SEQ ID NO 14308003 as cited in SEQ ID NO 65919
acatgccacattgccaccaagccacagttccacctttcgattcatgcacgctcagtcatgggcgccctccggagtttagccatctcctacccggagttcctcgtggccgggctgtgcttcgtctccctctcggccctgcgccacgcgatgcgtgagcggcggcaacgcgcccccctgagctggcctgtggtgggcatgctcccgttcgtgctcgcgaacctcgggcgcctctacgacgccatcaccgacgccctccacgggtccgggtgcacgctcatgttccgcgggccgtggctcgcccgcgcggacttcctgctgacgtgcgacccggcggccgtccagcactgcctggcgtccaaccacgggggctacgacaggggccgagactttgcggagatgttcgacctcctgggcgacgggctgctggttgcggacgccgcgtcgtgggcgcgccagcggcacgtcgccgccaccgtcttcggcaccccggcgttccggtccttcgtcctgtgcaccatggcgcgccagacggcgcggctgctcgtgccgttcctggactgcgccgccgcggatcaggaaggggacggtggcgtcgttgatctcgaggacgtgttcatgcggtactcgctcgatgtgacctacgcctccgtgttcgatgccgacctggacatgctgtgcgtcgccgccgcctcggcgccggtgccgccgttcggcctggcgaccagggtggccagcgaatctgtgctcttcaggcacatcgtgccggcctggtggtggaggctgctgaggtggctcaatgtcggctccgagaggaggctggccgaggccaaggcggtcctcaacgaattcgtctaccgcgagatcgccaaacgcaagtcacggctcgccaccacaagccaagcaggagaaggctacgacctcctgtcactgtacatggcgtggccgagggaacccggtatgagcgagcggcagagggatcagttcctccgggattccgccgtcagttacttgtttgcggccaaggacctcatcgtcgccgcgctcacctggttcttctacatgctctgcacgcacccgcacgtcgaggccaagatcctcgacgagctgaggtccctgcatcccacagccacggtcgcggccaccggcggcggcgagcatgccgtgttcgactctgacgcgctccagcccgcgtcctacctccacgcggcggtcctcgagacgctgcggctgttcccgccggcgcctttcgaggagaaagaggcagttcgcagcgatgtgctgcctgacggcaccacggtggccaagggcaccagggtcatcttctgcatctacgccatgggcaggatggaagggctatggggtagcgactgccacgagttccgaccggagcggtggctgtccgatattggccgagtccggcacgagcccagccacaagttcgccgtgttcaactgcggacccagaagctgcctcgggaagaacctggggctcagcaacatcaagattgccgccgccgcaatcttatacaactttcgggtggagctcatcgacggccatatcgttgagccacagaactcagtggtgcttctcaccaagaacgggatgagggttaggatcaagaggaggcacgcagcatgatgcactgtgctacttctacctttacatcagttaaactccaaaaaatggtggggaaacgaacaaaaggtgatagggcatatagaataaaaacgcagcacaaattttattccagattaatctgctcatgtgatttcagccatattggatacaagttctgaactttgatgcttctgattcggaaaatt

SEQ ID NO: 4447 - protein, 545 aa, Zea mays subsp. mays
  peptide (1)..(545): Ceres Seq. ID no. 12566534
TCHIATKPQFHLSIHARSVMGALRSLAISYPEFLVAGLCFVSLSALRHAMRERRQRAPLSWPVVGMLPFVLANLGRLYDAITDALHGSGCTLMFRGPWLARADFLLTCDPAAVQHCLASNHGGYDRGRDFAEMFDLLGDGLLVADAASWARQRHVAATVFGTPAFRSFVLCTMARQTARLLVPFLDCAAADQEGDGGVVDLEDVFMRYSLDVTYASVFDADLDMLCVAAASAPVPPFGLATRVASESVLFRHIVPAWWWRLLRWLNVGSERRLAEAKAVLNEFVYREIAKRKSRLATTSQAGEGYDLLSLYMAWPREPGMSERQRDQFLRDSAVSYLFAAKDLIVAALTWFFYMLCTHPHVEAKILDELRSLHPTATVAATGGGEHAVFDSDALQPASYLHAAVLETLRLFPPAPFEEKEAVRSDVLPDGTTVAKGTRVIFCIYAMGRMEGLWGSDCHEFRPERWLSDIGRVRHEPSHKFAVFNCGPRSCLGKNLGLSNIKIAAAAILYNFRVELIDGHIVEPQNSVVLLTKNGMRVRIKRRHAA

SEQ ID NO: 4448 - protein, 526 aa, Zea mays subsp. mays
  peptide (1)..(526): Ceres Seq. ID no. 12566535
MGALRSLAISYPEFLVAGLCFVSLSALRHAMRERRQRAPLSWPVVGMLPFVLANLGRLYDAITDALHGSGCTLMFRGPWLARADFLLTCDPAAVQHCLASNHGGYDRGRDFAEMFDLLGDGLLVADAASWARQRHVAATVFGTPAFRSFVLCTMARQTARLLVPFLDCAAADQEGDGGVVDLEDVFMRYSLDVTYASVFDADLDMLCVAAASAPVPPFGLATRVASESVLFRHIVPAWWWRLLRWLNVGSERRLAEAKAVLNEFVYREIAKRKSRLATTSQAGEGYDLLSLYMAWPREPGMSERQRDQFLRDSAVSYLFAAKDLIVAALTWFFYMLCTHPHVEAKILDELRSLHPTATVAATGGGEHAVFDSDALQPASYLHAAVLETLRLFPPAPFEEKEAVRSDVLPDGTTVAKGTRVIFCIYAMGRMEGLWGSDCHEFRPERWLSDIGRVRHEPSHKFAVFNCGPRSCLGKNLGLSNIKIAAAAILYNFRVELIDGHIVEPQNSVVLLTKNGMRVRIKRRHAA

SEQ ID NO: 4449 - protein, 496 aa, Zea mays subsp. mays
  peptide (1)..(496): Ceres Seq. ID no. 12566536
MRERRQRAPLSWPVVGMLPFVLANLGRLYDAITDALHGSGCTLMFRGPWLARADFLLTCDPAAVQHCLASNHGGYDRGRDFAEMFDLLGDGLLVADAASWARQRHVAATVFGTPAFRSFVLCTMARQTARLLVPFLDCAAADQEGDGGVVDLEDVFMRYSLDVTYASVFDADLDMLCVAAASAPVPPFGLATRVASESVLFRHIVPAWWWRLLRWLNVGSERRLAEAKAVLNEFVYREIAKRKSRLATTSQAGEGYDLLSLYMAWPREPGMSERQRDQFLRDSAVSYLFAAKDLIVAALTWFFYMLCTHPHVEAKILDELRSLHPTATVAATGGGEHAVFDSDALQPASYLHAAVLETLRLFPPAPFEEKEAVRSDVLPDGTTVAKGTRVIFCIYAMGRMEGLWGSDCHEFRPERWLSDIGRVRHEPSHKFAVFNCGPRSCLGKNLGLSNIKIAAAAILYNFRVELIDGHIVEPQNSVVLLTKNGMRVRIKRRHAA

SEQ ID NO: 4450 - DNA, 1027 bp, Zea mays subsp. mays
  misc_feature (1)..(1027): Ceres Seq. ID no. 12358294
  misc_feature (1)..(1027): Ortholog of  Ceres SEQ ID NO 13662219 as cited in SEQ ID NO 63129
cagttcaaagcagcgcctcgccaccggacgaacacacagatcgctacagcccgcatgaccaacctctccgccatggcagcgagccaatcctacgtgatccgattcgacggccacttcgacgagccgtcgccgagctccgcgggcgccgagccgccgggcccgcagccgccgttcgcagggaggatgatctcgctcgagcgggagcaccaagtcattgtcgccgccctgctgcacgtcgtctccgggtacgccacgccgccgccgcaggtcttcacgccgccgccggcagcggcgcgctgccaggtgtgcgggatggagcggtgcctcggctgcgagttcttcgccgccggggagggcgcattgggcggcggcgcggagaaggcagccgcgacaggaggcgcggcggcgctggcggcggggcaaaggaggcggaggaagaagaagaacaagtaccgcggcgtgcggcagcggccgtgggggaagtgggcggcggagatccgcgacccgcgccgcgcggtgcgcaagtggctgggcacgttcgacaccgccgaggaggccgccagggcctacgaccaggccgccatcgagttccgcggcccgcgcgccaagctcaacttcccgttccccgagcagccgccgacggggcacgacgagcccatcagcagcaacggcgacgcgagcgcggccgccaggtcgtcggacaccacgccgtcgccgtcgctctgcagcgcggacgccgaggagcgcgggcagccggagtggccgagcgccgggcaggaggcaggggaccaactgctctgggaaggcctgcaggacctgatgaggctggacgaaggcgagccctggctccatccagcctcaagcgcttggaattgaaatttgaaacgcccgcgatcagatcccagccgttcaactagtttgaaataggagcatcctagcctttcgctatgcttctttttttttcttccctccttaactcttctttttctaacctctgttgtacttatttggacaaagcagagttttg

SEQ ID NO: 4451 - protein, 304 aa, Zea mays subsp. mays
  peptide (1)..(304): Ceres Seq. ID no. 12358295
VQSSASPPDEHTDRYSPHDQPLRHGSEPILRDPIRRPLRRAVAELRGRRAAGPAAAVRREDDLARAGAPSHCRRPAARRLRVRHAAAAGLHAAAGSGALPGVRDGAVPRLRVLRRRGGRIGRRRGEGSRDRRRGGAGGGAKEAEEEEEQVPRRAAAAVGEVGGGDPRPAPRGAQVAGHVRHRRGGRQGLRPGRHRVPRPARQAQLPVPRAAADGARRAHQQQRRRERGRQVVGHHAVAVALQRGRRGARAAGVAERRAGGRGPTALGRPAGPDEAGRRRALAPSSLKRLELKFETPAIRSQPFN

SEQ ID NO: 4452 - protein, 291 aa, Zea mays subsp. mays
  peptide (1)..(291): Ceres Seq. ID no. 12358296
QFKAAPRHRTNTQIATARMTNLSAMAASQSYVIRFDGHFDEPSPSSAGAEPPGPQPPFAGRMISLEREHQVIVAALLHVVSGYATPPPQVFTPPPAAARCQVCGMERCLGCEFFAAGEGALGGGAEKAAATGGAAALAAGQRRRRKKKNKYRGVRQRPWGKWAAEIRDPRRAVRKWLGTFDTAEEAARAYDQAAIEFRGPRAKLNFPFPEQPPTGHDEPISSNGDASAAARSSDTTPSPSLCSADAEERGQPEWPSAGQEAGDQLLWEGLQDLMRLDEGEPWLHPASSAWN

SEQ ID NO: 4453 - protein, 273 aa, Zea mays subsp. mays
  peptide (1)..(273): Ceres Seq. ID no. 12358297
MTNLSAMAASQSYVIRFDGHFDEPSPSSAGAEPPGPQPPFAGRMISLEREHQVIVAALLHVVSGYATPPPQVFTPPPAAARCQVCGMERCLGCEFFAAGEGALGGGAEKAAATGGAAALAAGQRRRRKKKNKYRGVRQRPWGKWAAEIRDPRRAVRKWLGTFDTAEEAARAYDQAAIEFRGPRAKLNFPFPEQPPTGHDEPISSNGDASAAARSSDTTPSPSLCSADAEERGQPEWPSAGQEAGDQLLWEGLQDLMRLDEGEPWLHPASSAWN

SEQ ID NO: 4454 - DNA, 1389 bp, Zea mays subsp. mays
  misc_feature (1)..(1389): Ceres Seq. ID no. 13499065
  misc_feature (1)..(1389): Ortholog of  Ceres SEQ ID NO 13581579 as cited in SEQ ID NO 58361
  misc_feature (1)..(1389): Ortholog of  Ceres SEQ ID NO 13638746 as cited in SEQ ID NO 59296
  misc_feature (1)..(1389): Ortholog of  Ceres SEQ ID NO 13598714 as cited in SEQ ID NO 62656
  misc_feature (1)..(1389): Ortholog of  Ceres SEQ ID NO 13596969 as cited in SEQ ID NO 63375
  misc_feature (1)..(1389): Ortholog of  Ceres SEQ ID NO 13597519 as cited in SEQ ID NO 64759
  misc_feature (1)..(1389): Ortholog of  Ceres SEQ ID NO 13597870 as cited in SEQ ID NO 64982
  misc_feature (1)..(1389): Ortholog of  Ceres SEQ ID NO 12567001 as cited in SEQ ID NO 0
atatatccacgccaaggtccggcaccttttctcctcgcgccagagccacgcacgctagtgtcagtggcacgcaggcagccgcgcgcaccgaggggagaccagagctagcggcgaggccaagggcaagggcaagggcgcggacggcaatggcgagagctggaggcggcggtccgttcttcccggtccgcggcgcggcgctggtggtcgtgctgctaggcatcgtcgcgggcgcggcgagggcgcagctgcggctgaactactacggcagctcgtgccccagcgcggagtccacggtgcgctccgtcatctcgcagcgcctccagcagagcttcgccgtggggcccggcacgctccgcctcttcttccacgactgcttcgtcaggggatgcgacgcgtcggtgatgctgatggcgccgaacggggacgacgagagccacagcggcgcggacgccacgctgtcgtccggacgccgtggacgccatcaacaaggcgaaggcggccgtggaggcgctccccgggtgcgccggcaaggtctcgtgcgcggacatcctcgccatggccgcacgtgacgtcgtctccctgctgggcgggccgagctacggcgtggagctggggcggctggacggcaagacgttcaacagggccatcgtgaagcacgtcctcccgggccccggcttcaacctggaccagctcaacgccctcttcgcgcagaacggcctcacgcagacggacatgatcgcgctctcaggcgcgcacacgatcggggtgacgcactgcgacaagttcgtgcggcggatctacacgttcaagcagcggctggcgtggaacccgccgatgaacctggacttcctgcgctcgctgcggcgggtgtgccccctcagctacagccccacggcgttcgccatgctggacgtcaccacgcccagggtcttcgacaacgcctacttcaacaacctccgctacaacaagggcctgctcgcctccgaccaggtgctcttcaccgaccgccgctcccgacccaccgtcaacctcttcgccgccaacgccaccgccttccacgaggcattcgtcgccgccatggccaagctcggcaggatcggcctcaagaccggcgccgacggcgagatacgccgcgtctgcaccgccgtcaactaagcctgcattggctgcttgctgcttgcgtgcgtgggtttcacttcttctttctcttgtttatatacgtacgtttgtcggatggattttgttggtagccatgagatgacatccttgctctgagctagcggacctgccccgactggatgatagagattgatccagatgttcttctagtagattctaattctttatggatgtttcccattgacacgcggttacgcgctcttcaaccgc

SEQ ID NO: 4455 - protein, 199 aa, Zea mays subsp. mays
  peptide (1)..(199): Ceres Seq. ID no. 13499066
MAARDVVSLLGGPSYGVELGRLDGKTFNRAIVKHVLPGPGFNLDQLNALFAQNGLTQTDMIALSGAHTIGVTHCDKFVRRIYTFKQRLAWNPPMNLDFLRSLRRVCPLSYSPTAFAMLDVTTPRVFDNAYFNNLRYNKGLLASDQVLFTDRRSRPTVNLFAANATAFHEAFVAAMAKLGRIGLKTGADGEIRRVCTAVN

SEQ ID NO: 4456 - protein, 188 aa, Zea mays subsp. mays
  peptide (1)..(188): Ceres Seq. ID no. 13499067
ISTPRSGTFSPRARATHASVSGTQAAARTEGRPELAARPRARARARTAMARAGGGGPFFPVRGAALVVVLLGIVAGAARAQLRLNYYGSSCPSAESTVRSVISQRLQQSFAVGPGTLRLFFHDCFVRGCDASVMLMAPNGDDESHSGADATLSSGRRGRHQQGEGGRGGAPRVRRQGLVRGHPRHGRT

SEQ ID NO: 4457 - protein, 140 aa, Zea mays subsp. mays
  peptide (1)..(140): Ceres Seq. ID no. 13499068
MIALSGAHTIGVTHCDKFVRRIYTFKQRLAWNPPMNLDFLRSLRRVCPLSYSPTAFAMLDVTTPRVFDNAYFNNLRYNKGLLASDQVLFTDRRSRPTVNLFAANATAFHEAFVAAMAKLGRIGLKTGADGEIRRVCTAVN

SEQ ID NO: 4458 - DNA, 1333 bp, Zea mays subsp. mays
  misc_feature (1)..(1333): Ceres Seq. ID no. 12566545
  misc_feature (1)..(1333): Ortholog of  Ceres SEQ ID NO 14305878 as cited in SEQ ID NO 52309
acgacacgtcattgccgtggcccagcgctagtttccagaagcagccgcgagcttccaccgccttcttcccgtgcattttctcgagcgacggagcgatccgttcgggccgtccaccacagcgagagagagcggcagaggcgcagagcgcaaccgagcgagagagagaggacggcgacggcggagatgatggggtggggagaggaggtggtggctctgtccctgcgaggctacggctatggcaacgaggaggacgaccggccggagaagccgcggcggtacggggtgacggagatgcggagccccttctactccttccgccccgcaaaccaggcgctccaggaaatattggattctcttagtccattcgttgatggtttgaagttctctggcggatgccatagtttgatgggaaaggagttggttagagagatcactgatctagcacacaggcatgacatttatgtgagcacaggtgattgggcagagcatttgctgcgccaaggaccctcttctttcaagcaatatgtagaggaatgcaaggccttagggtttgacacaattgagctgaatgctgggtctctcaacctccctgaagaggctctgttgagactagtccgcctcatcaagagtagtggtttaagggcaaagccaatgttttcggtgaagtttgacagttctgatattcctgcgtctggtgatagggcctttggggcttacatagctccagtcaaagggaagacctcagaaagagttgaagatgttgacctgctgattaggagggcagagagatgcttggaagcaggcgctgatatgatcatgatcgatgctgatgatgtttgccagcgtgctgaatctctgaggacagacatcatcgccaagattgtaggccggctcgggcttgataaaaccatgtttgaagcttccaactccaacacctcggagtggttcgtcagacgttatggcccaagggtaaatctctttgttgaacactctgacgtgatgaatctggagcgcctccggggcttcaacatgcgcagaagcaactcggcctcccgttttgcctcgccgttcttcctgatctaatgggctaatggccattccccttcctgagatgtgtaagatacttctacatgttctcaccctcgcagagcttgttatggcctagagatgtaaccgcctttgttaatgcctcgatgtagcccccagcgagcagcgcatagcacctgttatgttgtcagcgtcgctactgataatcggttctgttggtcaatgctactataataatcggttgtggtgcaagtaatgtgaatagtgtaagagtgttttgtgtttc

SEQ ID NO: 4459 - protein, 360 aa, Zea mays subsp. mays
  peptide (1)..(360): Ceres Seq. ID no. 12566546
TTRHCRGPALVSRSSRELPPPSSRAFSRATERSVRAVHHSERERQRRRAQPSERERTATAEMMGWGEEVVALSLRGYGYGNEEDDRPEKPRRYGVTEMRSPFYSFRPANQALQEILDSLSPFVDGLKFSGGCHSLMGKELVREITDLAHRHDIYVSTGDWAEHLLRQGPSSFKQYVEECKALGFDTIELNAGSLNLPEEALLRLVRLIKSSGLRAKPMFSVKFDSSDIPASGDRAFGAYIAPVKGKTSERVEDVDLLIRRAERCLEAGADMIMIDADDVCQRAESLRTDIIAKIVGRLGLDKTMFEASNSNTSEWFVRRYGPRVNLFVEHSDVMNLERLRGFNMRRSNSASRFASPFFLI

SEQ ID NO: 4460 - protein, 299 aa, Zea mays subsp. mays
  peptide (1)..(299): Ceres Seq. ID no. 12566547
MMGWGEEVVALSLRGYGYGNEEDDRPEKPRRYGVTEMRSPFYSFRPANQALQEILDSLSPFVDGLKFSGGCHSLMGKELVREITDLAHRHDIYVSTGDWAEHLLRQGPSSFKQYVEECKALGFDTIELNAGSLNLPEEALLRLVRLIKSSGLRAKPMFSVKFDSSDIPASGDRAFGAYIAPVKGKTSERVEDVDLLIRRAERCLEAGADMIMIDADDVCQRAESLRTDIIAKIVGRLGLDKTMFEASNSNTSEWFVRRYGPRVNLFVEHSDVMNLERLRGFNMRRSNSASRFASPFFLI

SEQ ID NO: 4461 - protein, 298 aa, Zea mays subsp. mays
  peptide (1)..(298): Ceres Seq. ID no. 12566548
MGWGEEVVALSLRGYGYGNEEDDRPEKPRRYGVTEMRSPFYSFRPANQALQEILDSLSPFVDGLKFSGGCHSLMGKELVREITDLAHRHDIYVSTGDWAEHLLRQGPSSFKQYVEECKALGFDTIELNAGSLNLPEEALLRLVRLIKSSGLRAKPMFSVKFDSSDIPASGDRAFGAYIAPVKGKTSERVEDVDLLIRRAERCLEAGADMIMIDADDVCQRAESLRTDIIAKIVGRLGLDKTMFEASNSNTSEWFVRRYGPRVNLFVEHSDVMNLERLRGFNMRRSNSASRFASPFFLI

SEQ ID NO: 4462 - DNA, 1430 bp, Zea mays subsp. mays
  misc_feature (1)..(1430): Ceres Seq. ID no. 12386925
  misc_feature (1)..(1430): Ortholog of  Ceres SEQ ID NO 13595861 as cited in SEQ ID NO 58153
  misc_feature (1)..(1430): Ortholog of  Ceres SEQ ID NO 13584292 as cited in SEQ ID NO 63687
gctctaaaaagtccaactccaaacctagactagaggcccctcaccgaggcgacgacgcacgcagccgagcgccactccgccgccgccgcctcctcctcgtccccgtcccgcgccgcaacggcctcccccaccctgcgcccgccggccgcccctcgacgggtcgagcggagcggggaacccatccgtccggccgttggtcgctctcgctcgtctggtgttggttgtaatgagaagctggacctgttaggccgaagagttctcgttgcaagtctgtgcctcagcgatgggttcaggcaacttgatcgtgaagaaggtggtaaagcacagctcctttgatctggacatacagcttgataagagttggatggaggatgttacctgcccgatctgccttgattaccctcacaatgcagtgctactgaggtgcacgtcttatgagaagggatgcaggccgtttgtttgcgatacagaccagacccgctcaaactgtcttgagaggtttaaatctgcatatgaactgccttccaatgtgaaagtttcatctttagccgtgcctcctcttgatagcattattcatattgtgccgtctaacgcaaacaaccgccccagctgccctttgtgtagaggtgatgttattgggtgggttgttattggtgaggctcggctgcatcttaatcagaagaaaaggtgctgtgaagaggattgctgctcgtttgttggcaacttcaatgagcttcagaagcacacgcaacaaaagcatcctgattcacgcccttcagagatcgatcctgctaggcaagttgattgggagaatttccagcaatcttctgatatcgtagatgtcttgagcacaatacatgcacaagttccaaacgggattgttctgggagactatgtgattgagtatggggatgatgacactggtgaggactatgaagttttccgcagggtcaggacgaactggtggtcatgtattttctgcagggcgttttcaagatcttcaagaagtcgtagaagatccagagcaagggaaagaataggcagtggaaggaggaatggcaaccaggttaatctagaaaattttaacctcgtggttccgacacaacctgttgaattaagggaaattaggtttgatgaaattgatgatgaatacatagtcacaggggccattcctagtatcgcagcaccgggaagaatggctagtttccattacagggatacaagatatggacgttgatgcatagggtctgcagtaaaaaaaggaatagatgttatgcaatttaccgatcaacgtaacgttgtaactccgctcatttggattccttccacctgccctcggtaggtgctgccgcagttcaaacttatctgtgcataaaaagtagcaacagaacctcgctgttcgtttgaatcaggcctcgtcattctagttc

SEQ ID NO: 4463 - protein, 317 aa, Zea mays subsp. mays
  peptide (1)..(317): Ceres Seq. ID no. 12386926
MGSGNLIVKKVVKHSSFDLDIQLDKSWMEDVTCPICLDYPHNAVLLRCTSYEKGCRPFVCDTDQTRSNCLERFKSAYELPSNVKVSSLAVPPLDSIIHIVPSNANNRPSCPLCRGDVIGWVVIGEARLHLNQKKRCCEEDCCSFVGNFNELQKHTQQKHPDSRPSEIDPARQVDWENFQQSSDIVDVLSTIHAQVPNGIVLGDYVIEYGDDDTGEDYEVFRRVRTNWWSCIFCRAFSRSSRSRRRSRARERIGSGRRNGNQVNLENFNLVVPTQPVELREIRFDEIDDEYIVTGAIPSIAAPGRMASFHYRDTRYGR

SEQ ID NO: 4464 - protein, 290 aa, Zea mays subsp. mays
  peptide (1)..(290): Ceres Seq. ID no. 12386927
MEDVTCPICLDYPHNAVLLRCTSYEKGCRPFVCDTDQTRSNCLERFKSAYELPSNVKVSSLAVPPLDSIIHIVPSNANNRPSCPLCRGDVIGWVVIGEARLHLNQKKRCCEEDCCSFVGNFNELQKHTQQKHPDSRPSEIDPARQVDWENFQQSSDIVDVLSTIHAQVPNGIVLGDYVIEYGDDDTGEDYEVFRRVRTNWWSCIFCRAFSRSSRSRRRSRARERIGSGRRNGNQVNLENFNLVVPTQPVELREIRFDEIDDEYIVTGAIPSIAAPGRMASFHYRDTRYGR

SEQ ID NO: 4465 - DNA, 1539 bp, Zea mays subsp. mays
  misc_feature (1)..(1539): Ceres Seq. ID no. 12356198
  misc_feature (1)..(1539): Ortholog of  Ceres SEQ ID NO 14312844 as cited in SEQ ID NO 55601
  misc_feature (1)..(1539): Ortholog of  Ceres SEQ ID NO 14312866 as cited in SEQ ID NO 55630
  misc_feature (1)..(1539): Ortholog of  Ceres SEQ ID NO 13597376 as cited in SEQ ID NO 64002
  misc_feature (1)..(1539): Ortholog of  Ceres SEQ ID NO 13503573 as cited in SEQ ID NO 65402
  misc_feature (1)..(1539): Ortholog of  Ceres SEQ ID NO 13659615 as cited in SEQ ID NO 67248
agaagcacggcaatctcgatctcgttcgttcccctgagcggcagtcagtgcgagcgagcgcgcacacagacaactcatcctctcccctctctctctcacacacacacatccatcatcccatccctgtgacgggcgatccgagggcctaccgacgatggtgtccgccgtgctccggaccatcctcgtgacgggcggcgccgggtacatcggcagccacacggtgctgcagctgctgcagcagggcttccgcgtcgtcgtcgtcgacaacctcgacaacgcctccgaggccgccctcgcccgcgtcgccgagctcgccgggcacgacggcgccaacctcgtcttccacaaggttgaccttcgcgacaggcacgcgttggtggacatcttctcgtcgcacaggttcgaggctgtcattcactttgctgggctcaaggctgttggggagagcgtgcacaagcccctgctttactacgacaacaacctggtcggcaccatcaccctcctggaggtgatggctgcgaatggctgcaagaagctggtgttctcgtcatctgcaactgtctatgggtggcccaaggaagtaccatgcaccgaagaattcccgctctgcgccaccaatccctatgggcggacaaagcttgtgattgaagacatctgccgcgacgtccaccgctccgacccggactggaagatcatactgctcaggtacttcaaccccgttggcgctcatccaagcgggtacatcggcgaagacccctgcggtgtcccgaacaacctgatgccctacgtgcagcaagtcgctgttgtgaggttacctcacctcacggtctacgggacggactacagcaccaaggatgggactggggtgcgtgattacatccacgttgtcgacctggctgacggccacatagcagccctgaggaagctccacgaagactccgacaaaataggctgtgaagtgtacaacttggggactggaaaggggacgtcggtgttggaaatggtggctgcattcgagaaggcttctgggaagaaaatccctctgggtgttcgctgggcgaagacccggagacgcagagatcgtctacgccgcaactgccaaggcagagaaagagctcaaatggaaggccaagtacgggatcgaggagatgtgcagagatctgtggaactgggcgagcaagaacccgtacgggtacgctgggtcacgcgacaacagcaaatgaaccacccatccatgcatcccatcctgcagtaggagcaagcagcagccttatagcctatgctaccataattagtaactcatcaatcatgcatacataatcagccagtcatctgattaggggtactgcgatgggcctcgcttcttcagtgtatagagggaggaggaggggggtcatcttgatattctttttttttatcattcccgaatgattattattagtagccagttcgatattactccatggttggttgctagagaaggaataagctccattcatatacctaactaaagatatatatatacatgcattcactgtc

SEQ ID NO: 4466 - protein, 366 aa, Zea mays subsp. mays
  peptide (1)..(366): Ceres Seq. ID no. 12356199
MVSAVLRTILVTGGAGYIGSHTVLQLLQQGFRVVVVDNLDNASEAALARVAELAGHDGANLVFHKVDLRDRHALVDIFSSHRFEAVIHFAGLKAVGESVHKPLLYYDNNLVGTITLLEVMAANGCKKLVFSSSATVYGWPKEVPCTEEFPLCATNPYGRTKLVIEDICRDVHRSDPDWKIILLRYFNPVGAHPSGYIGEDPCGVPNNLMPYVQQVAVVRLPHLTVYGTDYSTKDGTGVRDYIHVVDLADGHIAALRKLHEDSDKIGCEVYNLGTGKGTSVLEMVAAFEKASGKKIPLGVRWAKTRRRRDRLRRNCQGRERAQMEGQVRDRGDVQRSVELGEQEPVRVRWVTRQQQMNHPSMHPILQ

SEQ ID NO: 4467 - protein, 247 aa, Zea mays subsp. mays
  peptide (1)..(247): Ceres Seq. ID no. 12356200
MAANGCKKLVFSSSATVYGWPKEVPCTEEFPLCATNPYGRTKLVIEDICRDVHRSDPDWKIILLRYFNPVGAHPSGYIGEDPCGVPNNLMPYVQQVAVVRLPHLTVYGTDYSTKDGTGVRDYIHVVDLADGHIAALRKLHEDSDKIGCEVYNLGTGKGTSVLEMVAAFEKASGKKIPLGVRWAKTRRRRDRLRRNCQGRERAQMEGQVRDRGDVQRSVELGEQEPVRVRWVTRQQQMNHPSMHPILQ

SEQ ID NO: 4468 - DNA, 919 bp, Zea mays subsp. mays
  misc_feature (1)..(919): Ceres Seq. ID no. 12412873
  misc_feature (1)..(919): Ortholog of  Ceres SEQ ID NO 14315626 as cited in SEQ ID NO 52943
  misc_feature (1)..(919): Ortholog of  Ceres SEQ ID NO 14302742 as cited in SEQ ID NO 66899
ttttctccagcaagtaccgctcggtgaaaggagctaaagttattattgatgcaaacacaggccgttccaggggctatggatttgtcaggtttggagacgacaacgacaaatctcatgccatgtctgaaatgaatggtgtatattgctctacgaggccaattcgtataggacctgcgactcccagaagatcttcaggtgattctggctcctcgactcctggtcattcagatggtgattcttctaacagaacggtatatgttggtgggcttgaccccaatgtcagtgaagatgaactgagaaaagcctttgccaaatatgatcttgcctctgtgaaaattcctctaggaaagcaatgtggctttgttcaatttgttagcagaactgatgctgaagaagcactacaaggattaaatggatcactcattggaaaccaggcagttcgcctttcatgggtccgcagcccatcgcataagcagtctaggggtgactccgtcaacaggaggaacaacatgtactatggcacaccattctacggcggatatggctatgcctccccggtgccacacccaaacatgtacgctgcagcgtatggcacgtacccgctatatggcaaccagcagctagtgagctagagagctcccctccgacgtgtcccctctgacgggaaacaaaggttttggtccggtgagcatagtagcgtcaggtgagaaggtgcctttataaggctgtcctaagaagtgggcgagatatgttgttgcatcgttatcgttatggtgcctgtaactgttgtgtgtgccgtgtgcgtccggaagaattggatggaatggaactcgtggcttgttgtagtacatcagagagtcatgttattctttcaagaaattttgacttggtaataaattaaactattgtttgtgcgtcc

SEQ ID NO: 4469 - protein, 209 aa, Zea mays subsp. mays
  peptide (1)..(209): Ceres Seq. ID no. 12412874
FSSKYRSVKGAKVIIDANTGRSRGYGFVRFGDDNDKSHAMSEMNGVYCSTRPIRIGPATPRRSSGDSGSSTPGHSDGDSSNRTVYVGGLDPNVSEDELRKAFAKYDLASVKIPLGKQCGFVQFVSRTDAEEALQGLNGSLIGNQAVRLSWVRSPSHKQSRGDSVNRRNNMYYGTPFYGGYGYASPVPHPNMYAAAYGTYPLYGNQQLVS

SEQ ID NO: 4470 - protein, 170 aa, Zea mays subsp. mays
  peptide (1)..(170): Ceres Seq. ID no. 12412875
MSEMNGVYCSTRPIRIGPATPRRSSGDSGSSTPGHSDGDSSNRTVYVGGLDPNVSEDELRKAFAKYDLASVKIPLGKQCGFVQFVSRTDAEEALQGLNGSLIGNQAVRLSWVRSPSHKQSRGDSVNRRNNMYYGTPFYGGYGYASPVPHPNMYAAAYGTYPLYGNQQLVS

SEQ ID NO: 4471 - protein, 167 aa, Zea mays subsp. mays
  peptide (1)..(167): Ceres Seq. ID no. 12412876
MNGVYCSTRPIRIGPATPRRSSGDSGSSTPGHSDGDSSNRTVYVGGLDPNVSEDELRKAFAKYDLASVKIPLGKQCGFVQFVSRTDAEEALQGLNGSLIGNQAVRLSWVRSPSHKQSRGDSVNRRNNMYYGTPFYGGYGYASPVPHPNMYAAAYGTYPLYGNQQLVS

SEQ ID NO: 4472 - DNA, 1847 bp, Zea mays subsp. mays
  misc_feature (1)..(1847): Ceres Seq. ID no. 12344025
  misc_feature (1)..(1847): Ortholog of  Ceres SEQ ID NO 13495070 as cited in SEQ ID NO 53216
  misc_feature (1)..(1847): Ortholog of  Ceres SEQ ID NO 15176717 as cited in SEQ ID NO 0
  misc_feature (1)..(1847): Ortholog of  Ceres SEQ ID NO 15179618 as cited in SEQ ID NO 0
gtaacttagccgtattgatatatgcactgatgactggccagaggcgacgatggagacggtctgctagttcaagttctacttccttccgcggccgcacgcgcgtcgttcgacgaattgccggagccagctgaaaatcgccggaggtgctctcggcggtcctggcctgattctctaccgacgcgagctgtggtcagtagccacgtctgtatatccacgtctagctggccatctttgcaccctccccacgtccatggaccctccaagaggtggagcttccacctccagtgaattagaagaacacagcagtggtagggtgccctggtgagcgctcatcatcctctgtgatgacgatgatgatgacaaaagagaggtcatttgttgctaagtcgagacggatgagtattgagtaggcggccttataggagcactaagatgttccgggcaaatttgtggcatttacacacatgctgttactgctgattcttctttaaaagccatggatgtatgtcaaataccacgacctccatggaggcaaacaagaatcaaggaagtcaaattacaccgatttggcaaacaagtactatgatcttgtcactggcttttacgaatatggatggggcgactcattccatcttgctggcggatatccgggtgagacttcccgtgaagccattaagcggcaccagcattttttggcactacaattggggctcaagaagggtatgaaggttttggatgtgggatgtggaattgggggacctttaatagaaatcgccagattcaggcaatgatctgcaataatgtttcattgcccattcaatcaataaattccaacaataatgaagaacatacatacatatatatatatatgtgtgtgtgtgaattttcaattctgtttattgtagctcaacatcgataactggactgaacaacaatgactaccacatctcaaggggcaaggagctcattttttcagcaggtttgagtgagcaatgctgcttcttgaagggggacttcatggacatgccaatatctgataacacctttgatgcggcctatgcaatacaggctacatgtcatgcaccagatgcacaaggcgtctatagtgaggtctaccgtgtgctgaaacctgggcagtattttgcactggatgaatggtgcttgaccgaccgatttgatcccaacaacgccaagcatttggccatcaaggctgagattgagctcggtgatggcctacctgacatccgtaccactcgccaatgtgtccaagctatgaaagatgcaggatttgaggtcgtttttgcaaaggatcttgctcaagtttttccttgcccgtggtaccgggtgatggatcccacctacttttcatgggctcacttccaatgcacacgcccaggacggatcgtcacccgtgcaattgtcaatacactagagttcctccgtattgccccagcaggcagcatgggagcctacaacgtcctgatgagtgcctctgatggccttctaaaaggtggccgggaaggtatcttcacagcgaccttcttcgtcctgggccgcaagcctctcaaggaagttgatatagtaagcctctcaaggaagttgatatagtgaacggcggcgtcctttgagctgcaagattagtatggggctgtactcataagagctatgaatcatggccaacgtgttctgtgctgaggtgtgtttactggattgtcttatgggttatggcccttgcgctgtgtgctggcctgctgggtcatgttcccgcagtagcctgtatctgcttgtcagcttgtgtgctgtgtactatgcactatctgaataaaaatgcagttttacgcattgtt

SEQ ID NO: 4473 - protein, 196 aa, Zea mays subsp. mays
  peptide (1)..(196): Ceres Seq. ID no. 12344026
MDMPISDNTFDAAYAIQATCHAPDAQGVYSEVYRVLKPGQYFALDEWCLTDRFDPNNAKHLAIKAEIELGDGLPDIRTTRQCVQAMKDAGFEVVFAKDLAQVFPCPWYRVMDPTYFSWAHFQCTRPGRIVTRAIVNTLEFLRIAPAGSMGAYNVLMSASDGLLKGGREGIFTATFFVLGRKPLKEVDIVSLSRKLI

SEQ ID NO: 4474 - protein, 194 aa, Zea mays subsp. mays
  peptide (1)..(194): Ceres Seq. ID no. 12344027
MPISDNTFDAAYAIQATCHAPDAQGVYSEVYRVLKPGQYFALDEWCLTDRFDPNNAKHLAIKAEIELGDGLPDIRTTRQCVQAMKDAGFEVVFAKDLAQVFPCPWYRVMDPTYFSWAHFQCTRPGRIVTRAIVNTLEFLRIAPAGSMGAYNVLMSASDGLLKGGREGIFTATFFVLGRKPLKEVDIVSLSRKLI

SEQ ID NO: 4475 - protein, 111 aa, Zea mays subsp. mays
  peptide (1)..(111): Ceres Seq. ID no. 12344028
MKDAGFEVVFAKDLAQVFPCPWYRVMDPTYFSWAHFQCTRPGRIVTRAIVNTLEFLRIAPAGSMGAYNVLMSASDGLLKGGREGIFTATFFVLGRKPLKEVDIVSLSRKLI

SEQ ID NO: 4476 - DNA, 1768 bp, Zea mays subsp. mays
  misc_feature (1)..(1768): Ceres Seq. ID no. 12357458
  misc_feature (1)..(1768): Ortholog of  Ceres SEQ ID NO 15171040 as cited in SEQ ID NO 55332
accggtgacgaagccttccgtgtcatcaggatcgcagggttttgtttcgtttcgcgggcgttgggaatccatccatggcgaggaagatgctcatcgacggggaggtggcggccgtcgcggatggtgggcactatgactacgatctcttcgtcatcggggcgggcagcggcggtgttcgcggctctcgcaccgccgcctccttcggagctaaggttgcgatttgtgagctcccattccaccccatcagctcagagtggctaggaggacatggtgggacttgcgtgatacgtggttgcgtacctaaaaagatactcgtgtatggtgcatcattccgtggagaatttgaggattcgataattttgggtgggagattaacggagatattaacttcaattggaaaacgctattggaaaataagactaaagaaattgttagattaaatggtgtgtatcagaggatccttaccagtgccggtgtgacaatgattgaaggggcaggcagtctagttgatgctcatactgttgaagttagccagcccgatggttcaaagcaaaggtataccgcgaagcacattttgatcgcgactggtagccgtgctcaacgtgtcaacatacctggaaaggatctggctattacttctgatgaggccttgagcttggaggagcttccaaagcgcgctgtaatcctgggtggcggatatattgctgttgaatttgcttctatctggagggggatgggtgctgaagtagatttgttttatcgaagagatcttcctctaagaggttttgatgatgagatgagagctattgttgcaagcaaccttgagggaaggggaatcaagttgcatccagggacaaatctctctgagttgagtaaaacggctgacggaataaaagttgtaactgataaaggagaagagctcattgcagatgttgtcctatttgcgacagggcgcacaccaaactcccagagactgaacttgcaagctgcaggcgttgagattgaccgggttggagccatcaaggttgacgaatattctcgtacttctgctcctagtgtatgggctgtgggtgatgtaacaaaccggattaatttaacacctgttgcattaatggaggcaacttgctttgctaaaactgtgtttggtggccagcaagttaagcctgatcacagagatgttccttgtgctgttttctccattccaccactatctgtagtgggcctcagcgaagaacaggccttggaggaagccaatggtgatattcttgttttcatctcatcattcaacccaatgaagaacagcatatccaagcgccaggagaagactatcatgaaactggtagttgatgctgaaactgacaaagtacttggtgcatccatgtgtggaccagacgcacctgaaattatccagggcatcgctattgcggttaaatgtggagccaccaaagcagacttcgacagcactgtcggaatccacccttccgctgctgaagagttcgtgaccatgcgcaccgtgacaaggcgcttgagcccgacatccaagccaaagacgaacttgtaagcaagaaattggtgttttgggggaatgttacaccggacaaatacactggtttcatcacgttggtaatttttacgtcattggaactggaaccatgtatattgaaggaataagtttttttttcatggcaacacaccgaaaataatgagaccatggattttcttgatacaaataatgagctcaagcagagaacgtttatggttggttctc

SEQ ID NO: 4477 - protein, 359 aa, Zea mays subsp. mays
  peptide (1)..(359): Ceres Seq. ID no. 12357459
MIEGAGSLVDAHTVEVSQPDGSKQRYTAKHILIATGSRAQRVNIPGKDLAITSDEALSLEELPKRAVILGGGYIAVEFASIWRGMGAEVDLFYRRDLPLRGFDDEMRAIVASNLEGRGIKLHPGTNLSELSKTADGIKVVTDKGEELIADVVLFATGRTPNSQRLNLQAAGVEIDRVGAIKVDEYSRTSAPSVWAVGDVTNRINLTPVALMEATCFAKTVFGGQQVKPDHRDVPCAVFSIPPLSVVGLSEEQALEEANGDILVFISSFNPMKNSISKRQEKTIMKLVVDAETDKVLGASMCGPDAPEIIQGIAIAVKCGATKADFDSTVGIHPSAAEEFVTMRTVTRRLSPTSKPKTNL

SEQ ID NO: 4478 - protein, 275 aa, Zea mays subsp. mays
  peptide (1)..(275): Ceres Seq. ID no. 12357460
MGAEVDLFYRRDLPLRGFDDEMRAIVASNLEGRGIKLHPGTNLSELSKTADGIKVVTDKGEELIADVVLFATGRTPNSQRLNLQAAGVEIDRVGAIKVDEYSRTSAPSVWAVGDVTNRINLTPVALMEATCFAKTVFGGQQVKPDHRDVPCAVFSIPPLSVVGLSEEQALEEANGDILVFISSFNPMKNSISKRQEKTIMKLVVDAETDKVLGASMCGPDAPEIIQGIAIAVKCGATKADFDSTVGIHPSAAEEFVTMRTVTRRLSPTSKPKTNL

SEQ ID NO: 4479 - protein, 254 aa, Zea mays subsp. mays
  peptide (1)..(254): Ceres Seq. ID no. 12357461
MRAIVASNLEGRGIKLHPGTNLSELSKTADGIKVVTDKGEELIADVVLFATGRTPNSQRLNLQAAGVEIDRVGAIKVDEYSRTSAPSVWAVGDVTNRINLTPVALMEATCFAKTVFGGQQVKPDHRDVPCAVFSIPPLSVVGLSEEQALEEANGDILVFISSFNPMKNSISKRQEKTIMKLVVDAETDKVLGASMCGPDAPEIIQGIAIAVKCGATKADFDSTVGIHPSAAEEFVTMRTVTRRLSPTSKPKTNL

SEQ ID NO: 4480 - DNA, 1244 bp, Zea mays subsp. mays
  misc_feature (1)..(1244): Ceres Seq. ID no. 12566552
  misc_feature (1)..(1244): Ortholog of  Ceres SEQ ID NO 14310443 as cited in SEQ ID NO 54695
  misc_feature (1)..(1244): Ortholog of  Ceres SEQ ID NO 13596354 as cited in SEQ ID NO 68027
cgaccctcgcgccttcgcgagtctctctctttctctcgagtctcgacacaccacagcggaagcggctcgactcgctgagtgacaagacgcgacgcgacgccaagccaagaccaaattaccaaaccctaccccttcgccgcgaccgcgatcccccacatcgttggcgatgagctcctcctccaacagcgggaagaagccggcgcccgccggcggccgcggggggcccaccatccgcacgctcgccgacataaaccgtggccctgccggtttcccaggtgccggaggcggcagcagcgatgacgacgagccccaggagtactacaccggcggcgagaagagtggaatgcttgttcaagatccaacaagaagaaatgacgtggatgcaatatttgaacaagcaagacaggcgggcgctatccatggaatgcccccttttcttggtggcgagtcttccagctctaggagctttactgggactggccgacttcttacaggggagacagtaccatctgctgcacctcaggaaccagtaccaattcgaatacgccacaatatacatttgtggaacaatggctttactgtggatgatggtccactgagatactacgatgatcctgaaaatgaagagttccttgagagccttaagatgtcaaagtgccccaaggagctggtgcctactgatggagaacatgttgatgtgtctgttattaaaaggatggaagattaccgggaacctgtaaggcctcaatcagctttccagggtgttggaagaacccttggtggtggaccttccccagatgagagtgcaacacctgctcctgcaccagcggcccctgctgcttcgaggtccgctggcatagtcgtggatgactcccagccatttacatccatacagctgaggctggctgacggcactcgcatggtcgcccggttcaacatgcaccacaccgtgggagacatcaggtccttcatcgacgcatctcggcctggaaccgcaaggccgtatcagctgcagacaggtttcccacccaagcagctggctgacccaacgcagaccgtggtgcaagctgggctggcaaactcggttatcatgcagaagatgtaatgtttcgacaacatgggtaactaggatgcatcgtactgcatcttttgagaactgtcttattgtggttgacatactgctctggtgcgtcattcatggtcttaatagtttatagttcatctatgaactgaattatgcttcc

SEQ ID NO: 4481 - protein, 312 aa, Zea mays subsp. mays
  peptide (1)..(312): Ceres Seq. ID no. 12566553
MSSSSNSGKKPAPAGGRGGPTIRTLADINRGPAGFPGAGGGSSDDDEPQEYYTGGEKSGMLVQDPTRRNDVDAIFEQARQAGAIHGMPPFLGGESSSSRSFTGTGRLLTGETVPSAAPQEPVPIRIRHNIHLWNNGFTVDDGPLRYYDDPENEEFLESLKMSKCPKELVPTDGEHVDVSVIKRMEDYREPVRPQSAFQGVGRTLGGGPSPDESATPAPAPAAPAASRSAGIVVDDSQPFTSIQLRLADGTRMVARFNMHHTVGDIRSFIDASRPGTARPYQLQTGFPPKQLADPTQTVVQAGLANSVIMQKM

SEQ ID NO: 4482 - protein, 253 aa, Zea mays subsp. mays
  peptide (1)..(253): Ceres Seq. ID no. 12566554
MLVQDPTRRNDVDAIFEQARQAGAIHGMPPFLGGESSSSRSFTGTGRLLTGETVPSAAPQEPVPIRIRHNIHLWNNGFTVDDGPLRYYDDPENEEFLESLKMSKCPKELVPTDGEHVDVSVIKRMEDYREPVRPQSAFQGVGRTLGGGPSPDESATPAPAPAAPAASRSAGIVVDDSQPFTSIQLRLADGTRMVARFNMHHTVGDIRSFIDASRPGTARPYQLQTGFPPKQLADPTQTVVQAGLANSVIMQKM

SEQ ID NO: 4483 - protein, 226 aa, Zea mays subsp. mays
  peptide (1)..(226): Ceres Seq. ID no. 12566555
MPPFLGGESSSSRSFTGTGRLLTGETVPSAAPQEPVPIRIRHNIHLWNNGFTVDDGPLRYYDDPENEEFLESLKMSKCPKELVPTDGEHVDVSVIKRMEDYREPVRPQSAFQGVGRTLGGGPSPDESATPAPAPAAPAASRSAGIVVDDSQPFTSIQLRLADGTRMVARFNMHHTVGDIRSFIDASRPGTARPYQLQTGFPPKQLADPTQTVVQAGLANSVIMQKM

SEQ ID NO: 4484 - DNA, 1862 bp, Zea mays subsp. mays
  misc_feature (1)..(1862): Ceres Seq. ID no. 12344032
  misc_feature (1)..(1862): Ortholog of  Ceres SEQ ID NO 15177414 as cited in SEQ ID NO 57242
  misc_feature (1)..(1862): Ortholog of  Ceres SEQ ID NO 13594151 as cited in SEQ ID NO 58886
ctcgttccctcgagaactgtaccatcacgcgccgcccgcccgcccttgattgagcagggactgggagagagggtgaaagggggcaagaaaacgcttcttgttgccgctgtgcttctgcggatccgtggctgcgcacgccggcggggaagaggagtcgctggcggcgcgcctccagtctttcttcacctccgtgctctccgggctcttcggccaggccgaggccgaggacgaggacgaagagatgcccacgcgcaaccacaacgctgccgcggctgccgctccgcagcatcaccatcacaaccgaggtggtgctcccgctcttggaaagagcaaggccgtgcccggccgagctgatgccatgaaccggcgagcccccctcggcgatattggcaacctcgtcagcgtccgcccagccgaagggaaacctcagctgcaggagcagatcaatcgccccatcacgcgaagcttcggcgctcagctcgtgaagaacgtgcaggcgaatgccgcaatcaagaatgccgcaatcctacccgcgaggcatgcgccgaggcaggaaaggaaggctcctgccaagcagccgcctcctgaggatgtcatagtactcagctccgactctgaacaaagcaggacgcagttggagagcagcgctagctccgtccggtcgaggaagaaggtcatcaacaccctttcttctgtgctctcggctcgctcaaaggctgcctgtggaatcactgacaagaggcggcaagtagtagtgatcgaagacatcgacaagttggacgtcaacaatgagctcgcagttgtggaatacattgaggacatctacacgttctacaagattgctcagcatgacagacggccatgtgattatatagacacccaagtcgagatcaaccctaagatgagggctatcctagctgattggataattgaagtacaccacaagttcgctctgatgccggagactctctacttgaccatgtacatcatcgatcagtacctctcgctgcaaccagtcctgcgaagggagctgcagctggtcggtgtttcagctatgctgatcgcctgcaagtacgaggagatttgggccccagaggtgaacgatttcattcttatatcagacagtgcatacagcagggagcagatcctttcgatggagaagggaatcctgaatagcctggagtggaacctcactgtccctacagtatacatgttccttgttcgttttctgaaggcggcaaccttgggcaacaaagttgagaaagagatggagaatatggtcttcttcttcgctgaactggcgctgatgcagtacggcttggtgacgcggctgccttcgctggtcgctgcttcggttgtctacgcagccaggctcactctcaagagggctcccctctggaccgacaccctcaagcaccacacgggcttcagagagtcagagacagagctaatcgagtgcacgaagttgctggtcagcgcacactcgtccaccgctgacagcaagctgaggtctgtatacaagaagtattccagtgagcagttcggaggtgtcgcgcttcgcccacccgcagccgcagtggagatcaagtaaacgaagataacttcgtgctagtgtttgttagtataatgtaatggaaggcgagcctgacattcgctagggtctatccgtctatgtttgcttgtcggggtagtcaagaaagtttgaatgcttgaggcagccgtttgtttggtaggctgttctcagagtccaggtgttatctgacttgtgatggcatgttgtgtttcatgtgatggatatcattagaatcctaatctagtacgatatctattcatgaatataaatggtatttattcatttgttc

SEQ ID NO: 4485 - protein, 449 aa, Zea mays subsp. mays
  peptide (1)..(449): Ceres Seq. ID no. 12344033
MPTRNHNAAAAAAPQHHHHNRGGAPALGKSKAVPGRADAMNRRAPLGDIGNLVSVRPAEGKPQLQEQINRPITRSFGAQLVKNVQANAAIKNAAILPARHAPRQERKAPAKQPPPEDVIVLSSDSEQSRTQLESSASSVRSRKKVINTLSSVLSARSKAACGITDKRRQVVVIEDIDKLDVNNELAVVEYIEDIYTFYKIAQHDRRPCDYIDTQVEINPKMRAILADWIIEVHHKFALMPETLYLTMYIIDQYLSLQPVLRRELQLVGVSAMLIACKYEEIWAPEVNDFILISDSAYSREQILSMEKGILNSLEWNLTVPTVYMFLVRFLKAATLGNKVEKEMENMVFFFAELALMQYGLVTRLPSLVAASVVYAARLTLKRAPLWTDTLKHHTGFRESETELIECTKLLVSAHSSTADSKLRSVYKKYSSEQFGGVALRPPAAAVEIK

SEQ ID NO: 4486 - protein, 410 aa, Zea mays subsp. mays
  peptide (1)..(410): Ceres Seq. ID no. 12344034
MNRRAPLGDIGNLVSVRPAEGKPQLQEQINRPITRSFGAQLVKNVQANAAIKNAAILPARHAPRQERKAPAKQPPPEDVIVLSSDSEQSRTQLESSASSVRSRKKVINTLSSVLSARSKAACGITDKRRQVVVIEDIDKLDVNNELAVVEYIEDIYTFYKIAQHDRRPCDYIDTQVEINPKMRAILADWIIEVHHKFALMPETLYLTMYIIDQYLSLQPVLRRELQLVGVSAMLIACKYEEIWAPEVNDFILISDSAYSREQILSMEKGILNSLEWNLTVPTVYMFLVRFLKAATLGNKVEKEMENMVFFFAELALMQYGLVTRLPSLVAASVVYAARLTLKRAPLWTDTLKHHTGFRESETELIECTKLLVSAHSSTADSKLRSVYKKYSSEQFGGVALRPPAAAVEIK

SEQ ID NO: 4487 - protein, 229 aa, Zea mays subsp. mays
  peptide (1)..(229): Ceres Seq. ID no. 12344035
MRAILADWIIEVHHKFALMPETLYLTMYIIDQYLSLQPVLRRELQLVGVSAMLIACKYEEIWAPEVNDFILISDSAYSREQILSMEKGILNSLEWNLTVPTVYMFLVRFLKAATLGNKVEKEMENMVFFFAELALMQYGLVTRLPSLVAASVVYAARLTLKRAPLWTDTLKHHTGFRESETELIECTKLLVSAHSSTADSKLRSVYKKYSSEQFGGVALRPPAAAVEIK

SEQ ID NO: 4488 - DNA, 1487 bp, Zea mays subsp. mays
  misc_feature (1)..(1487): Ceres Seq. ID no. 12409925
  misc_feature (1)..(1487): Ortholog of  Ceres SEQ ID NO 13655915 as cited in SEQ ID NO 65188
aaaacctctcctgccgccgccgccatggagagtgcgccgcaaacccccaccatggcggccgccggcgatgtccttcgcgtggccgacctcccgggacgaggtcgcggtctcgttgccgcccgcatcgtccgcgagggtgaggtgctcttctccgagcctcccgtcctcctctacccgtcgactctctcctccctccgctcctactgctccgcctgcttccgctccctcacccccgccgccacgattccctgcgtttcctgccgcgccgctgccttctgctccccggcctgcgccgccgcttcgcacccgcacctcctctgtgccgcgctctcccacggcggcggcgctggcctcgccgccgccgcccccaccgaggcgatccaagagccgctcctcttcctcctctccgcctactccctcccggagtcaaccatgcgctccatgctctctctctcctcggcgccgcccccgcccccgggcgcgcaggacgccgcggggctccatgctgctgtggcagccctagcgccgccgcacatgcttccccagggcttgtcgccagacctaacggcggctctcctcgccaaggaccggggcaatagcttcgccatcatggagccgtaccgacacgggatgtcgctcgagctcctgaaggcgcgggcctacgcagtctacccccgtgcttcgctgttcaaccatgactgcctgcccaatgcgtgccatttcgattaccccgacaggcctgggccagggaacactgacattgtggtgcgtgcactccatgacatacccgaggggagggaggtctgcatcagctactttgcggctaattggaggtatgctgataggcagcgcaggctgctggaggattatggattccggtgcgagtgtgatcgctgtcaggtggagagtcagtggaaggatgatgatgataacaatggagatgatggggatgacaccatggaagaggaggatgaggatgatgctggagatagaggtgatgatgggattgaggaggaagagggggatggtgctaccaatggcggtgatgatgatttcccacatgcctacttctttgtcaggtacttatgtgacaatgagggttgttggggtatgcttgctccattgccaccctcaccaaacggggacctgtcccatgtgtttgaatgcaatctctgtgggaagctgaggaaggaagaggatgtcattcctgatgagggcacttctggcatggtccattagtttgatgaaaacatactgatccatgtgctgcttcttttagtgggagtcagggaagtctgttgtttaaatctactgactgaagtatcccagctccaatgagaggctgcaataataaaaatccaaaaggttaagagtgagtatggtcctaataaggcatcaaaatgtcttttttgtagagaagatagccatatgcagactgtaatagcttcaaactagtttccaaagaaggataattatgactcaatttt

SEQ ID NO: 4489 - protein, 412 aa, Zea mays subsp. mays
  peptide (1)..(412): Ceres Seq. ID no. 12409926
KTSPAAAAMESAPQTPTMAAAGDVLRVADLPGRGRGLVAARIVREGEVLFSEPPVLLYPSTLSSLRSYCSACFRSLTPAATIPCVSCRAAAFCSPACAAASHPHLLCAALSHGGGAGLAAAAPTEAIQEPLLFLLSAYSLPESTMRSMLSLSSAPPPPPGAQDAAGLHAAVAALAPPHMLPQGLSPDLTAALLAKDRGNSFAIMEPYRHGMSLELLKARAYAVYPRASLFNHDCLPNACHFDYPDRPGPGNTDIVVRALHDIPEGREVCISYFAANWRYADRQRRLLEDYGFRCECDRCQVESQWKDDDDNNGDDGDDTMEEEDEDDAGDRGDDGIEEEEGDGATNGGDDDFPHAYFFVRYLCDNEGCWGMLAPLPPSPNGDLSHVFECNLCGKLRKEEDVIPDEGTSGMVH

SEQ ID NO: 4490 - protein, 404 aa, Zea mays subsp. mays
  peptide (1)..(404): Ceres Seq. ID no. 12409927
MESAPQTPTMAAAGDVLRVADLPGRGRGLVAARIVREGEVLFSEPPVLLYPSTLSSLRSYCSACFRSLTPAATIPCVSCRAAAFCSPACAAASHPHLLCAALSHGGGAGLAAAAPTEAIQEPLLFLLSAYSLPESTMRSMLSLSSAPPPPPGAQDAAGLHAAVAALAPPHMLPQGLSPDLTAALLAKDRGNSFAIMEPYRHGMSLELLKARAYAVYPRASLFNHDCLPNACHFDYPDRPGPGNTDIVVRALHDIPEGREVCISYFAANWRYADRQRRLLEDYGFRCECDRCQVESQWKDDDDNNGDDGDDTMEEEDEDDAGDRGDDGIEEEEGDGATNGGDDDFPHAYFFVRYLCDNEGCWGMLAPLPPSPNGDLSHVFECNLCGKLRKEEDVIPDEGTSGMVH

SEQ ID NO: 4491 - protein, 395 aa, Zea mays subsp. mays
  peptide (1)..(395): Ceres Seq. ID no. 12409928
MAAAGDVLRVADLPGRGRGLVAARIVREGEVLFSEPPVLLYPSTLSSLRSYCSACFRSLTPAATIPCVSCRAAAFCSPACAAASHPHLLCAALSHGGGAGLAAAAPTEAIQEPLLFLLSAYSLPESTMRSMLSLSSAPPPPPGAQDAAGLHAAVAALAPPHMLPQGLSPDLTAALLAKDRGNSFAIMEPYRHGMSLELLKARAYAVYPRASLFNHDCLPNACHFDYPDRPGPGNTDIVVRALHDIPEGREVCISYFAANWRYADRQRRLLEDYGFRCECDRCQVESQWKDDDDNNGDDGDDTMEEEDEDDAGDRGDDGIEEEEGDGATNGGDDDFPHAYFFVRYLCDNEGCWGMLAPLPPSPNGDLSHVFECNLCGKLRKEEDVIPDEGTSGMVH

SEQ ID NO: 4492 - DNA, 1672 bp, Zea mays subsp. mays
  misc_feature (1)..(1672): Ceres Seq. ID no. 12566560
  misc_feature (1)..(1672): Ortholog of  Ceres SEQ ID NO 13595351 as cited in SEQ ID NO 55934
  misc_feature (1)..(1672): Ortholog of  Ceres SEQ ID NO 13639645 as cited in SEQ ID NO 57488
aattccgctgcatacttgcattgcatctcatccctcctgctcctgcgtcctcctcctctatttctctcctgctgcttgctactacctcatcgatccattccatccatcgccgaggggggagggccgccgcccgcccgggtcgcatcgcatcgcccggtcggccggggactcggggcaggcgagcgacactagctataaaagacctcccgccgcctgcgactgggccgtgtgcaagcaaagcgcaaggccgatctggggttggagggccggccatggtgatgatgatgcggtcgtgcctcggcggcggcctgctaccggtggcggtcatgctctgcctcaacgtggtggcggcggtcatggtgtcgctcgtcaaggtggccatggacggcggcatgaaaccgctcgtgatcgtcaccctgcagcagctcaccgccgccgtcttcctcgcgccaatcgcattcttcaaggagaggaagtcgaggccaaagctgacgctggagatcttcgcctacatcttcgtcagtgcggcgctcggcctgcgccatatattgcagggcagctcttcgtcagtacatgatcttcgtggccctgcgctacaccacggccaccttcgtgaccgccttctccaacatcgcccccgtgctcaccttcctcctggccgtcgctacgcggtccgaagcgctggacctcaagagcaggacggggttggcgaagctgctgggcacgctggtgtcgctggccggcgccatggtgctcaccctctacaagggcgtggcgctcacccacgcggcggcagcctcgcaggaccaccagcagcactcccacggccggttgccgccgagcgccgccgacagccgcggcaagtggacgctgggcaccgtggccatcctgggcaactgcgtctgcctctcctgctggttcctgctccacggccgcctcgccaagaagtacccgcacgtctactcctgcaacgcgctcatgtccttgctcagcttcctccaggtcgccgtcgtcggcctctgcacccagcgcagcatctccccctggatcgtcaccagcaagttcaacatcctcaccgtcctatacgccggcatcgtcggctgcggcgtctcgttcgtgctggtgacatggtgcatcgagaagagaggagccgtgttcgtggccgccttcataccggtggtgcagatcatcgtctccgtcatcgacttctccatcctgcacgagcagctctacctcggaaggtacgcacggacacggtaccatgccatcactgaatggcaatcgacctgatcgaaagtgaagtcacctgctctgctctgctctgcttccccctttgtgctgtgcagcgtgctgggatcagtgctagtgataggtggcctttaccttctgctgtggggcaagaggcaggaggccctgcactgtcctcctcctcctccaaaggttgccgaagaagaccctgctgacaaagagcagcagcaagtgcagcacaactgaagacggacagcatcctctgactgtttggtcgtttggttgtaacagtgccagcaataagatctctctgcctccttttcttttcttttggtgtctcaggggggtgggcaatgttccttccttctcagatcgatcaccaacaaagtgtttagattctaatccaaaacagtagaatggtctt

SEQ ID NO: 4493 - protein, 423 aa, Zea mays subsp. mays
  peptide (1)..(423): Ceres Seq. ID no. 12566561
FRCILALHLIPPAPASSSSISLLLLATTSSIHSIHRRGGRAAARPGRIASPGRPGTRGRRATLAIKDLPPPATGPCASKAQGRSGVGGPAMVMMMRSCLGGGLLPVAVMLCLNVVAAVMVSLVKVAMDGGMKPLVIVTLQQLTAAVFLAPIAFFKERKSRPKLTLEIFAYIFVSAALGLRHILQGSSSSVHDLRGPALHHGHLRDRLLQHRPRAHLPPGRRYAVRSAGPQEQDGVGEAAGHAGVAGRRHGAHPLQGRGAHPRGGSLAGPPAALPRPVAAERRRQPRQVDAGHRGHPGQLRLPLLLVPAPRPPRQEVPARLLLQRAHVLAQLPPGRRRRPLHPAQHLPLDRHQQVQHPHRPIRRHRRLRRLVRAGDMVHREERSRVRGRLHTGGADHRLRHRLLHPARAALPRKVRTDTVPCHH

SEQ ID NO: 4494 - protein, 333 aa, Zea mays subsp. mays
  peptide (1)..(333): Ceres Seq. ID no. 12566562
MVMMMRSCLGGGLLPVAVMLCLNVVAAVMVSLVKVAMDGGMKPLVIVTLQQLTAAVFLAPIAFFKERKSRPKLTLEIFAYIFVSAALGLRHILQGSSSSVHDLRGPALHHGHLRDRLLQHRPRAHLPPGRRYAVRSAGPQEQDGVGEAAGHAGVAGRRHGAHPLQGRGAHPRGGSLAGPPAALPRPVAAERRRQPRQVDAGHRGHPGQLRLPLLLVPAPRPPRQEVPARLLLQRAHVLAQLPPGRRRRPLHPAQHLPLDRHQQVQHPHRPIRRHRRLRRLVRAGDMVHREERSRVRGRLHTGGADHRLRHRLLHPARAALPRKVRTDTVPCHH

SEQ ID NO: 4495 - protein, 331 aa, Zea mays subsp. mays
  peptide (1)..(331): Ceres Seq. ID no. 12566563
MMMRSCLGGGLLPVAVMLCLNVVAAVMVSLVKVAMDGGMKPLVIVTLQQLTAAVFLAPIAFFKERKSRPKLTLEIFAYIFVSAALGLRHILQGSSSSVHDLRGPALHHGHLRDRLLQHRPRAHLPPGRRYAVRSAGPQEQDGVGEAAGHAGVAGRRHGAHPLQGRGAHPRGGSLAGPPAALPRPVAAERRRQPRQVDAGHRGHPGQLRLPLLLVPAPRPPRQEVPARLLLQRAHVLAQLPPGRRRRPLHPAQHLPLDRHQQVQHPHRPIRRHRRLRRLVRAGDMVHREERSRVRGRLHTGGADHRLRHRLLHPARAALPRKVRTDTVPCHH

SEQ ID NO: 4496 - DNA, 1600 bp, Zea mays subsp. mays
  misc_feature (1)..(1600): Ceres Seq. ID no. 12409921
  misc_feature (1)..(1600): Ortholog of  Ceres SEQ ID NO 14315257 as cited in SEQ ID NO 52552
  misc_feature (1)..(1600): Ortholog of  Ceres SEQ ID NO 14314636 as cited in SEQ ID NO 56924
  misc_feature (1)..(1600): Ortholog of  Ceres SEQ ID NO 13594345 as cited in SEQ ID NO 58043
  misc_feature (1)..(1600): Ortholog of  Ceres SEQ ID NO 14314755 as cited in SEQ ID NO 59919
  misc_feature (1)..(1600): Ortholog of  Ceres SEQ ID NO 15171614 as cited in SEQ ID NO 60106
  misc_feature (1)..(1600): Ortholog of  Ceres SEQ ID NO 15168421 as cited in SEQ ID NO 60131
  misc_feature (1)..(1600): Ortholog of  Ceres SEQ ID NO 13597574 as cited in SEQ ID NO 64677
  misc_feature (1)..(1600): Ortholog of  Ceres SEQ ID NO 13597843 as cited in SEQ ID NO 64850
  misc_feature (1)..(1600): Ortholog of  Ceres SEQ ID NO 13597678 as cited in SEQ ID NO 65375
  misc_feature (1)..(1600): Ortholog of  Ceres SEQ ID NO 13596180 as cited in SEQ ID NO 67941
  misc_feature (1)..(1600): Ortholog of  Ceres SEQ ID NO 13591190 as cited in SEQ ID NO 68044
  misc_feature (1)..(1600): Ortholog of  Ceres SEQ ID NO 13595961 as cited in SEQ ID NO 68223
atcctgtttcttgccgcactagaaacgtcgatccagcaatggctgctaccccgaccatcgttctggtgcccgtctggggcattggccacttcgtaccaatgctcgaggtcggcaagcggctgctcgcacgcagcgcactgcccctcaccgtcaccgtgctcgtaatgccgttgcctgcagaggcgaagcgggcgtccgagatcaccgagcacatacgccagcaggaagcctccggcctcgccatccgcttccaccatctgccagcggtggaacccccaaccgaccactcgggcatcgaggagtacatatcccgctacgtgcagctgtactcgccccacgtcaaggcggccgtcgccggggttgacgtgcccggtggccggcgtcgttgtcgacatcttctgcacggcgctgttcgacgcggcgcaccagctcggcgtgcccggcctacgtgtacctgatcaccagcgccgcgatgtgcgcgctcttgctgcgctccccgacgctcgacgaggaggtagccgtcgaggtcgagttcgagcaaatggaaggcggagtggacgtgccagggctgccgccggtgccggcgtcctgcctgccgacggggctggagaacagaaagatcccgacctatcgctggttcctgtacaacggcaggcgctatatggaagcagcaggcatcatcgtcaacaccattgccgaggccgagccgcgcgtcctcgcggccatcgccgacgggcggtgcacgcgtggtgtcccggcacctccggtgtactcgatcgggccggtgatcccctccaccccgcccgccgagcagcaggcgcaggagtgcgtgcgctggctcgactcgcagcctccgagctccgtggtgttcctatgcttcggcagcggtggctgcttcacggcgccccaagcgcacgagatagcgcacggcctggaccgcagcgggcatcgattcctgtgggtgctgcgcgggacgccggagcccggcacgaagttgccctcggacgggaacctcgcggagctgcttccggcggatttcttggcgaggacgaaggatagagggctcgtgtggcctaccaaggcgccgcagaaggagatactcgcccacgccgccgtgggaggcttcgtcacgcactgtggctggaactcggtcctcgagagcctctggcatggcgtgccgatggtgccatggccgcttggcgccgagcagcactacaacgcgttcacgctggtggccgacatgggcgtcgccgtggcgctgaacgtggaaaggaagaggaagaatttcgtggaggcgaccgagctggagcgagcggttaaagctctgatgtgcgacggcgagacagcgaggaaggttagggacaaggtcatggagataaaagccgcgtgccggaaggcaatggaggagggcggatcatcgaacatgtcgttgcagaggctctgtgatgcgctcgtcgaaggcgcggtgcacccgggaaagtgatgcccacagagttcaatcaggaggctctgtccaccagccatccaatggtgtacatgtattctgttatgagttctctgtttttagagcaagttaaataatattttttatgagttctcg

SEQ ID NO: 4497 - protein, 336 aa, Zea mays subsp. mays
  peptide (1)..(336): Ceres Seq. ID no. 12409922
MCALLLRSPTLDEEVAVEVEFEQMEGGVDVPGLPPVPASCLPTGLENRKIPTYRWFLYNGRRYMEAAGIIVNTIAEAEPRVLAAIADGRCTRGVPAPPVYSIGPVIPSTPPAEQQAQECVRWLDSQPPSSVVFLCFGSGGCFTAPQAHEIAHGLDRSGHRFLWVLRGTPEPGTKLPSDGNLAELLPADFLARTKDRGLVWPTKAPQKEILAHAAVGGFVTHCGWNSVLESLWHGVPMVPWPLGAEQHYNAFTLVADMGVAVALNVERKRKNFVEATELERAVKALMCDGETARKVRDKVMEIKAACRKAMEEGGSSNMSLQRLCDALVEGAVHPGK

SEQ ID NO: 4498 - protein, 313 aa, Zea mays subsp. mays
  peptide (1)..(313): Ceres Seq. ID no. 12409923
MEGGVDVPGLPPVPASCLPTGLENRKIPTYRWFLYNGRRYMEAAGIIVNTIAEAEPRVLAAIADGRCTRGVPAPPVYSIGPVIPSTPPAEQQAQECVRWLDSQPPSSVVFLCFGSGGCFTAPQAHEIAHGLDRSGHRFLWVLRGTPEPGTKLPSDGNLAELLPADFLARTKDRGLVWPTKAPQKEILAHAAVGGFVTHCGWNSVLESLWHGVPMVPWPLGAEQHYNAFTLVADMGVAVALNVERKRKNFVEATELERAVKALMCDGETARKVRDKVMEIKAACRKAMEEGGSSNMSLQRLCDALVEGAVHPGK

SEQ ID NO: 4499 - protein, 273 aa, Zea mays subsp. mays
  peptide (1)..(273): Ceres Seq. ID no. 12409924
MEAAGIIVNTIAEAEPRVLAAIADGRCTRGVPAPPVYSIGPVIPSTPPAEQQAQECVRWLDSQPPSSVVFLCFGSGGCFTAPQAHEIAHGLDRSGHRFLWVLRGTPEPGTKLPSDGNLAELLPADFLARTKDRGLVWPTKAPQKEILAHAAVGGFVTHCGWNSVLESLWHGVPMVPWPLGAEQHYNAFTLVADMGVAVALNVERKRKNFVEATELERAVKALMCDGETARKVRDKVMEIKAACRKAMEEGGSSNMSLQRLCDALVEGAVHPGK

SEQ ID NO: 4500 - DNA, 1523 bp, Zea mays subsp. mays
  misc_feature (1)..(1523): Ceres Seq. ID no. 12363351
  misc_feature (1)..(1523): Ortholog of  Ceres SEQ ID NO 14301994 as cited in SEQ ID NO 56653
  misc_feature (1)..(1523): Ortholog of  Ceres SEQ ID NO 14304120 as cited in SEQ ID NO 58862
  misc_feature (1)..(1523): Ortholog of  Ceres SEQ ID NO 13595658 as cited in SEQ ID NO 59888
  misc_feature (1)..(1523): Ortholog of  Ceres SEQ ID NO 13661330 as cited in SEQ ID NO 61614
  misc_feature (1)..(1523): Ortholog of  Ceres SEQ ID NO 13596025 as cited in SEQ ID NO 62024
  misc_feature (1)..(1523): Ortholog of  Ceres SEQ ID NO 13662324 as cited in SEQ ID NO 62162
  misc_feature (1)..(1523): Ortholog of  Ceres SEQ ID NO 12625713 as cited in SEQ ID NO 64160
  misc_feature (1)..(1523): Ortholog of  Ceres SEQ ID NO 14303564 as cited in SEQ ID NO 65360
  misc_feature (1)..(1523): Ortholog of  Ceres SEQ ID NO 14301782 as cited in SEQ ID NO 66788
  misc_feature (1)..(1523): Ortholog of  Ceres SEQ ID NO 14313495 as cited in SEQ ID NO 0
  misc_feature (1)..(1523): Ortholog of  Ceres SEQ ID NO 15174373 as cited in SEQ ID NO 0
atttttccgtctcgccccaactgccgaccgccgccctcgccccggctcctccctttccctctagctagcaccaatcgttcatccagtctcacaaccgagctccccgaccaccagcacgcctcgcgcgtccctcccaacagcgtgctccagttccttcaatggcatctcgggcgcgcctgccgggcaccccggcctcgatcgccgtcctcatcctctccttcttccaaggtacgtacgtggtggctctgatccacttgcccgccgtggactgacgggctgcttgggtttgtgggtggtggtggatggaacccggtgcggcaccacgttcaccttcagcaaccgctgcggcgacacggtgtggccgggcctgctcgccggctcggggacgccgccgctggagaccacgggcttcgcgctggcgccggggcagtcgcgcgcgctgtacgcgccgcaggggtggtcgggccgcttctggggccgctccggctgcgacttcgacgccgcctccgccaagggctcctgcgccacgggcgactgcggctccggcgaggtcgagtgccgcggcgcgggggcgtccccgcccgccacgctcgccgagttcacgctcgacggcgccggcggcaaggacttctacgacgtcagcctcgtcgacggctacaacctgcccatgctcgtgcgggccaccgcgcccgaatgccccgacacggggtgcctcgtcgacctcaacgggctctgccccgacgagctccgcgccgcccacggccgcgcctgccgcagcgcctgcgaggcgttcggcagccccgagtactgctgcaacggcgcctacggcaaccccaacacctgccacccgtcacagtactcccagctcttcaagtcggcgtgccccaactcctacagctacgcctacgacgacgccacctccaccttcacctgcaaccacaccgattacaccatcaccttctgccccaaatccactccaaccagcgacaaatccgaacattcgtctcggaggccaagccacgagcaactggaagattcggtgtggcttgcatccttgaaggcaagtgacgccagtgctctggcaacaacgtcatggtcggcgtccattgtgctccgatctgccttggcaattgcagtggcgaccttgcttgctgcacaacttgcaccagatcatcctatggtcagcttgctatgattcatcatggttgcggttcttgatcggtaggagtcatctaagttattttctgacaagaagaggattagagcagtagcagtgatcagcaatgggaagagaatattgtgtaggctttttgtttgtggataggtgctagagaaggaatgatgtgttacaagttggcaactggaatttcatgaacgcattgcaaggcgattcaggttgctctgttgtcatcggcccctttttctatttttgcagtaaagcgcataaaaaacatctcgaatggatactgtaaccatttgatgtgcagaggttcacagagtaatgtgattttggttagaactcc

SEQ ID NO: 4501 - protein, 251 aa, Zea mays subsp. mays
  peptide (1)..(251): Ceres Seq. ID no. 12363352
MEPGAAPRSPSATAAATRCGRACSPARGRRRWRPRASRWRRGSRARCTRRRGGRAASGAAPAATSTPPPPRAPAPRATAAPARSSAAARGRPRPPRSPSSRSTAPAARTSTTSASSTATTCPCSCGPPRPNAPTRGASSTSTGSAPTSSAPPTAAPAAAPARRSAAPSTAATAPTATPTPATRHSTPSSSSRRAPTPTATPTTTPPPPSPATTPITPSPSAPNPLQPATNPNIRLGGQATSNWKIRCGLHP

SEQ ID NO: 4502 - protein, 175 aa, Zea mays subsp. mays
  peptide (1)..(175): Ceres Seq. ID no. 12363353
MLVRATAPECPDTGCLVDLNGLCPDELRAAHGRACRSACEAFGSPEYCCNGAYGNPNTCHPSQYSQLFKSACPNSYSYAYDDATSTFTCNHTDYTITFCPKSTPTSDKSEHSSRRPSHEQLEDSVWLASLKASDASALATTSWSASIVLRSALAIAVATLLAAQLAPDHPMVSLL

SEQ ID NO: 4503 - DNA, 1679 bp, Zea mays subsp. mays
  misc_feature (1)..(1679): Ceres Seq. ID no. 12435060
  misc_feature (1)..(1679): Ortholog of  Ceres SEQ ID NO 13662197 as cited in SEQ ID NO 63622
gcacgagaccattacctagaacatcctaatcgaaaaacattccatcggtcgtgaaaagaaaaagggaaacaaaccaagctagctagagaaaagaagaagctggtactagctagctagctagcttagctatgggcaccatcgtggacgctgacgtcgggttcgcggtgaagaggacgagcaggtcgctggtgccgcctgcgtcggcgacgccgcgggagacgctgcggctgtcggtgatcgaccgcgtggcggggctgcgccacctggtgcggtcgctgcacgtgttcgccgcgggcggcgacaagaagcggcagcaggcgacggcggcgacgccggccaaggcgctgcgggaggcgctggggaaggcgctggtggactactacccgttcgcggggcggttcgtggtggtggacgcggagggcggcggggagacgcgggtggcgtgcaccggcgagggcgcctggttcgtggaggccaacgccgcgtgctcgctcgaggaggcccgccacctcgaccaccccatgctcatccccaaggagcagctgctgccggagccctcgccggacgtcaacccgctggacatgccgctcatgatgcaggtgacggagttctcgtgcggcggcttccgtggtggggctcatctccgtgcacacgatcgcggacggcctgggcgcggggcagttcatcaacacggtggcgacgtacgcgcggggcgccacgtccgccacgcccaagcccgtgtggggcgcgcgacgtgatcccggacccgcccaagatgccggcgcctccgccgcgcctggacctgctggacctgcgctacttcacggcggacctgagcccggaccacatcggcaaggtgaaggcgcggtacctggagtcgacggggcagcgctgctcggcgttcgacgtgtgcgtggcgcgcacgtggcaggcccgcgtgcgcgcgctgcggctccccgacccggccgcgcccgtgcacgtctgcttcttcgccaacacccgccacctgcttccggcggcggccacggccgggttctacggcaactgcttctacacggtgaaggcgacgcgggcgagcggggaggtggcggcggccgacgtggtggacgttgtgcgcgccatccgcgacgccaaggcgaggctgggcgccgacttcgcgcgctgggccgcgggcggcttcgaccgcgacccctacgagctcaccttcacctacgactcgctcttcgtctccgactggacgcgcctcggcttcctcgaggcggactacggctggggcaccccgacgcacgtcctgcccttctcctaccacccgttcatggcagtcgccgtcatcggcgccccgcctaagcccaagcccggcgcccgcatcatgaccatgtgcgtccaggagcagcacctgcccgagttccaggagcagatgatgagccagcaggccgcctaggcctagctagctcctgatcacccccatcaccatgttcatctatatcgtcatcgtcatcatgcatgcggcgtgcacgtttggaatatttgttaatcaatcaataacggtgaggtgaggttgctattatatgaagtagtagtaacacctcaacaacaacaacccaatgcaatgggaactcgcgtgtaatttgctccttcttcttcaaatataattccgcctcaattgtatgtatgtatgt

SEQ ID NO: 4504 - protein, 221 aa, Zea mays subsp. mays
  peptide (1)..(221): Ceres Seq. ID no. 12435061
MPAPPPRLDLLDLRYFTADLSPDHIGKVKARYLESTGQRCSAFDVCVARTWQARVRALRLPDPAAPVHVCFFANTRHLLPAAATAGFYGNCFYTVKATRASGEVAAADVVDVVRAIRDAKARLGADFARWAAGGFDRDPYELTFTYDSLFVSDWTRLGFLEADYGWGTPTHVLPFSYHPFMAVAVIGAPPKPKPGARIMTMCVQEQHLPEFQEQMMSQQAA

SEQ ID NO: 4505 - protein, 209 aa, Zea mays subsp. mays
  peptide (1)..(209): Ceres Seq. ID no. 12435062
MGTIVDADVGFAVKRTSRSLVPPASATPRETLRLSVIDRVAGLRHLVRSLHVFAAGGDKKRQQATAATPAKALREALGKALVDYYPFAGRFVVVDAEGGGETRVACTGEGAWFVEANAACSLEEARHLDHPMLIPKEQLLPEPSPDVNPLDMPLMMQVTEFSCGGFRGGAHLRAHDRGRPGRGAVHQHGGDVRAGRHVRHAQARVGRAT

SEQ ID NO: 4506 - DNA, 2059 bp, Zea mays subsp. mays
  misc_feature (1)..(2059): Ceres Seq. ID no. 12593811
  misc_feature (1)..(2059): Ortholog of  Ceres SEQ ID NO 12626078 as cited in SEQ ID NO 69113
aatttgatcaaccgccatccattctcctcctccgttgcagctgcggcatccatccagtagtccgaccaatccatggcttcagcgttcgggaccgcctccacttgcggcattaaacatgcacctgccggcgttgcgcttgctgcgcccatgaagcacctttccctcgtctcgccctcgctggtttcgcttccgcgcaagatgaggccgcgaaggaagtacaacttcagggtaaacgctgcaaaggagctgcatttcaacaaggatggctcggctatcaggaaaatgcaaaatggggtcaacaagcttgcagatctcgtcggggttactcttggaccaaaggggcgaaatgtagtcctcgaaagcaagtatggctcacctaaaattgtcaatgatggtgtcactgtggcaaaggaggttgaacttgaggaccctgttgaaaatattggtgctaaattggtccgccaagctgctgctaaaacaaatgacttggctggtgatgggacaaccacttcggttgtccttgctcaagggatgattactgagggtgtaaaggttgtagctgctggtgctaatccagtgcagatcacccgtggtattgagaaaacagccaaagcactagtcagtgaactccaaaagatgtccaaggaggttgaggacagtgagcttgctgatgttgctgcagttagtgcgggaaataactatgaaattgggaatatgataactgaggctatgaaaaaggttgggcggcagggagtggtcacacttgaagaaggaaagagtgctgaaaataacctctattctgttgagggaatgcagtttgaccgtggctatatttctccctactttgtgactgacagtgaaaaaatgacagtcgagtatgagaactgcaagcttctccttgtggacaagaaaattaacaatgccagagatcttatcactatcctggaggatgctattagaagtggatatccaattctaatagtggcagaggacattgagcaggaagctcttgcaacccttgtggttaataggcttagaggtgcattgaagattgctgctattaaggcccctggttttggagagcgcaaaagtcaatatcttgatgacattgctactctcactggaggcactgtcatcagagaagaagttggattatccttagacaaggcagacaatgcggtcctaggaactgctgctaaggttgtagttaccaaggattcaacaacaatagtgggagatggcactacacaggaggaagtgaacaaaagggtgacacaaatcaagaaccagattgaggctactgaacaagaatatgagagagaaaaactaaacgagaggatagctaaactctctggtggtgttgctgtcattcaggtaggagcacagacagaaactgagctcaaggaaaagaaattgagggttgaggatgccctgaatgctacaaaggcagcagtcgaggaaggtatcgttgtaggtggtggctgtacccttttgaggcttgcatcaaaatttgatgcaattatagagacccttgagaacgatgaacagaaggttggggctgaaattgtaaggaagtccttgagctatccacttaaattgattgcaaaaaatgcaggcgttaatggcagtgtggttactgagaaggttcttgccaatgagaacttcaggtatgggtacaatgcggctacaggggagtatgaggacttgatggctgctggtatcattgatcccaccaaggttgtgaggtgctgcttggagcatgctgcatcggtggcgaaaaccttcatcacctctgatgccgttgttgttgacgccaaggtggctgagcaagcaccatcatctcctgcaaacccaatggcaatgggtggtggctcaggttttgggttctaaattgttcagctgcccttcgttccatcgcagcgacagaatcttagtttcgagatataataataaattggatgatgttagtttcgagatattagttggatgttgttattgttgtctcaaattataaaaaatcaagtgcaagtaaccaagacagctgaaaaaaatagttttg

SEQ ID NO: 4507 - protein, 605 aa, Zea mays subsp. mays
  peptide (1)..(605): Ceres Seq. ID no. 12593812
MASAFGTASTCGIKHAPAGVALAAPMKHLSLVSPSLVSLPRKMRPRRKYNFRVNAAKELHFNKDGSAIRKMQNGVNKLADLVGVTLGPKGRNVVLESKYGSPKIVNDGVTVAKEVELEDPVENIGAKLVRQAAAKTNDLAGDGTTTSVVLAQGMITEGVKVVAAGANPVQITRGIEKTAKALVSELQKMSKEVEDSELADVAAVSAGNNYEIGNMITEAMKKVGRQGVVTLEEGKSAENNLYSVEGMQFDRGYISPYFVTDSEKMTVEYENCKLLLVDKKINNARDLITILEDAIRSGYPILIVAEDIEQEALATLVVNRLRGALKIAAIKAPGFGERKSQYLDDIATLTGGTVIREEVGLSLDKADNAVLGTAAKVVVTKDSTTIVGDGTTQEEVNKRVTQIKNQIEATEQEYEREKLNERIAKLSGGVAVIQVGAQTETELKEKKLRVEDALNATKAAVEEGIVVGGGCTLLRLASKFDAIIETLENDEQKVGAEIVRKSLSYPLKLIAKNAGVNGSVVTEKVLANENFRYGYNAATGEYEDLMAAGIIDPTKVVRCCLEHAASVAKTFITSDAVVVDAKVAEQAPSSPANPMAMGGGSGFGF

SEQ ID NO: 4508 - protein, 580 aa, Zea mays subsp. mays
  peptide (1)..(580): Ceres Seq. ID no. 12593813
MKHLSLVSPSLVSLPRKMRPRRKYNFRVNAAKELHFNKDGSAIRKMQNGVNKLADLVGVTLGPKGRNVVLESKYGSPKIVNDGVTVAKEVELEDPVENIGAKLVRQAAAKTNDLAGDGTTTSVVLAQGMITEGVKVVAAGANPVQITRGIEKTAKALVSELQKMSKEVEDSELADVAAVSAGNNYEIGNMITEAMKKVGRQGVVTLEEGKSAENNLYSVEGMQFDRGYISPYFVTDSEKMTVEYENCKLLLVDKKINNARDLITILEDAIRSGYPILIVAEDIEQEALATLVVNRLRGALKIAAIKAPGFGERKSQYLDDIATLTGGTVIREEVGLSLDKADNAVLGTAAKVVVTKDSTTIVGDGTTQEEVNKRVTQIKNQIEATEQEYEREKLNERIAKLSGGVAVIQVGAQTETELKEKKLRVEDALNATKAAVEEGIVVGGGCTLLRLASKFDAIIETLENDEQKVGAEIVRKSLSYPLKLIAKNAGVNGSVVTEKVLANENFRYGYNAATGEYEDLMAAGIIDPTKVVRCCLEHAASVAKTFITSDAVVVDAKVAEQAPSSPANPMAMGGGSGFGF

SEQ ID NO: 4509 - protein, 563 aa, Zea mays subsp. mays
  peptide (1)..(563): Ceres Seq. ID no. 12593814
MRPRRKYNFRVNAAKELHFNKDGSAIRKMQNGVNKLADLVGVTLGPKGRNVVLESKYGSPKIVNDGVTVAKEVELEDPVENIGAKLVRQAAAKTNDLAGDGTTTSVVLAQGMITEGVKVVAAGANPVQITRGIEKTAKALVSELQKMSKEVEDSELADVAAVSAGNNYEIGNMITEAMKKVGRQGVVTLEEGKSAENNLYSVEGMQFDRGYISPYFVTDSEKMTVEYENCKLLLVDKKINNARDLITILEDAIRSGYPILIVAEDIEQEALATLVVNRLRGALKIAAIKAPGFGERKSQYLDDIATLTGGTVIREEVGLSLDKADNAVLGTAAKVVVTKDSTTIVGDGTTQEEVNKRVTQIKNQIEATEQEYEREKLNERIAKLSGGVAVIQVGAQTETELKEKKLRVEDALNATKAAVEEGIVVGGGCTLLRLASKFDAIIETLENDEQKVGAEIVRKSLSYPLKLIAKNAGVNGSVVTEKVLANENFRYGYNAATGEYEDLMAAGIIDPTKVVRCCLEHAASVAKTFITSDAVVVDAKVAEQAPSSPANPMAMGGGSGFGF

SEQ ID NO: 4510 - DNA, 1464 bp, Zea mays subsp. mays
  misc_feature (1)..(1464): Ceres Seq. ID no. 12376480
  misc_feature (1)..(1464): Ortholog of  Ceres SEQ ID NO 14311001 as cited in SEQ ID NO 53717
  misc_feature (1)..(1464): Ortholog of  Ceres SEQ ID NO 14314945 as cited in SEQ ID NO 58031
  misc_feature (1)..(1464): Ortholog of  Ceres SEQ ID NO 13595833 as cited in SEQ ID NO 59877
  misc_feature (1)..(1464): Ortholog of  Ceres SEQ ID NO 13654452 as cited in SEQ ID NO 65792
  misc_feature (1)..(1464): Ortholog of  Ceres SEQ ID NO 13573778 as cited in SEQ ID NO 0
aaagctcaaaccgagcaatagcagtccttgctcctccaacttccctcctggcttctgcccctttgtctgcgctcctcacgccgccccccgccccagccccacacccgcattccccagatctccatggactcgaactcgacccctcccacggacccggcggcctcctgcttggcctccgcctctgcggcggtggcatcgggggacgtcgccgcgatgctgccggactcgccgccgcggcgtggggcgggccaccgccgcgcacagtcggagatcctcctcggcggcgccgcgctccccgacgacctcaccttcgacgcggacctcggcgttgtcggggaggcctgcgtggccggcgacgaggatgaggaggatgacgacgacgacgaggaaggggtcggcggcgctggcggcagccggatgttcgagatgttcctcgagaacggtggcaagctcccgggaccgccggagccgtcggcgcatccgcattcgacgccgccgcggccacggcaccatcacagcatgtctatggatgggtccacgtctttgtttggttccgccgccgccgggatgcctgggaggtcgggcactgatgccaagaaggctatttctgacgctaagctcgccgagctcgcgcttgttgaccccaagcgtgccaagaggattttggcaaaccgccagtcagctgctaggtcgaaagaaagaaagatgcgctacattgcggagcttgaaaggaaagtacagactctccaattagaagcaactacactatcagctcagctggccatgttgcagcgagatacgactggtatgacaagcgagaatagtgatctgaagatacgtgtgcagacaatggagcagcaggttcagctgcaggacgctctgaacgacaggctaagagacgagattcagcagctgaaggttgcaacaggacaggtaaacgccagcattggaaaaacaggaaactctggtatgtcatcatttggaggtaatccacaaagttaccagcgtagccatatacagtctcttctgactgctcagcacctgcagcggctccggatccactcccaacatcagcaacagcagacgcattttcagcagcagcagcagcagccgcagccgcagctgctgctgcaggaggcgcatccatttccggtggacctaaagatgagaggattttctctgtcatcacatgctcagaacgcaggtgcatcagacagccatgctgccaagagcgaaccctgagatttagcatgtattcatgtgggttgttagaaataataatgtcgctctgttagcgtggtgtctaggtgaacttcaaattgtttgaggtgcttagattttgtgcagcctggagctcccatttggttgtaagcttcagtgctgactgaccggtcatttaccttgcctaatgcttgtacctgggtcctggccatgactttgtgcctggaggatggagccgttcgc

SEQ ID NO: 4511 - protein, 372 aa, Zea mays subsp. mays
  peptide (1)..(372): Ceres Seq. ID no. 12376481
MDSNSTPPTDPAASCLASASAAVASGDVAAMLPDSPPRRGAGHRRAQSEILLGGAALPDDLTFDADLGVVGEACVAGDEDEEDDDDDEEGVGGAGGSRMFEMFLENGGKLPGPPEPSAHPHSTPPRPRHHHSMSMDGSTSLFGSAAAGMPGRSGTDAKKAISDAKLAELALVDPKRAKRILANRQSAARSKERKMRYIAELERKVQTLQLEATTLSAQLAMLQRDTTGMTSENSDLKIRVQTMEQQVQLQDALNDRLRDEIQQLKVATGQVNASIGKTGNSGMSSFGGNPQSYQRSHIQSLLTAQHLQRLRIHSQHQQQQTHFQQQQQQPQPQLLLQEAHPFPVDLKMRGFSLSSHAQNAGASDSHAAKSEP

SEQ ID NO: 4512 - protein, 342 aa, Zea mays subsp. mays
  peptide (1)..(342): Ceres Seq. ID no. 12376482
MLPDSPPRRGAGHRRAQSEILLGGAALPDDLTFDADLGVVGEACVAGDEDEEDDDDDEEGVGGAGGSRMFEMFLENGGKLPGPPEPSAHPHSTPPRPRHHHSMSMDGSTSLFGSAAAGMPGRSGTDAKKAISDAKLAELALVDPKRAKRILANRQSAARSKERKMRYIAELERKVQTLQLEATTLSAQLAMLQRDTTGMTSENSDLKIRVQTMEQQVQLQDALNDRLRDEIQQLKVATGQVNASIGKTGNSGMSSFGGNPQSYQRSHIQSLLTAQHLQRLRIHSQHQQQQTHFQQQQQQPQPQLLLQEAHPFPVDLKMRGFSLSSHAQNAGASDSHAAKSEP

SEQ ID NO: 4513 - protein, 274 aa, Zea mays subsp. mays
  peptide (1)..(274): Ceres Seq. ID no. 12376483
MFEMFLENGGKLPGPPEPSAHPHSTPPRPRHHHSMSMDGSTSLFGSAAAGMPGRSGTDAKKAISDAKLAELALVDPKRAKRILANRQSAARSKERKMRYIAELERKVQTLQLEATTLSAQLAMLQRDTTGMTSENSDLKIRVQTMEQQVQLQDALNDRLRDEIQQLKVATGQVNASIGKTGNSGMSSFGGNPQSYQRSHIQSLLTAQHLQRLRIHSQHQQQQTHFQQQQQQPQPQLLLQEAHPFPVDLKMRGFSLSSHAQNAGASDSHAAKSEP

SEQ ID NO: 4514 - DNA, 1481 bp, Zea mays subsp. mays
  misc_feature (1)..(1481): Ceres Seq. ID no. 12373728
  misc_feature (1)..(1481): Ortholog of  Ceres SEQ ID NO 12578784 as cited in SEQ ID NO 20729
  misc_feature (1)..(1481): Ortholog of  Ceres SEQ ID NO 13658847 as cited in SEQ ID NO 66674
aaaaagcgtgtgcgacagaggaagtccatgtgcccggctcggccctgccacggccacgcacagcagaggagcccgcaagcccgcgcgctccccgccaagatttgccaccaataccccggtcctccactcctcctctcctccgcgagctccgtctccccccctcgcgcgaacgccgggcgcacgcagccaggccaggtatccccccggccccaaccaaaccatcgcatgggagccgcgactggcccgacgaagcggagccgcgtccccagcaagaggcagcaggaggaggaggccatggcgcgcgctgcgggcgtggaggcgcaggcgcaggcgcggcggcggccacggctggtggggtacgaggagctgccggagtacctcaaggacaacgagtacatccgcgggcactaccgcgccgagtggcccgtccgcgacgcgctcctcagcgccttcgcctggcacaacgagactctcaacgtgtggacgcatctcggcgggttcctgtttttcctggcgctcgcggtcgccggagggtggacggaggccgccgacgaagccgctccggggatcatgaggttcgtggtgacaccaccagctaacgcttcgtgggacgtgctgcattcgggtctgccaagccacgacggcagggcgtcgcagtccggcgtgccgcggtggccgcggacggtgttcctggtgggcgccatgtcgtgcctggccatcagcgcgacggcccacctgctggcgtgccactcgcggcgcgccagcgtggtgttctggcagctcgactacgcgggcatctccgtgatgatcgtcgcctccttcgtgccgccggtgtactacgccttcctctgccacccgccggcgcgggcggccatacctgtccgccatcgcggcgctgggcgcgctcgtggtggccgcgctgctctccccgtcctgctcgtccccgcgctaccgccgcctccgcgcggcgctgttcctggccatgggcctgtcgggcgtcgtcccggcgctgcacgcgctgtggctcaactggggccacgccgcctgctacctggcgctcggcctcgaggtcgccatgggtctcgcctacgccacgggcgcatggttctacgtcagccgcgtgccggagaagtggaggcccggggtgttcgacgtcgtgggccacagccaccagatcttccacgtgctcgtgctcgtcggcgccgtcacgcactacgtcgccgtcgccgtgctcatccactggcgggagaaggtggctgccgcctgtggcgcggcgtcgtaggcgggcttgctgctcctggcttctgcagcaagccagctgaggtgtttgatcatccagagcttcaatgtgccagtgcgatggattcaacaagcgttcgaatcggcgaacgaagtagttgcagttgcagttgcagcatagatcggctctagagttcgacgatttgtaatttaattgatgggatgattgagtatggtggtcc

SEQ ID NO: 4515 - protein, 476 aa, Zea mays subsp. mays
  peptide (1)..(476): Ceres Seq. ID no. 12373729
KKRVRQRKSMCPARPCHGHAQQRSPQARALPAKICHQYPGPPLLLSSASSVSPPRANAGRTQPGQVSPRPQPNHRMGAATGPTKRSRVPSKRQQEEEAMARAAGVEAQAQARRRPRLVGYEELPEYLKDNEYIRGHYRAEWPVRDALLSAFAWHNETLNVWTHLGGFLFFLALAVAGGWTEAADEAAPGIMRFVVTPPANASWDVLHSGLPSHDGRASQSGVPRWPRTVFLVGAMSCLAISATAHLLACHSRRASVVFWQLDYAGISVMIVASFVPPVYYAFLCHPPARAAIPVRHRGAGRARGGRAALPVLLVPALPPPPRGAVPGHGPVGRRPGAARAVAQLGPRRLLPGARPRGRHGSRLRHGRMVLRQPRAGEVEARGVRRRGPQPPDLPRARARRRRHALRRRRRAHPLAGEGGCRLWRGVVGGLAAPGFCSKPAEVFDHPELQCASAMDSTSVRIGERSSCSCSCSIDRL

SEQ ID NO: 4516 - protein, 467 aa, Zea mays subsp. mays
  peptide (1)..(467): Ceres Seq. ID no. 12373730
MCPARPCHGHAQQRSPQARALPAKICHQYPGPPLLLSSASSVSPPRANAGRTQPGQVSPRPQPNHRMGAATGPTKRSRVPSKRQQEEEAMARAAGVEAQAQARRRPRLVGYEELPEYLKDNEYIRGHYRAEWPVRDALLSAFAWHNETLNVWTHLGGFLFFLALAVAGGWTEAADEAAPGIMRFVVTPPANASWDVLHSGLPSHDGRASQSGVPRWPRTVFLVGAMSCLAISATAHLLACHSRRASVVFWQLDYAGISVMIVASFVPPVYYAFLCHPPARAAIPVRHRGAGRARGGRAALPVLLVPALPPPPRGAVPGHGPVGRRPGAARAVAQLGPRRLLPGARPRGRHGSRLRHGRMVLRQPRAGEVEARGVRRRGPQPPDLPRARARRRRHALRRRRRAHPLAGEGGCRLWRGVVGGLAAPGFCSKPAEVFDHPELQCASAMDSTSVRIGERSSCSCSCSIDRL

SEQ ID NO: 4517 - protein, 401 aa, Zea mays subsp. mays
  peptide (1)..(401): Ceres Seq. ID no. 12373731
MGAATGPTKRSRVPSKRQQEEEAMARAAGVEAQAQARRRPRLVGYEELPEYLKDNEYIRGHYRAEWPVRDALLSAFAWHNETLNVWTHLGGFLFFLALAVAGGWTEAADEAAPGIMRFVVTPPANASWDVLHSGLPSHDGRASQSGVPRWPRTVFLVGAMSCLAISATAHLLACHSRRASVVFWQLDYAGISVMIVASFVPPVYYAFLCHPPARAAIPVRHRGAGRARGGRAALPVLLVPALPPPPRGAVPGHGPVGRRPGAARAVAQLGPRRLLPGARPRGRHGSRLRHGRMVLRQPRAGEVEARGVRRRGPQPPDLPRARARRRRHALRRRRRAHPLAGEGGCRLWRGVVGGLAAPGFCSKPAEVFDHPELQCASAMDSTSVRIGERSSCSCSCSIDRL

SEQ ID NO: 4518 - DNA, 1054 bp, Zea mays subsp. mays
  misc_feature (1)..(1054): Ceres Seq. ID no. 12373289
  misc_feature (1)..(1054): Ortholog of  Ceres SEQ ID NO 15178112 as cited in SEQ ID NO 1156
aagatcgccgcctcgcagtcgcacagtcgcactcgctccacttccattcccagcgaccccgcccgcccggaggcgtcgcacctgcacgctgcggcagcgggcagccgccaagcctctctcgtgcggcaagcaccacacagacacccgatggcgctgctgctgctgcgcggctgcgccgcgccgccagccgtccacgcggccccggcggggtcccggctgctccctccggcgctgccgcggcggcggctcgtggccgtcgcctcttcggcctcctccgcgccgtccggcgaggtggcgtcgtcgtcccaggacggccgcggctacgggatcgtgggcgggcccaacggccacgccatcgctcccgccacagacaccaagtccaccgccgtcgagaccaccgtcgagagggtgatcttcgacttccggttcctggcactcctcgccgtcgccgggtcgctcgccggctccgtcctgtgcttcctcaatggctgtgtcttcatcaaagaggcgtaccaggtttactggtcgagctgtgtcaagggggttcattcggggcagatggtcctcaaggtcgtcgaggccatcgatgtgtatcttgctggaacagtcatgctgatatttgggatgggtctctacggcctcttcatcagcaacgctcccgccggtgttcctcctgaatccgaccgtgccctcagcggctcgtcgctgttcggaatgttcgctttgaaggaacgcccgaagtggatgaacatcacctcgcttgacgagctcaagacaaaagtggggcacgtcatcgtgatgattctacttgtgaagatgttcgagaagagcaagatggtgacgatagccacggggctggacctcctcagctactcgatctgcatcttcttgtcatcagcttctctctacatcctgcacaatcttcacaagggcgaccatgaggagtgacgagagtgaaatgccgaatttgtagcctattcgagagagagagttgacggtcttgtccaataatcaatactggatttttaagactctcttcaacggtgttctcttc

SEQ ID NO: 4519 - protein, 315 aa, Zea mays subsp. mays
  peptide (1)..(315): Ceres Seq. ID no. 12373290
KIAASQSHSRTRSTSIPSDPARPEASHLHAAAAGSRQASLVRQAPHRHPMALLLLRGCAAPPAVHAAPAGSRLLPPALPRRRLVAVASSASSAPSGEVASSSQDGRGYGIVGGPNGHAIAPATDTKSTAVETTVERVIFDFRFLALLAVAGSLAGSVLCFLNGCVFIKEAYQVYWSSCVKGVHSGQMVLKVVEAIDVYLAGTVMLIFGMGLYGLFISNAPAGVPPESDRALSGSSLFGMFALKERPKWMNITSLDELKTKVGHVIVMILLVKMFEKSKMVTIATGLDLLSYSICIFLSSASLYILHNLHKGDHEE

SEQ ID NO: 4520 - protein, 266 aa, Zea mays subsp. mays
  peptide (1)..(266): Ceres Seq. ID no. 12373291
MALLLLRGCAAPPAVHAAPAGSRLLPPALPRRRLVAVASSASSAPSGEVASSSQDGRGYGIVGGPNGHAIAPATDTKSTAVETTVERVIFDFRFLALLAVAGSLAGSVLCFLNGCVFIKEAYQVYWSSCVKGVHSGQMVLKVVEAIDVYLAGTVMLIFGMGLYGLFISNAPAGVPPESDRALSGSSLFGMFALKERPKWMNITSLDELKTKVGHVIVMILLVKMFEKSKMVTIATGLDLLSYSICIFLSSASLYILHNLHKGDHEE

SEQ ID NO: 4521 - protein, 224 aa, Zea mays subsp. mays
  peptide (1)..(224): Ceres Seq. ID no. 12373292
DRRLAVAQSHSLHFHSQRPRPPGGVAPARCGSGQPPSLSRAASTTQTPDGAAAAARLRRAASRPRGPGGVPAAPSGAAAAAARGRRLFGLLRAVRRGGVVVPGRPRLRDRGRAQRPRHRSRHRHQVHRRRDHRREGDLRLPVPGTPRRRRVARRLRPVLPQWLCLHQRGVPGLLVELCQGGSFGADGPQGRRGHRCVSCWNSHADIWDGSLRPLHQQRSRRCSS

SEQ ID NO: 4522 - DNA, 1380 bp, Zea mays subsp. mays
  misc_feature (1)..(1380): Ceres Seq. ID no. 12353756
  misc_feature (1)..(1380): Ortholog of  Ceres SEQ ID NO 14303600 as cited in SEQ ID NO 64632
  misc_feature (1)..(1380): Ortholog of  Ceres SEQ ID NO 14302776 as cited in SEQ ID NO 66919
aaccatttcttcttcctttttctatatcgcgttacgtccctacccagcgatctaggccgccgcctctcctactgcatctccctcgctctcgtcgcctcgttcgcttcgcctccgccccgccccgccccgagcagagcgcagccctatccggagctgggatggcggacgcgaagcagcagcagcagcagcagcagccacagcaggcggcagcggcagccaccggcgtgtggaagacggtcaagcccttcgttaacggcggggcctctgggatgctcgcgacctgcgtcatccagcctatcgacatggtcaaggtgaggatccagttgggtgagggctctgctggtcaggtcacaaggaacatgcttgcaaatgagggtgtccgttctttctacaagggtttgtccgccggattgctgaggcaagcgacgtacacgactgctcgtcttggatcctttagggttctaactaacaaagcagttgaaaagaatgaagggaagccattgcctctatttcagaaagcttttattggtctgactgctggtgcaattggtgcttgtgttggtagtcctgctgatctggcactcattagaatgcaagccgattcgaccctgccagttgcacaacgacgcaactataaatgctttccatgcactctaccgtatcagtggtgatgagggagtccttgcgctttggaagggtgcaggtccaactgtggtgagagctatggcactcaatatgggtatgcttgcttcctatgaccagagtgtcgagctatttagggacaaatttggcgcaggagaaatttctactgttgttggagccagcgctgtttctggattctttgcctcagcatgcagtttgccctttgactatgtgaagacacagattcagaagatgcaacctgatgcgaatggcaagtacccatacacagggtctttggactgtgctgtgaagaccttcaagagcggtggcccattcaagttctacactggtttcccggtgtactgcgtcaggattgcaccccatgtcatgatgacctggatattcttgaatcagatccagaagtttgagaagaagatcggcatataggattcccatgggacggatacagggttgacagttctatgctattactgcttgactctgtaataacattccagctgctttcgcaccatggtagttggttttggtagagacaagtctgttacaattttttaccttagctttccaattattgtgttgcaataatcgaattaattgttgctgggggatttttttggggggttgggagggtggcatgcttttgttggctgggatgtagccataaggagagggggatactgcctagttatgtcattgaatggaattggaccatatttt

SEQ ID NO: 4523 - protein, 222 aa, Zea mays subsp. mays
  peptide (1)..(222): Ceres Seq. ID no. 12353757
PFLLPFSISRYVPTQRSRPPPLLLHLPRSRRLVRFASAPPRPEQSAALSGAGMADAKQQQQQQQPQQAAAAATGVWKTVKPFVNGGASGMLATCVIQPIDMVKVRIQLGEGSAGQVTRNMLANEGVRSFYKGLSAGLLRQATYTTARLGSFRVLTNKAVEKNEGKPLPLFQKAFIGLTAGAIGACVGSPADLALIRMQADSTLPVAQRRNYKCFPCTLPYQW

SEQ ID NO: 4524 - protein, 170 aa, Zea mays subsp. mays
  peptide (1)..(170): Ceres Seq. ID no. 12353758
MADAKQQQQQQQPQQAAAAATGVWKTVKPFVNGGASGMLATCVIQPIDMVKVRIQLGEGSAGQVTRNMLANEGVRSFYKGLSAGLLRQATYTTARLGSFRVLTNKAVEKNEGKPLPLFQKAFIGLTAGAIGACVGSPADLALIRMQADSTLPVAQRRNYKCFPCTLPYQW

SEQ ID NO: 4525 - protein, 133 aa, Zea mays subsp. mays
  peptide (1)..(133): Ceres Seq. ID no. 12353759
MLATCVIQPIDMVKVRIQLGEGSAGQVTRNMLANEGVRSFYKGLSAGLLRQATYTTARLGSFRVLTNKAVEKNEGKPLPLFQKAFIGLTAGAIGACVGSPADLALIRMQADSTLPVAQRRNYKCFPCTLPYQW

SEQ ID NO: 4526 - DNA, 1447 bp, Zea mays subsp. mays
  misc_feature (1)..(1447): Ceres Seq. ID no. 12344474
  misc_feature (1)..(1447): Ortholog of  Ceres SEQ ID NO 14311731 as cited in SEQ ID NO 51632
  misc_feature (1)..(1447): Ortholog of  Ceres SEQ ID NO 14315189 as cited in SEQ ID NO 57702
accaaaccaggaaactgcaaacctacccccggtcgccgactcgccggcctcgactctccggtctccgcccagactacaaatggagctctgcacctgcgtggcccgcagttctgcgcccccctcttctagctgccgcgcggtgccattcccgcgagttctctcccatcgcatttggagccgatcgggatactgcactgtctgctttaccccgtcaagccctgttgctaggagtcgattctctactctaatgacgactgcacacaacacagggaccccagatctagttgacttcaattgggatgatcttgggtttcaactgatcccaacggacttcatgtatttaatgagctgttcttcagatggggtgtttatgaatggtaaattagtgccatatgggtcaattgagctgaatccagcagccgccgtgctgaattatggtcagggattgcttgaaggtctacgagcacatagaaaagaggatggatcaatccttctttttcgtccacatgaaaatgcacggcggatggaaattggtgcagaccggttatgcatgcctgcaccaagtgtagagcaattcctagaagctgtgaaactaactgttctggcaaacaagcattgggtgcctccttttggtaaaggttctttgtatatcagaccgcagctaattggaagtggggctatccttggtgtggcacctgccccacagtacacattcattgtgtttgtttgcccagttgggcattatttcaagggtggtctagctccaatcagcttgttaactgaggaagaataccaccgtgctgcacctggtggaactggtgaaataaaaactattgggaactatgcttcggttgtcagtgctcagagaagagccaaggaaaaaggccattctgatgttttatacttagatccagtccataataagtttgttgaggaagtttcttcttgtaatatattcatggtgaagggcaatattatttctactccactgttaacggggacaattcttcctggaatcacaaggagaagtgtgattgaaatttctcagaatcttggatttcaggttgaggagcgtcttatcacaatagatgaactgcttggggctgatgaagtcttttgtacaggaacagctgttgtattgtcacctgttgggagcatcacttaccgtggaagaagagtggagtatgggaagaaccaggaggccggagtcgtgtcccaacaactctatgccgcactcacagctatccagaaaggtctcacggaggacagcatgggatggacgttgcagctaacttagcagctttttttcacatgatcgagctctacaactcttatttccgttttctcgataagtctcacttctatcaacttgttcttctgttgaaacagagtactttaaaaggaatccccaataatgactttccctgtatattgctgatatgttggc

SEQ ID NO: 4527 - protein, 431 aa, Zea mays subsp. mays
  peptide (1)..(431): Ceres Seq. ID no. 12344475
PNQETANLPPVADSPASTLRSPPRLQMELCTCVARSSAPPSSSCRAVPFPRVLSHRIWSRSGYCTVCFTPSSPVARSRFSTLMTTAHNTGTPDLVDFNWDDLGFQLIPTDFMYLMSCSSDGVFMNGKLVPYGSIELNPAAAVLNYGQGLLEGLRAHRKEDGSILLFRPHENARRMEIGADRLCMPAPSVEQFLEAVKLTVLANKHWVPPFGKGSLYIRPQLIGSGAILGVAPAPQYTFIVFVCPVGHYFKGGLAPISLLTEEEYHRAAPGGTGEIKTIGNYASVVSAQRRAKEKGHSDVLYLDPVHNKFVEEVSSCNIFMVKGNIISTPLLTGTILPGITRRSVIEISQNLGFQVEERLITIDELLGADEVFCTGTAVVLSPVGSITYRGRRVEYGKNQEAGVVSQQLYAALTAIQKGLTEDSMGWTLQLT

SEQ ID NO: 4528 - protein, 405 aa, Zea mays subsp. mays
  peptide (1)..(405): Ceres Seq. ID no. 12344476
MELCTCVARSSAPPSSSCRAVPFPRVLSHRIWSRSGYCTVCFTPSSPVARSRFSTLMTTAHNTGTPDLVDFNWDDLGFQLIPTDFMYLMSCSSDGVFMNGKLVPYGSIELNPAAAVLNYGQGLLEGLRAHRKEDGSILLFRPHENARRMEIGADRLCMPAPSVEQFLEAVKLTVLANKHWVPPFGKGSLYIRPQLIGSGAILGVAPAPQYTFIVFVCPVGHYFKGGLAPISLLTEEEYHRAAPGGTGEIKTIGNYASVVSAQRRAKEKGHSDVLYLDPVHNKFVEEVSSCNIFMVKGNIISTPLLTGTILPGITRRSVIEISQNLGFQVEERLITIDELLGADEVFCTGTAVVLSPVGSITYRGRRVEYGKNQEAGVVSQQLYAALTAIQKGLTEDSMGWTLQLT

SEQ ID NO: 4529 - protein, 349 aa, Zea mays subsp. mays
  peptide (1)..(349): Ceres Seq. ID no. 12344477
MTTAHNTGTPDLVDFNWDDLGFQLIPTDFMYLMSCSSDGVFMNGKLVPYGSIELNPAAAVLNYGQGLLEGLRAHRKEDGSILLFRPHENARRMEIGADRLCMPAPSVEQFLEAVKLTVLANKHWVPPFGKGSLYIRPQLIGSGAILGVAPAPQYTFIVFVCPVGHYFKGGLAPISLLTEEEYHRAAPGGTGEIKTIGNYASVVSAQRRAKEKGHSDVLYLDPVHNKFVEEVSSCNIFMVKGNIISTPLLTGTILPGITRRSVIEISQNLGFQVEERLITIDELLGADEVFCTGTAVVLSPVGSITYRGRRVEYGKNQEAGVVSQQLYAALTAIQKGLTEDSMGWTLQLT

SEQ ID NO: 4530 - DNA, 1569 bp, Zea mays subsp. mays
  misc_feature (1)..(1569): Ceres Seq. ID no. 13493453
  misc_feature (1)..(1569): Ortholog of  Ceres SEQ ID NO 14311014 as cited in SEQ ID NO 53606
atcctaatcgaaaaatcaaaagaaaaaaaagatcgcagccgaaaggaaggggaaaaaaggaccaaataaacaatccactgtctcctacctccgcggaagcatcaaacaaatcaccctgccgatcgccatggacgaacagcaggcggaggagggcgaaagcgcgcgcgtcaagaggacgccggaggaggggtcgtcgccgctgtccgctctggcggatgacgtgctgctacagatcctgggacggctcgaggcggacccgcgggactgggcgcgggcctcctgcgcgtccccgcgcctcgccgctctgctccgggcggcctgcctcccgccgcgactgtcgcgggcgctccccgccgagctcctccccgcgccgtcaccggacggggcgcccgcggcctgggcggcgctccacaagctctccgtctgttgcccggggctcctccgcgccggggtgctcctcgagcccaccgacgatttcgggctcgatctcgacatcgggcctgacgtccccatctacgcccgcaccgacgcctcctccgccgaggggttcgaggccacggccacctcccgccacagcggaaccatcgtcgcggccgggagcgcgccccgcgccggcgaatctgccaacgtcgccgcgtggtcgctctacgacgacctgtacctggacgcggcatacgactgctcgtccgagctgcagatcccgcctgccgctgcggctgtggaacccgccccgcccgcgcccttggcggcgatccgcgacgtggaggaagcaacgaccacaaatgctgtctcatgcggcgtcgcccggcgcggcgtggtggccgggagccgactgcatccgcggcggtggctgggcaccgtcggcgcgcacctggcatcggggtcctggacgctgagccgtgagcaggggaacaagctccttgccagccgcttccgcggcgaccggctatacctctgcgactggcccgggtgcgtgcacaaggaggagcgacgcaagtacatggtcttccgcggcgtgttccacaacttcgcccggtctcaggtccggcgcgcgctcagggacacgcgccgccccaccgtcgccatcgagtgcgccttctgcggctgcaaagagacctgggacctctactcggctttctgcctccgcagtttctacggctaccacgacgacggcgagcctgtggtgcgcgcctacgtctgcgagaacggccacgtcgcgggcgcctggaccgaccgcccactctactcctgatcttggagtggacactccgactgacatggtattgcatcaaagactgcaccctgccattgccagatgctcgctcctaccacttgagctgtttctagacataattatgcgtgcctgcatatagcaatccggattttcgtcatgttctgatacacgtgggatgtgtattctttatttctttcttcttgctgttgctgttgtttgtgagaatggttgagtagaataaggatgccggttgatttgcagcataggatataaagagatttgcttaaaattgtaaacctgatgctacgagaaattggaaccgctgttttattgcc

SEQ ID NO: 4531 - protein, 374 aa, Zea mays subsp. mays
  peptide (1)..(374): Ceres Seq. ID no. 13493454
MDEQQAEEGESARVKRTPEEGSSPLSALADDVLLQILGRLEADPRDWARASCASPRLAALLRAACLPPRLSRALPAELLPAPSPDGAPAAWAALHKLSVCCPGLLRAGVLLEPTDDFGLDLDIGPDVPIYARTDASSAEGFEATATSRHSGTIVAAGSAPRAGESANVAAWSLYDDLYLDAAYDCSSELQIPPAAAAVEPAPPAPLAAIRDVEEATTTNAVSCGVARRGVVAGSRLHPRRWLGTVGAHLASGSWTLSREQGNKLLASRFRGDRLYLCDWPGCVHKEERRKYMVFRGVFHNFARSQVRRALRDTRRPTVAIECAFCGCKETWDLYSAFCLRSFYGYHDDGEPVVRAYVCENGHVAGAWTDRPLYS

SEQ ID NO: 4532 - protein, 297 aa, Zea mays subsp. mays
  peptide (1)..(297): Ceres Seq. ID no. 13493455
PNRKIKRKKRSQPKGRGKKDQINNPLSPTSAEASNKSPCRSPWTNSRRRRAKARASRGRRRRGRRRCPLWRMTCCYRSWDGSRRTRGTGRGPPARPRASPLCSGRPASRRDCRGRSPPSSSPRRHRTGRPRPGRRSTSSPSVARGSSAPGCSSSPPTISGSISTSGLTSPSTPAPTPPPPRGSRPRPPPATAEPSSRPGARPAPANLPTSPRGRSTTTCTWTRHTTARPSCRSRLPLRLWNPPRPRPWRRSATWRKQRPQMLSHAASPGAAWWPGADCIRGGGWAPSARTWHRGPGR

SEQ ID NO: 4533 - protein, 226 aa, Zea mays subsp. mays
  peptide (1)..(226): Ceres Seq. ID no. 13493456
MTCCYRSWDGSRRTRGTGRGPPARPRASPLCSGRPASRRDCRGRSPPSSSPRRHRTGRPRPGRRSTSSPSVARGSSAPGCSSSPPTISGSISTSGLTSPSTPAPTPPPPRGSRPRPPPATAEPSSRPGARPAPANLPTSPRGRSTTTCTWTRHTTARPSCRSRLPLRLWNPPRPRPWRRSATWRKQRPQMLSHAASPGAAWWPGADCIRGGGWAPSARTWHRGPGR

SEQ ID NO: 4534 - DNA, 1240 bp, Zea mays subsp. mays
  misc_feature (1)..(1240): Ceres Seq. ID no. 12376591
  misc_feature (1)..(1240): Ortholog of  Ceres SEQ ID NO 14307801 as cited in SEQ ID NO 59512
  misc_feature (1)..(1240): Ortholog of  Ceres SEQ ID NO 14309110 as cited in SEQ ID NO 0
  misc_feature (1)..(1240): Ortholog of  Ceres SEQ ID NO 15225903 as cited in SEQ ID NO 0
gcacgagaccattacctagaacatcctaatcgaaaaatccgcagtcgcacacccgccattgcattcgcagcaccagcgccgcttctccttcctcgagctcacccctctcttctcttctcctattcgctcgcgtgctctctctctctctctctgctgcctcagccgccctcgctgtcgctgagccgacagattcattcggccggtcatggctgacgcgttgtgcaacggcgtcgtggcgtccccgtgcggccgggacgtcgccggcagggccaggggcgccggcagggccgcgctcgcggagtcccttcaggtcgccgggcacgccagcaagacctccttctccgccgggaggatgtcggtcaaggacagcaagccgaggcccctgtcgcgtagcctcgaggccgccgcgccaggacagatgaacctgtcgttccccaaggccatgcggtggtgggagaaggggctgcaccccaacatgcgcgaggtcgagtccgcgcaggacctcgccgactcgctgctcagcgccggcgacaaactcgtggtcgtcgacttcttctccccaggctgcggcggctgccgcgccctccaccccaagatcgcccagttcgccgagaagaacccgggcgtgcagttcctgcaggtgaactacgagacgcacaagtccatgtgctacagcctccgcgtccacgtcctccctttcttcaggttctaccggggagccgagggccgggtcagcagcttcagctgcaccaacgcaacgatcaacaagttcaaggacgcgctcgccaagcacggggctgagaggtgcagcctcgggcctgcgcgggggctggacgagtcggagctcatggctttggctgagaacagggacctgcacttcacctacgacaagccgggcggcctcgtccccctcgcggaagccattgccaaggaggctgccgcgccgggaggcccgtggcttcctctgcctgcgtccctgctcggccagggatcggccgataactcattgctgccgtctggaagatagaccgtgctccgtgctcggttggtttcattcattggaggtggctcctccgtcttgtacagatttcattcgttcgtagtggtctgatgatgctggagtgacagaaatattcagacgcgggatgcgcagtgactatcgcgggatgcgcagtgactatcgcgtctgtattgttgcatctagacctttgctgaaacatgaaaaaatccattgcttggc

SEQ ID NO: 4535 - protein, 273 aa, Zea mays subsp. mays
  peptide (1)..(273): Ceres Seq. ID no. 12376592
MADALCNGVVASPCGRDVAGRARGAGRAALAESLQVAGHASKTSFSAGRMSVKDSKPRPLSRSLEAAAPGQMNLSFPKAMRWWEKGLHPNMREVESAQDLADSLLSAGDKLVVVDFFSPGCGGCRALHPKIAQFAEKNPGVQFLQVNYETHKSMCYSLRVHVLPFFRFYRGAEGRVSSFSCTNATINKFKDALAKHGAERCSLGPARGLDESELMALAENRDLHFTYDKPGGLVPLAEAIAKEAAAPGGPWLPLPASLLGQGSADNSLLPSGR

SEQ ID NO: 4536 - protein, 224 aa, Zea mays subsp. mays
  peptide (1)..(224): Ceres Seq. ID no. 12376593
MSVKDSKPRPLSRSLEAAAPGQMNLSFPKAMRWWEKGLHPNMREVESAQDLADSLLSAGDKLVVVDFFSPGCGGCRALHPKIAQFAEKNPGVQFLQVNYETHKSMCYSLRVHVLPFFRFYRGAEGRVSSFSCTNATINKFKDALAKHGAERCSLGPARGLDESELMALAENRDLHFTYDKPGGLVPLAEAIAKEAAAPGGPWLPLPASLLGQGSADNSLLPSGR

SEQ ID NO: 4537 - protein, 202 aa, Zea mays subsp. mays
  peptide (1)..(202): Ceres Seq. ID no. 12376594
MNLSFPKAMRWWEKGLHPNMREVESAQDLADSLLSAGDKLVVVDFFSPGCGGCRALHPKIAQFAEKNPGVQFLQVNYETHKSMCYSLRVHVLPFFRFYRGAEGRVSSFSCTNATINKFKDALAKHGAERCSLGPARGLDESELMALAENRDLHFTYDKPGGLVPLAEAIAKEAAAPGGPWLPLPASLLGQGSADNSLLPSGR

SEQ ID NO: 4538 - DNA, 1408 bp, Zea mays subsp. mays
  misc_feature (1)..(1408): Ceres Seq. ID no. 12344038
  misc_feature (1)..(1408): Ortholog of  Ceres SEQ ID NO 14308225 as cited in SEQ ID NO 59062
  misc_feature (1)..(1408): Ortholog of  Ceres SEQ ID NO 15176615 as cited in SEQ ID NO 0
gtctagattcattgcacctgctggtcgtttgaactttgaaccgagcggcacggcaaccctttctccgagccgcccaagtccgtacagcgcccatgcccttctcacgtgcatgcccccctccccaaaaccacacacacgagaggaaaaaaaaagggggctcattttcctacgagatcccgtggaaaacggccgggtgcggcaggagaggccggggtgcctgccagtgccatcacgtgccggtgaccaccgtcctgatcctcatcccctcgctcgctgcgcctggcctgacgtgtccccccggcccccgggtccgtgtgtacgctggcgtccggcgggatataaaagcggtcccgcacccacctcttcttcctccttttttttctctcatccgaattcccaggcaggcaggtcggcgaggagggcaggaagaccgaagaccgagccgtgcgggggctcgggacgggaacgggacaggaccccaaaatctcagatccttcctgcccgcccgcccgtgcccgtcgacgcgtcgttcttgccggccgcgccccacctccgccctctcctcctccagggggatcggatacgccacaggctgcgcgatggtgctgtgggtcttcggctacggctccctcatctggaaccccggcttcgacttcgacgacaaaatcctcggcttcatcaagggctacaagcgcacctttaatctcgcttgcattgaccacagaggcacaccggagcatccggcgaggacctgcacgcttgaaaccgacgacgaggccatatgctggggaattgcatattgtgtcaagggtggtccagaaaaagagctaaaagcaatgcagtacttggagagaagagagtgtgagtacgaccagaaaatatccattgatttctacaaggaaggagatcccttgaaaccagctgtgacgggcgtcttagtgttcgtttccactccagatccaattggcaacaagtactatcttggccctgctcctctgcaggatatggcaaggcaaattgctacagccaatggccctactggctataatagggattacctgttctcaatggagaaggcattagccagcattagccacgaagatgattcgatcatagagcttgcaaacgaggtgaggaaggtgctcaacagaacaaaggagaccaagatcactggtgccaatgcttccctgaaatcacatgcccctcttgtgcacctgtccgcgcttccagaaggcaccgttgtggactcgagatagcgacctctactcggaatttactttcagctcttgcatgtttgtggttgtggccatcatgtactgattttcccttttcaacagttgtcgtgaggctgtatcgtctggagtaaaaaaaaatgctaaaagccggcactaataatgatattaacttg

SEQ ID NO: 4539 - protein, 387 aa, Zea mays subsp. mays
  peptide (1)..(387): Ceres Seq. ID no. 12344039
MPFSRACPPPQNHTHERKKKGGSFSYEIPWKTAGCGRRGRGACQCHHVPVTTVLILIPSLAAPGLTCPPGPRVRVYAGVRRDIKAVPHPPLLPPFFSLIRIPRQAGRRGGQEDRRPSRAGARDGNGTGPQNLRSFLPARPCPSTRRSCRPRPTSALSSSRGIGYATGCAMVLWVFGYGSLIWNPGFDFDDKILGFIKGYKRTFNLACIDHRGTPEHPARTCTLETDDEAICWGIAYCVKGGPEKELKAMQYLERRECEYDQKISIDFYKEGDPLKPAVTGVLVFVSTPDPIGNKYYLGPAPLQDMARQIATANGPTGYNRDYLFSMEKALASISHEDDSIIELANEVRKVLNRTKETKITGANASLKSHAPLVHLSALPEGTVVDSR

SEQ ID NO: 4540 - protein, 233 aa, Zea mays subsp. mays
  peptide (1)..(233): Ceres Seq. ID no. 12344040
SRFIAPAGRLNFEPSGTATLSPSRPSPYSAHALLTCMPPSPKPHTREEKKRGLIFLRDPVENGRVRQERPGCLPVPSRAGDHRPDPHPLARCAWPDVSPRPPGPCVRWRPAGYKSGPAPTSSSSFFFSHPNSQAGRSARRAGRPKTEPCGGSGRERDRTPKSQILPARPPVPVDASFLPAAPHLRPLLLQGDRIRHRLRDGAVGLRLRLPHLEPRLRLRRQNPRLHQGLQAHL

SEQ ID NO: 4541 - protein, 218 aa, Zea mays subsp. mays
  peptide (1)..(218): Ceres Seq. ID no. 12344041
MVLWVFGYGSLIWNPGFDFDDKILGFIKGYKRTFNLACIDHRGTPEHPARTCTLETDDEAICWGIAYCVKGGPEKELKAMQYLERRECEYDQKISIDFYKEGDPLKPAVTGVLVFVSTPDPIGNKYYLGPAPLQDMARQIATANGPTGYNRDYLFSMEKALASISHEDDSIIELANEVRKVLNRTKETKITGANASLKSHAPLVHLSALPEGTVVDSR

SEQ ID NO: 4542 - DNA, 1389 bp, Zea mays subsp. mays
  misc_feature (1)..(1389): Ceres Seq. ID no. 12352271
  misc_feature (1)..(1389): Ortholog of  Ceres SEQ ID NO 13654209 as cited in SEQ ID NO 62121
  misc_feature (1)..(1389): Ortholog of  Ceres SEQ ID NO 13596965 as cited in SEQ ID NO 63363
gaagtaagcgtggatgttgcccacgtggcccccggctcctccagaagtagccatacggattcagatcgcggccgcggcgactccccgagcagaagaacccgatcgaacgcggccgcggcggcgactccccgatctcagatccctgctgcgagcgaagtgttcgattcgagcagagatggcggcggcatgggcggtgctggctttgttcctcgtcgcggcgcaggtggcggcggcggcgccggtcacggcgccagcgttcctgtgggcgcccaaaaactacggattcagctctgatgatgctaaggaggtagtccattaccaaacaatctcaccaaagagcttagctaaatctgttctcgaggaaggtggctggtcaaacttcatgtgctcaagggaggatactcagaataatgttgatgttgccattgtttttattggctcaaagctgcaatcgtcagacatatctaaagataagcaagttgatccagctttagcagacacactgaagctctccttcacacgctcagagttttccatggcattcccctacgtttccaccacagtcgacgagagactagaggactcgttgctatccagctttgccgagaactgcaacaatggtttcggaagaaaccgcgtcacctacacagacacgtgtaccggtcaagatctgaagaaataccacaacatggatgccatcaatgacctggtagtgtcaggggtagcgtcaaggagagtcaaccacccaagtggacagaccgatgtaatcgtcttctgtagcggcgggttcgagaatccaggcactgcgaaatcagaaggagagctgctttcccagcttgtggacttgctggacttgtcgggagccaaatatacggtcctctatgcgtcccaaccgtctggtttgctggagagcccttcgggcctgccgctgggtaggcatctcgcggagaagaagactaacggcacgaaagctgtccagggcgaaaaatgcgatggcgagtgcctcgtcaaatctagtctcctcgaaggaactttcgttgggatagtgcttctcatcatcctgatatcaggactcatgtgcatgatggggatcgatactccctcgaggtttgaagctccccaggagtcttgatctctcccttggactgcagaatccgcgggggggttgtgacgagggcacgcggcggcgttgaggggggccggtgttctgttggtctgcactgtggatatatatcgtttagcttcccatttggaagggagtacgccttgtgtatttttttttaccgagccaactgtcactcacaatgtgctagaattttttggtgtaatatttggctatttgcgtttcgcgtctacggacaactaataagctgaggcctgaggcattgc

SEQ ID NO: 4543 - protein, 372 aa, Zea mays subsp. mays
  peptide (1)..(372): Ceres Seq. ID no. 12352272
MLPTWPPAPPEVAIRIQIAAAATPRAEEPDRTRPRRRLPDLRSLLRAKCSIRAEMAAAWAVLALFLVAAQVAAAAPVTAPAFLWAPKNYGFSSDDAKEVVHYQTISPKSLAKSVLEEGGWSNFMCSREDTQNNVDVAIVFIGSKLQSSDISKDKQVDPALADTLKLSFTRSEFSMAFPYVSTTVDERLEDSLLSSFAENCNNGFGRNRVTYTDTCTGQDLKKYHNMDAINDLVVSGVASRRVNHPSGQTDVIVFCSGGFENPGTAKSEGELLSQLVDLLDLSGAKYTVLYASQPSGLLESPSGLPLGRHLAEKKTNGTKAVQGEKCDGECLVKSSLLEGTFVGIVLLIILISGLMCMMGIDTPSRFEAPQES

SEQ ID NO: 4544 - protein, 318 aa, Zea mays subsp. mays
  peptide (1)..(318): Ceres Seq. ID no. 12352273
MAAAWAVLALFLVAAQVAAAAPVTAPAFLWAPKNYGFSSDDAKEVVHYQTISPKSLAKSVLEEGGWSNFMCSREDTQNNVDVAIVFIGSKLQSSDISKDKQVDPALADTLKLSFTRSEFSMAFPYVSTTVDERLEDSLLSSFAENCNNGFGRNRVTYTDTCTGQDLKKYHNMDAINDLVVSGVASRRVNHPSGQTDVIVFCSGGFENPGTAKSEGELLSQLVDLLDLSGAKYTVLYASQPSGLLESPSGLPLGRHLAEKKTNGTKAVQGEKCDGECLVKSSLLEGTFVGIVLLIILISGLMCMMGIDTPSRFEAPQES

SEQ ID NO: 4545 - protein, 249 aa, Zea mays subsp. mays
  peptide (1)..(249): Ceres Seq. ID no. 12352274
MCSREDTQNNVDVAIVFIGSKLQSSDISKDKQVDPALADTLKLSFTRSEFSMAFPYVSTTVDERLEDSLLSSFAENCNNGFGRNRVTYTDTCTGQDLKKYHNMDAINDLVVSGVASRRVNHPSGQTDVIVFCSGGFENPGTAKSEGELLSQLVDLLDLSGAKYTVLYASQPSGLLESPSGLPLGRHLAEKKTNGTKAVQGEKCDGECLVKSSLLEGTFVGIVLLIILISGLMCMMGIDTPSRFEAPQES

SEQ ID NO: 4546 - DNA, 909 bp, Zea mays subsp. mays; identical to SEQ ID NO: 3686
  misc_feature (1)..(909): Ceres Seq. ID no. 12356120
  misc_feature (1)..(909): Ortholog of  Ceres SEQ ID NO 12609656 as cited in SEQ ID NO 51891
  misc_feature (1)..(909): Ortholog of  Ceres SEQ ID NO 13664337 as cited in SEQ ID NO 61267
  misc_feature (1)..(909): Ortholog of  Ceres SEQ ID NO 15224278 as cited in SEQ ID NO 63590
  misc_feature (1)..(909): Ortholog of  Ceres SEQ ID NO 12635152 as cited in SEQ ID NO 0

SEQ ID NO: 4547 - protein, 198 aa, Zea mays subsp. mays; identical to SEQ ID NO: 3687
  peptide (1)..(198): Ceres Seq. ID no. 12356121

SEQ ID NO: 4548 - protein, 190 aa, Zea mays subsp. mays; identical to SEQ ID NO: 3688
  peptide (1)..(190): Ceres Seq. ID no. 12356122

SEQ ID NO: 4549 - protein, 173 aa, Zea mays subsp. mays; identical to SEQ ID NO: 3689
  peptide (1)..(173): Ceres Seq. ID no. 12356123

SEQ ID NO: 4550 - DNA, 1504 bp, Zea mays subsp. mays
  misc_feature (1)..(1504): Ceres Seq. ID no. 12381098
  misc_feature (1)..(1504): Ortholog of  Ceres SEQ ID NO 14316312 as cited in SEQ ID NO 60042
  misc_feature (1)..(1504): Ortholog of  Ceres SEQ ID NO 13598492 as cited in SEQ ID NO 63882
  misc_feature (1)..(1504): Ortholog of  Ceres SEQ ID NO 13595877 as cited in SEQ ID NO 67702
  misc_feature (1)..(1504): Ortholog of  Ceres SEQ ID NO 13654367 as cited in SEQ ID NO 67993
aagccaacacggtcacacgactgcataattgtgctcgctcgccgggccccgggacgtgacacatcgcacggccgaagcagcttgccggctgccgcgtttcgcctcccgcctgccgtgccgcccgtgaccgcgagaaggccggcagctttgcatgaggaggaggaggatgggggcactgcacgtcgtcggcgagcccaggatcagcttccgccagcagcctgcagcagtcgtcgcgaagaacggcggccacggcgccgtcgtcgaggagatccacggcctgatccgcgtctacaaggacggacacgtggagcggctcccggcgatcccagccgtgccctgcacgtggggcggcacggcccccggacgcgccgggcggcgtcgtcgcgagggacgtggtggtggaccccgcgacgggggtgtgggcgcggctgtacgcgccgacgtcggcgggggacggagccaggcgccccgtcgtggtgtacttccacggcggcgggttctgcgtcgggtccgcggcctggagctgctaccacgagttcctcgcccagctcgcggcgcgcgcgggctgcgccgtgatgtccgtggactaccggctggcgcccgagcaccgcctgccggccgcgttcgacgacgggctggccgcggtgcggtggctgcggcaccaggccgcagcgtcagcgtcagcgtcagcgtgctgcaacgacgacctgtcgtggtggcgggcccgctgcggctttgaccgcgtgttcctcatgggcgacagcgcgggcgccagcatcgccttgcacgtggccgcgaggctcgggcagggccagcttggcgcgctgccccccttgaccgtcaggggccccgtcctgatccagccattcctgggcggcgaggggcgtaccgcgtccgagaagaacgtggcgcagccgccacggtcggcgctgacgctggccacctccgactgctactggcggctggcgctgccggccggagccagccgcgagcacccctggtgcaacccgctgtcgggccgcgccgcgccgcgcctggagaccactccgctgcccccgctcctggtgtgcgtctcggagacggacatcctgcgggaccgcaacctggagctgtgcagggcgttgcgcgaggcgggcaagcgcgtggagcaggccgtgtacggcggcgtcgggcacgcgttccaggtgctccacaactgccacctgtcccagccgcggacgcaggagatgctcgcgcacatcaaggccttcgtcagcgccaggtagcaggcgccgcagcagcagccgcctcctccattcgtcgttggtccctaacaaacagacactcgccatgttaattaatccactacctaatcctaatccaatcgaagagtagatgccgtgtaagcaaccagaaccagccttgtgcagtactgtatcagtagtgtgtgacttggagcagaaagcgtccaatgcccagcccgggttgttgttgtagcggtgtcggaaagcaaaagcttatcact

SEQ ID NO: 4551 - protein, 229 aa, Zea mays subsp. mays
  peptide (1)..(229): Ceres Seq. ID no. 12381099
MSVDYRLAPEHRLPAAFDDGLAAVRWLRHQAAASASASACCNDDLSWWRARCGFDRVFLMGDSAGASIALHVAARLGQGQLGALPPLTVRGPVLIQPFLGGEGRTASEKNVAQPPRSALTLATSDCYWRLALPAGASREHPWCNPLSGRAAPRLETTPLPPLLVCVSETDILRDRNLELCRALREAGKRVEQAVYGGVGHAFQVLHNCHLSQPRTQEMLAHIKAFVSAR

SEQ ID NO: 4552 - protein, 195 aa, Zea mays subsp. mays
  peptide (1)..(195): Ceres Seq. ID no. 12381100
MRRRRMGALHVVGEPRISFRQQPAAVVAKNGGHGAVVEEIHGLIRVYKDGHVERLPAIPAVPCTWGGTAPGRAGRRRREGRGGGPRDGGVGAAVRADVGGGRSQAPRRGVLPRRRVLRRVRGLELLPRVPRPARGARGLRRDVRGLPAGARAPPAGRVRRRAGRGAVAAAPGRSVSVSVSVLQRRPVVVAGPLRL

SEQ ID NO: 4553 - protein, 191 aa, Zea mays subsp. mays
  peptide (1)..(191): Ceres Seq. ID no. 12381101
KPTRSHDCIIVLARRAPGRDTSHGRSSLPAAAFRLPPAVPPVTARRPAALHEEEEDGGTARRRRAQDQLPPAACSSRREERRPRRRRRGDPRPDPRLQGRTRGAAPGDPSRALHVGRHGPRTRRAASSRGTWWWTPRRGCGRGCTRRRRRGTEPGAPSWCTSTAAGSASGPRPGAATTSSSPSSRRARAAP

SEQ ID NO: 4554 - DNA, 1552 bp, Zea mays subsp. mays
  misc_feature (1)..(1552): Ceres Seq. ID no. 12367612
  misc_feature (1)..(1552): Ortholog of  Ceres SEQ ID NO 14313264 as cited in SEQ ID NO 67300
agattgcgagactgtacactgtagagagagacgtcgtcggcctgagcgccgtgcaagcaagcaagcggcggcaatggcggcggctcttcaagccacgccgatcaaaaccctagccacctcccgctggcgcgtcgaaggtgcggaggcgcggccgcggccgcggccgattgcggtgagcttccgttgctccgcggcggcgaggagctacaacatcacgctcttacctggggacggcatcggcccggaggtggtcgccgtcgccaaggacgtgctatccttcgccggagccctcgaaggcgtcgagctccggtttcaggagaagctggtgggcggctcggcgctggacgccaccggcgtgccactccctgacgagacgctcgacgaggccaagggttccgacgctgttctcctcggcgccattggaggctataagtgggataccaatgagaagcacctcaagcctgagaccgggctgctgcagctacgtgccggactcggggtctttgccaatctgcgaccagctgcagttttgccgcagttggtagacgcatccactctgaagaaagaggtagctgaaggtgttgacatcatggttgtcagggagcttactggaggcatctactttggcaaacccaggggttttggaacaaatgacaagggagacgatattggcttcaacacagaagtttattcagcttctgagatcgatcgtattgcacgagttgcatttgaggtcgctcgcaagagaagagggaaactatgctcggttgataaagcaaatgtgctggaggcatccatgctttggaggaaaaaggtgactgcactagcctctgaattccctgacattgagctctcacacatgtatgttgacaatgctgcaatgcagcttgtcaggaatcctaagcagtttgatacaattgtcacaaacaatatttttggtgacatattatctgatgaagcatcaatgattacgggaagcattggaatgcttccatctgcgagtgtcggtgaatcgggacctggtctttttgaacctattcatggctctgcccctgatattgctggacaggacaaggccaatccattagctacaattcttagcgcagcgatgctattgcgatatggcctaggagaagaaaatgctgcgaggagaattgaagctgcagttacagaaacactgaaccatgggttccgaactggggacatatattctcctggaacaacactggttggatgcaagcggatgggggaggaagtcttgaagacagtggagtcactgaaggaagtggctgctgtgaactgatgcatgctggtacttgattcattgcattttattagaagtcgagccgagcgtaagagagcatggtgtctgggttattgttgatgttgaattgaaagtttagtggctgaaccgatagccacttcgcatttctgtggtttgtttgtctccctgtagttttttctttggtacaaggaaaggataggcatatgtttgctcaataaaatgggatagtttatgccgctttgaataaaagatggagttctgttttgg

SEQ ID NO: 4555 - protein, 433 aa, Zea mays subsp. mays
  peptide (1)..(433): Ceres Seq. ID no. 12367613
DCETVHCRERRRRPERRASKQAAAMAAALQATPIKTLATSRWRVEGAEARPRPRPIAVSFRCSAAARSYNITLLPGDGIGPEVVAVAKDVLSFAGALEGVELRFQEKLVGGSALDATGVPLPDETLDEAKGSDAVLLGAIGGYKWDTNEKHLKPETGLLQLRAGLGVFANLRPAAVLPQLVDASTLKKEVAEGVDIMVVRELTGGIYFGKPRGFGTNDKGDDIGFNTEVYSASEIDRIARVAFEVARKRRGKLCSVDKANVLEASMLWRKKVTALASEFPDIELSHMYVDNAAMQLVRNPKQFDTIVTNNIFGDILSDEASMITGSIGMLPSASVGESGPGLFEPIHGSAPDIAGQDKANPLATILSAAMLLRYGLGEENAARRIEAAVTETLNHGFRTGDIYSPGTTLVGCKRMGEEVLKTVESLKEVAAVN

SEQ ID NO: 4556 - protein, 409 aa, Zea mays subsp. mays
  peptide (1)..(409): Ceres Seq. ID no. 12367614
MAAALQATPIKTLATSRWRVEGAEARPRPRPIAVSFRCSAAARSYNITLLPGDGIGPEVVAVAKDVLSFAGALEGVELRFQEKLVGGSALDATGVPLPDETLDEAKGSDAVLLGAIGGYKWDTNEKHLKPETGLLQLRAGLGVFANLRPAAVLPQLVDASTLKKEVAEGVDIMVVRELTGGIYFGKPRGFGTNDKGDDIGFNTEVYSASEIDRIARVAFEVARKRRGKLCSVDKANVLEASMLWRKKVTALASEFPDIELSHMYVDNAAMQLVRNPKQFDTIVTNNIFGDILSDEASMITGSIGMLPSASVGESGPGLFEPIHGSAPDIAGQDKANPLATILSAAMLLRYGLGEENAARRIEAAVTETLNHGFRTGDIYSPGTTLVGCKRMGEEVLKTVESLKEVAAVN

SEQ ID NO: 4557 - protein, 237 aa, Zea mays subsp. mays
  peptide (1)..(237): Ceres Seq. ID no. 12367615
MVVRELTGGIYFGKPRGFGTNDKGDDIGFNTEVYSASEIDRIARVAFEVARKRRGKLCSVDKANVLEASMLWRKKVTALASEFPDIELSHMYVDNAAMQLVRNPKQFDTIVTNNIFGDILSDEASMITGSIGMLPSASVGESGPGLFEPIHGSAPDIAGQDKANPLATILSAAMLLRYGLGEENAARRIEAAVTETLNHGFRTGDIYSPGTTLVGCKRMGEEVLKTVESLKEVAAVN

SEQ ID NO: 4558 - DNA, 1585 bp, Zea mays subsp. mays
  misc_feature (1)..(1585): Ceres Seq. ID no. 12381056
  misc_feature (1)..(1585): Ortholog of  Ceres SEQ ID NO 12610323 as cited in SEQ ID NO 56055
gcacgagaccattacctagaacatcctaatcgaaaaaaaatcacttcaggtaagggcgaagaagagcattccctctcccggtctccccatctcccgaaccgcgtgagccaaaccctcccagctcgcgcgccctcgatggatgcctccgccgccacccccgcccccgggccttccttctctggcgccgagtcctccgcggccgccgcccagccgccggcggaggctccgcagttgcgcgtccacggcgccggcagcggcagcggcgtcgcgcgagcctgccgccaccacgcgtacagccgcaagcagaagtcgctcggccttctctgctccaacttcgtggcgctgtacgaccgggaggacgtggaggtgattgggctggacgacgcggccaagcgtctcggcgtcgagcgacgctgatctacgacatagtcaacgttctcgagagcgtcgggattcttgtgcggagggccaagaatcggtatacatggctcggattcgggggagtccctgctgcgctgaaagaactcaaggagagggcgctaaggaagatgtccggatcaccggtgttactgtcaatggaggactcctctactgccaacttatcagatgatgaggatgatgaaaaattgggcgatgctgatgaagatgctgagagcgagaagctcagccaacctgttgacaatacgtctgataagcctgacgcacccagctgccgccttagatctgatcatcggaaggagaagtcccttgggctcctcactcagaattttgtcaagctcttcctcaacatggaggttgggacaatctcacttgacgaagctgcaaggcttctccttggagagggacatgcagacagcaacatgagaaccaaagttcgtcgattgtatgacattgccaatgtgctgtcttctttgaacctcattgagaagacgcagcaagcagacacaagaaaacctgcattccggtggctaggccaggcaaagcgaaagcaagataacaatgtcatggtttctgtacctccatcgatgaaggcaatgcccaataagagagcatttggtactgatcttacaaacattgacaataagcgaggcaagttagactcagcagcggagaacaaagtcaagctcatgcagggtgctggtaacatagtgaagacttttgagaggcagctggtgcaagggaaaaggagtgactttgtttatgggcccttccaccctgctggtgcaaagaaacacgaaactgatgatcaaactgttaagcagcaggagaggaagaacattcaggactgggaaaaccttgctgtgtccttccgtccacaatatcagaatcaagcactgaatgatctttttggtcattatgtggaagcatggaaatcatggtacgtggatcttacccaggaaacggcatcatgaagcagaatgttggcaggtcagttgtaacttgtaagccgtttccagtagttagatcaactgagttgttgatgcttgcttagggaaccaccctgtacaagatggaataaaaacacgaaggcaattttgtctttcgactgtanntnctcgaatgctagaagtgaggccattttttc

SEQ ID NO: 4559 - protein, 287 aa, Zea mays subsp. mays
  peptide (1)..(287): Ceres Seq. ID no. 12381057
MSGSPVLLSMEDSSTANLSDDEDDEKLGDADEDAESEKLSQPVDNTSDKPDAPSCRLRSDHRKEKSLGLLTQNFVKLFLNMEVGTISLDEAARLLLGEGHADSNMRTKVRRLYDIANVLSSLNLIEKTQQADTRKPAFRWLGQAKRKQDNNVMVSVPPSMKAMPNKRAFGTDLTNIDNKRGKLDSAAENKVKLMQGAGNIVKTFERQLVQGKRSDFVYGPFHPAGAKKHETDDQTVKQQERKNIQDWENLAVSFRPQYQNQALNDLFGHYVEAWKSWYVDLTQETAS

SEQ ID NO: 4560 - protein, 278 aa, Zea mays subsp. mays
  peptide (1)..(278): Ceres Seq. ID no. 12381058
MEDSSTANLSDDEDDEKLGDADEDAESEKLSQPVDNTSDKPDAPSCRLRSDHRKEKSLGLLTQNFVKLFLNMEVGTISLDEAARLLLGEGHADSNMRTKVRRLYDIANVLSSLNLIEKTQQADTRKPAFRWLGQAKRKQDNNVMVSVPPSMKAMPNKRAFGTDLTNIDNKRGKLDSAAENKVKLMQGAGNIVKTFERQLVQGKRSDFVYGPFHPAGAKKHETDDQTVKQQERKNIQDWENLAVSFRPQYQNQALNDLFGHYVEAWKSWYVDLTQETAS

SEQ ID NO: 4561 - protein, 207 aa, Zea mays subsp. mays
  peptide (1)..(207): Ceres Seq. ID no. 12381059
MEVGTISLDEAARLLLGEGHADSNMRTKVRRLYDIANVLSSLNLIEKTQQADTRKPAFRWLGQAKRKQDNNVMVSVPPSMKAMPNKRAFGTDLTNIDNKRGKLDSAAENKVKLMQGAGNIVKTFERQLVQGKRSDFVYGPFHPAGAKKHETDDQTVKQQERKNIQDWENLAVSFRPQYQNQALNDLFGHYVEAWKSWYVDLTQETAS

SEQ ID NO: 4562 - DNA, 1353 bp, Zea mays subsp. mays
  misc_feature (1)..(1353): Ceres Seq. ID no. 12352275
  misc_feature (1)..(1353): Ortholog of  Ceres SEQ ID NO 12612330 as cited in SEQ ID NO 56418
  misc_feature (1)..(1353): Ortholog of  Ceres SEQ ID NO 13664295 as cited in SEQ ID NO 61486
  misc_feature (1)..(1353): Ortholog of  Ceres SEQ ID NO 15179147 as cited in SEQ ID NO 0
accacgcgtccacgcctcaccatcgcagaagcgcagtaggaactaggaagccggacaaagctacgcaaggagggagaaagcgtgtaaaccatggcgtcctccgcgttcctcaacgctctcgtcctccgatcgccatcaccgtcgctctcgtcctcgtctaacctccgcagcaccggcgccttcgcgttcccgaaaccaccgcgcttcccatgcctgcgttctgcgcgtcgactcgtccttgcgagggcggcggcagcgccggcgccggggcgatggccccgaggacgagtgggggccggagcccgagggcggttccgctgtcacgggggccgcggtggcggaggcgccagaggcgagagaggtcgcggagctcaaggcgcagctaaaggacgcgctgtacggcacggagcggggcctgcgggcgtccagcgagtcgcgagccaaagtgctggagctcatcacgcagctcgagacgcgcaaccccacgccggctcctacggaggcgcttacgctccttaacggcaagtggatcctcgcgtacacatcgttttcccaactattcccactattggggtttggtaatctgcctcagctggtgaaggtggaggaaatatcacaaaccattgattctgagaacttcacagtgcaaaactgtatcaagttttcaggacctttggctacaacctcagttgccactaatgcaaaatttgaaattagaagccccaagcgtgtgcagatcaaatttgatgaagggattgttggtacaccacagttgaccgactccattgtgctaccagagaagtttgagttatttggacagaacatcgacctgagtccactgaaaggcatattttcttccatcgaaaatgcagcatcctaggttgcaaagaccatatctgagcagcctccgctgaaaataccgatcaggacaaacaatgctgaatcgtggttgcttacgacataccttgacgaagagctcaggatctccagaggcgatggcagcagcatctttgtgctgttcaaggagggaagtactcttctatactgagatccaaatcccgagtcgatgatcgttgaagctgaaccgtgaagtagttatactgcttatgctttcctttcttatagtaatatactccgtctcaaaataagtcaatttctagaatcacttaaagtcaaattatcttaagtttgaccaattttataggaaaggcaccatcgtctatgtctctatgacaccaaatgagtacattatgaaaaatatatgggttgtcttgtaaatacagttcttgtcattagagtatatgatgactaggaccggtttaatccgaaatatataaactctatatatcagtc

SEQ ID NO: 4563 - protein, 142 aa, Zea mays subsp. mays
  peptide (1)..(142): Ceres Seq. ID no. 12352276
MASSAFLNALVLRSPSPSLSSSSNLRSTGAFAFPKPPRFPCLRSARRLVLARAAAAPAPGRWPRGRVGAGARGRFRCHGGRGGGGARGERGRGAQGAAKGRAVRHGAGPAGVQRVASQSAGAHHAARDAQPHAGSYGGAYAP

SEQ ID NO: 4564 - DNA, 1193 bp, Zea mays subsp. mays
  misc_feature (1)..(1193): Ceres Seq. ID no. 13492699
  misc_feature (1)..(1193): Ortholog of  Ceres SEQ ID NO 13595084 as cited in SEQ ID NO 56095
  misc_feature (1)..(1193): Ortholog of  Ceres SEQ ID NO 13594252 as cited in SEQ ID NO 57528
  misc_feature (1)..(1193): Ortholog of  Ceres SEQ ID NO 13594430 as cited in SEQ ID NO 60181
agattcctcgcccaaccctaccccaggcgatctcgcatcgcatggccaccggaccgcggtctctccacgccctcctcggcggcggtgcagttgccgacttgctgctgtggcgacggaggaatgcctcggcggcagccgtggtgggcgccaccacggtctggttcgtcttcgagcgcgcggggtacagcttcccctccgtcctctccaacgccctgctcctcctcgtcgccatcctcttcttctgggccaagtctgcgtcgctgctcaacaggcctcttccacctcttcctaatcttgaggtctcagatgcgattgttgaaaaagctgcaaatcatgctcttgtatggatcaataggctgctggctgttggtcatgacatcgccatcaagagagataggaaagtttttataaaggtgatactgattttgtgggtggtttcattcattggaatgctcttcaattttcttacgcttatttacattggtgtaatgctttctctgttggttccaccactctatgagaagtaccaggaccaggttgatgagaaggttggtgtagcgtacagtgtactatcaaggcacatagataccatcattaccagggctgggcaatcagccaagcagaagaagactgagtaaaagaaacgttttgctgtattgtggaacatctctggttgtcaagtgaagttgacagtgggcctttcatctttgaccctctattccactaatatgaaccctcgatatgctgatctgaggttctgatgtgcattatgggaaatgaggcggcttgtgtatttcctttttgaacatggggtttactatgggtgcatatcgcactcggaatgatatcgagaaattgcgactcgtacatgcaattatgcaggctgcttgctctgttagtcatatgatctttccgtcagtgattttaaattttaggctgctccgaggaactttgcaggctgctccgagcaattatgcaggctgcttgctcattcgatgcccatctactggtagctcgttttctgaaatactagtacctaataaggtgtattctacgtagacagttgcatatcatgtgaataaataggtattttctggcggcagttctgtttttgctttacctgtgtttatactcccaccgtttattttgacaatgcgtacaaggtctagataagtcttttttagtgcgcttct

SEQ ID NO: 4565 - protein, 211 aa, Zea mays subsp. mays
  peptide (1)..(211): Ceres Seq. ID no. 13492700
IPRPTLPQAISHRMATGPRSLHALLGGGAVADLLLWRRRNASAAAVVGATTVWFVFERAGYSFPSVLSNALLLLVAILFFWAKSASLLNRPLPPLPNLEVSDAIVEKAANHALVWINRLLAVGHDIAIKRDRKVFIKVILILWVVSFIGMLFNFLTLIYIGVMLSLLVPPLYEKYQDQVDEKVGVAYSVLSRHIDTIITRAGQSAKQKKTE

SEQ ID NO: 4566 - protein, 198 aa, Zea mays subsp. mays
  peptide (1)..(198): Ceres Seq. ID no. 13492701
MATGPRSLHALLGGGAVADLLLWRRRNASAAAVVGATTVWFVFERAGYSFPSVLSNALLLLVAILFFWAKSASLLNRPLPPLPNLEVSDAIVEKAANHALVWINRLLAVGHDIAIKRDRKVFIKVILILWVVSFIGMLFNFLTLIYIGVMLSLLVPPLYEKYQDQVDEKVGVAYSVLSRHIDTIITRAGQSAKQKKTE

SEQ ID NO: 4567 - protein, 136 aa, Zea mays subsp. mays
  peptide (1)..(136): Ceres Seq. ID no. 13492702
RFLAQPYPRRSRIAWPPDRGLSTPSSAAVQLPTCCCGDGGMPRRQPWWAPPRSGSSSSARGTASPPSSPTPCSSSSPSSSSGPSLRRCSTGLFHLFLILRSQMRLLKKLQIMLLYGSIGCWLLVMTSPSREIGKFL

SEQ ID NO: 4568 - DNA, 1404 bp, Zea mays subsp. mays
  misc_feature (1)..(1404): Ceres Seq. ID no. 12365409
  misc_feature (1)..(1404): Ortholog of  Ceres SEQ ID NO 13655237 as cited in SEQ ID NO 62892
  misc_feature (1)..(1404): Ortholog of  Ceres SEQ ID NO 13597268 as cited in SEQ ID NO 63929
  misc_feature (1)..(1404): Ortholog of  Ceres SEQ ID NO 13659840 as cited in SEQ ID NO 66970
  misc_feature (1)..(1404): Ortholog of  Ceres SEQ ID NO 13660544 as cited in SEQ ID NO 67401
  misc_feature (1)..(1404): Ortholog of  Ceres SEQ ID NO 13624708 as cited in SEQ ID NO 0
  misc_feature (1)..(1404): Ortholog of  Ceres SEQ ID NO 15180683 as cited in SEQ ID NO 0
aaatctcctggaaattctgatcgaacctcctgcttggagcttcgcagcaacaccgtcctcacccgcgctgaaaaagcacccatcttcctattgcgcctttcttgtagagtcaagtcagctcacttttctcgtttcgatccagatcccgtattcccgttggattcgtttatcccgcgtcccgcaagcaatatcagatccttagcttctgtggttctgcacttattcagcgtctctccagcttggaccccttaaagtgttctccaggtacagctacttgaatcgtcagaaatggccactgacgccagcggaggtggtaagcctagtcttcttctgagtactttaccgaagcaactaccatcggattttctgaaagagattacggatgggttctctgctgacagaaaactgggtcaaggtggatttggaactgtttacaagggattcctgcaagacgggcaagccattgctgtgaagaagctctcagataattccccagtggcaaccgaaaaacagttcaagaatgaggttgggaaccttatggccatccagcatgagaacatagtgaggttgtatggctactgtcatgaactgcagaagaaagtgatagaacacaatggaagatacattcttgtggatgtggttcagagcatgctctgctacgaatacgcccccaaggggagccttgacaagtgtatttttgatatatcttctaggcctaattgggccacatgcttcaaaataattaagggcatttgccagggtttatatttcctacataaggggatggataggcctattgttcatctggatcttcagcctgccaacatactattggatgacaacatggtaccaaaaattgcggattttggcctgtcaaggctctttggtgaagaacaaacccgaataaacacaataaatgttgtgggagccaaagggtatatggctccagaatatctgtacagaggggagatctcaacccggtctgacatatacagcttaggcgtactaatcatggagatcacaactgggcagaagaactctccgaatgacaaagacatgtgtgcaaggaactttataaatcaggtttgccaaacatggacagacgaacacatggcatccaagtactcatcactagatgcagacagcctccagcaagtaaaagcatgcattgaaactgggctaaaatgtgtggatatcgatcagaagaagaggccctctatagttgaaattgttgacaagctcgatggaaggcttgctctctgaatggtagtgtatgctgcgcaaggtaaaactgtgatgcagagttaattctgcctatggtgatatgctctagatgcaatcacggaaacaataattgtatcacttactaatttatgtacttatgaaaaatatgttgcttgtgtc

SEQ ID NO: 4569 - protein, 324 aa, Zea mays subsp. mays
  peptide (1)..(324): Ceres Seq. ID no. 12365410
MATDASGGGKPSLLLSTLPKQLPSDFLKEITDGFSADRKLGQGGFGTVYKGFLQDGQAIAVKKLSDNSPVATEKQFKNEVGNLMAIQHENIVRLYGYCHELQKKVIEHNGRYILVDVVQSMLCYEYAPKGSLDKCIFDISSRPNWATCFKIIKGICQGLYFLHKGMDRPIVHLDLQPANILLDDNMVPKIADFGLSRLFGEEQTRINTINVVGAKGYMAPEYLYRGEISTRSDIYSLGVLIMEITTGQKNSPNDKDMCARNFINQVCQTWTDEHMASKYSSLDADSLQQVKACIETGLKCVDIDQKKRPSIVEIVDKLDGRLAL

SEQ ID NO: 4570 - protein, 241 aa, Zea mays subsp. mays
  peptide (1)..(241): Ceres Seq. ID no. 12365411
MAIQHENIVRLYGYCHELQKKVIEHNGRYILVDVVQSMLCYEYAPKGSLDKCIFDISSRPNWATCFKIIKGICQGLYFLHKGMDRPIVHLDLQPANILLDDNMVPKIADFGLSRLFGEEQTRINTINVVGAKGYMAPEYLYRGEISTRSDIYSLGVLIMEITTGQKNSPNDKDMCARNFINQVCQTWTDEHMASKYSSLDADSLQQVKACIETGLKCVDIDQKKRPSIVEIVDKLDGRLAL

SEQ ID NO: 4571 - protein, 204 aa, Zea mays subsp. mays
  peptide (1)..(204): Ceres Seq. ID no. 12365412
MLCYEYAPKGSLDKCIFDISSRPNWATCFKIIKGICQGLYFLHKGMDRPIVHLDLQPANILLDDNMVPKIADFGLSRLFGEEQTRINTINVVGAKGYMAPEYLYRGEISTRSDIYSLGVLIMEITTGQKNSPNDKDMCARNFINQVCQTWTDEHMASKYSSLDADSLQQVKACIETGLKCVDIDQKKRPSIVEIVDKLDGRLAL

SEQ ID NO: 4572 - DNA, 1673 bp, Zea mays subsp. mays; identical to SEQ ID NO: 1733
  misc_feature (1)..(1673): Ceres Seq. ID no. 12387134
  misc_feature (1)..(1673): Ortholog of  Ceres SEQ ID NO 14311862 as cited in SEQ ID NO 51654
  misc_feature (1)..(1673): Ortholog of  Ceres SEQ ID NO 13597334 as cited in SEQ ID NO 64244
  misc_feature (1)..(1673): Ortholog of  Ceres SEQ ID NO 14303165 as cited in SEQ ID NO 65181
  misc_feature (1)..(1673): Ortholog of  Ceres SEQ ID NO 15224550 as cited in SEQ ID NO 0

SEQ ID NO: 4573 - protein, 425 aa, Zea mays subsp. mays; identical to SEQ ID NO: 1734
  peptide (1)..(425): Ceres Seq. ID no. 12387135

SEQ ID NO: 4574 - protein, 414 aa, Zea mays subsp. mays; identical to SEQ ID NO: 1735
  peptide (1)..(414): Ceres Seq. ID no. 12387136

SEQ ID NO: 4575 - protein, 410 aa, Zea mays subsp. mays; identical to SEQ ID NO: 1736
  peptide (1)..(410): Ceres Seq. ID no. 12387137

SEQ ID NO: 4576 - DNA, 1337 bp, Zea mays subsp. mays
  misc_feature (1)..(1337): Ceres Seq. ID no. 13499111
  misc_feature (1)..(1337): Ortholog of  Ceres SEQ ID NO 14305022 as cited in SEQ ID NO 53586
  misc_feature (1)..(1337): Ortholog of  Ceres SEQ ID NO 12506279 as cited in SEQ ID NO 55440
  misc_feature (1)..(1337): Ortholog of  Ceres SEQ ID NO 13654847 as cited in SEQ ID NO 62459
  misc_feature (1)..(1337): Ortholog of  Ceres SEQ ID NO 15174357 as cited in SEQ ID NO 0
gcacgagaccattacctagaacatcctaatcgaaaaatgtcatttgacagcgcaacacggcgctgcagggtaaagatctcccccgctcgccggtctctctgcccaggccagcaggacgaagaagaagccggccgggaagacccaggcctgaccgcctgagctaggggagaggaggacgacgatggggctgctgtctcagcgggtggagcggtcggagatggagcccggcgaccacatctacacctggcgcgccggctacacctactcccaccacgggatttacgtcggcggcagcaaggtggtgcacttcacgcggaagagggaggcgggcggcgcgggtctggactcggccatcgccgtgtccagcctcctcctctcgcggggctcggacgagtgccccagcttcccggactgcggcttccagctccccgacagcggcgtggtgctgacctgcgtggactgcttcctcggcggcggcgcgctgcaccgctnngagtacggcgtgcccgccgcggcgttcctggccaaggtccgcgggggcacgtccaccacggcgcgcgccgacccgggcgacgccgccgtgcgccgcgccatgcacctcctccggcacggcttcggcgactacgacgtgttcgagaacaactgcgaggacttcgcgctctactgcaagacggggctcctgctcctccccgccgccgcggctggcggcggggtcgggaggagcgggcaggccgcggccgccctcggcgtgccgctggccgcgctcttctccaccccgttcaagctcgtggccgccggcccgctcggcatggccgccgtcaccgcgggcgtgtactgcgccggcaggtacgtcaccgacatcggggtgaggacggacgtggtgaaggtggaggtgaaggacctgtcggcgcacctcggctggcgccgcgccagggctcaggagaagaagaagaagcagcagcaggaggaggcgccggcggcggccaagagcttgcttccgctcaagcggaaacgggagacctgcgtttgattggcgtgcggttgcaaatagatttgatttcttcgtctttagttactgcatagaaattaataagcccgatatagatagatatatgtcctagcgttcttgcccgatgccccgatcgatattgttcgttgttctttgtacgtactctgtatcattctaagagtttcagttactcctacatacattcttcattactgcaacaagatagttgagaacacagttgttaattgagctgagctgtacgtctcgtactgttccacaatagaatgcgaaggcatgcatgaggtccacgacatttggtccatttctg

SEQ ID NO: 4577 - protein, 282 aa, Zea mays subsp. mays
  peptide (1)..(282): Ceres Seq. ID no. 13499112
  misc_feature (104)..(104): Xaa is any aa, unknown or other
MGLLSQRVERSEMEPGDHIYTWRAGYTYSHHGIYVGGSKVVHFTRKREAGGAGLDSAIAVSSLLLSRGSDECPSFPDCGFQLPDSGVVLTCVDCFLGGGALHRXEYGVPAAAFLAKVRGGTSTTARADPGDAAVRRAMHLLRHGFGDYDVFENNCEDFALYCKTGLLLLPAAAAGGGVGRSGQAAAALGVPLAALFSTPFKLVAAGPLGMAAVTAGVYCAGRYVTDIGVRTDVVKVEVKDLSAHLGWRRARAQEKKKKQQQEEAPAAAKSLLPLKRKRETCV

SEQ ID NO: 4578 - protein, 270 aa, Zea mays subsp. mays
  peptide (1)..(270): Ceres Seq. ID no. 13499113
  misc_feature (92)..(92): Xaa is any aa, unknown or other
MEPGDHIYTWRAGYTYSHHGIYVGGSKVVHFTRKREAGGAGLDSAIAVSSLLLSRGSDECPSFPDCGFQLPDSGVVLTCVDCFLGGGALHRXEYGVPAAAFLAKVRGGTSTTARADPGDAAVRRAMHLLRHGFGDYDVFENNCEDFALYCKTGLLLLPAAAAGGGVGRSGQAAAALGVPLAALFSTPFKLVAAGPLGMAAVTAGVYCAGRYVTDIGVRTDVVKVEVKDLSAHLGWRRARAQEKKKKQQQEEAPAAAKSLLPLKRKRETCV

SEQ ID NO: 4579 - protein, 145 aa, Zea mays subsp. mays
  peptide (1)..(145): Ceres Seq. ID no. 13499114
MHLLRHGFGDYDVFENNCEDFALYCKTGLLLLPAAAAGGGVGRSGQAAAALGVPLAALFSTPFKLVAAGPLGMAAVTAGVYCAGRYVTDIGVRTDVVKVEVKDLSAHLGWRRARAQEKKKKQQQEEAPAAAKSLLPLKRKRETCV

SEQ ID NO: 4580 - DNA, 890 bp, Zea mays subsp. mays
  misc_feature (1)..(890): Ceres Seq. ID no. 12387086
  misc_feature (1)..(890): Ortholog of  Ceres SEQ ID NO 13583358 as cited in SEQ ID NO 62221
  misc_feature (1)..(890): Ortholog of  Ceres SEQ ID NO 15179036 as cited in SEQ ID NO 0
aaaaaatgacttttttgttgtctgatctaatgggaatgtacggaatctcgtctcccatctcgcacttgagttgagactactgttgtgactattgtgtgcgtgagagagaaacagaagaggaaaaggaatccatggcggcgacgctggcgaggagggcggggcgctccgcggcgacgacgctatggggcgcggcgaggggcttcgcatcggtggggtccgacatcgtctctgcggctcccggcgtgtcgctgcagaaggcgcggtcctgggacgagggcgtcgccaccaagttctctaccacgcctctcaaggacatcttctacgggaagaaggtggtcatcttcggcttgcccggtgcatatacaggggtttgttcacaagcgcacgttcctagttacaagaagaatattgacaagttgaaagcaaaaggaatcgactctgttatctgtgtagctgtgaatgatccgtatgtcctggatggatgggcaaaaaagctagacgctaaagatacaattgagttctatggtgactttgatgggagtttccacaaaagcttggatttggagatagacctttctgctgctttgcttggccgccgttctcacaggtggtccgcctttgttgacgatggtaagatcaagtctttcaatgttgaggaagcaccgtccgactttaaggtttctggtgcggaggtgatcttggaccagatctgagctcctcaatgaacttcggccatcttcagtttgtgcggcatacttcctctgcagcagccgaataaaattaaatctcttacgacccgtgtaagatgttaaagatacgatgcgccccagactgtatggcctcggcctcggtttttctggaatgaattgatcagtgttcactgtgtgcgt

SEQ ID NO: 4581 - protein, 193 aa, Zea mays subsp. mays
  peptide (1)..(193): Ceres Seq. ID no. 12387087
MAATLARRAGRSAATTLWGAARGFASVGSDIVSAAPGVSLQKARSWDEGVATKFSTTPLKDIFYGKKVVIFGLPGAYTGVCSQAHVPSYKKNIDKLKAKGIDSVICVAVNDPYVLDGWAKKLDAKDTIEFYGDFDGSFHKSLDLEIDLSAALLGRRSHRWSAFVDDGKIKSFNVEEAPSDFKVSGAEVILDQI

SEQ ID NO: 4582 - DNA, 1666 bp, Zea mays subsp. mays
  misc_feature (1)..(1666): Ceres Seq. ID no. 12409899
  misc_feature (1)..(1666): Ortholog of  Ceres SEQ ID NO 15177298 as cited in SEQ ID NO 52711
tttttttgtttggatgagatcgctgcaacattgttcttgatccacacttgcctgatcttaccgtctcgttcgtgttcgtgccagcaaccagcgaaaatgggtgccggaggcaggatgaccgagaaggagcgggagaagcatgagcaggagcaggtcgcccgtgctaccggcggtggcgcggcagtgcagcggtcgccggtggagaagccgccgttcacgttggggcagatcaagaaggcgatcccgccgcactgcttcgagcgctccgtgctgaggtccttctcgtacgtggcccacgacctgtcgctcgccgcggcgctcctctacctcgcggtggccgtgataccggcgctaccctgcccgctccgctacgcggcctggccgctgtactgggtggcccaggggtgcgtgtgcacgggcgtgtgggtgatcgcgcacgagtgcggccaccacgccttctccgaccacgcgctcctggacgacgccgtcggcctggcgctgcactcggcgctgctggtgccctacttctcgtggaagtacagccaccggcgccaccactccaacacggggtccctggagcgcgacgaggtgttcgtgccgaggaccaaggaggcgctgccgtggtacgccccgtacgtgcacggcagccccgcgggccggctggcgcacgtcgccgtgcagctcaccctgggctggccgctgtacctggccaccaacgcgtcggggcgcccgtacccgcgcttcgcctgccacttcgacccctacggcccgatctacggcgaccgggagcgcgcccagatcttcgtctcggacgccggcgtcgcggccgtggcgttcgggctgtacaagctggcggcggcgttcgggctctggtgggtggtgcgcgtgtacgccgtgcccgctgctgatcgtcaacgcgtggctggtgctcatcacgtacctgcagcacacccacccggcgctgccccactacgactcgggcgagtgggactggctgcgcggcgcgctcgccaccgtcgaccgagactacggcgtcctcaaccgcgtgttccaccacatcacggacacgcacgtcgcgcaccacctcttctccaccatgccgcactaccacgccgtggaggccaccagggcgatcaggcccgtcctcggcgagtactaccagttcgacccgacccctgtcgccaaggccacctggcgcgaggccagggagtgcatctacgtcgagcctgagaaccgcaaccgcaagggcgtcttctggtacaacagcaagttctagccgccgcttgctttttccctaggaatgggaggagaaatcaggatgagaagatggtaatgtctgcatctacctgtctaatggttagtcaccagtctttagacaggaagagagcatttgggcttcagaaaaggaggcttactgcactactgcagtgccatcgctagatttaaggcaaattcagtgtgtctgtgccccatggctgtgagctttgggtactctcaagtagtcaagttctcttgtttttgtttttagtcgtcgctgttgtaggcttgccggcggcggtcgttgcgtggccgcgccttgtcgtgtgcgtcttgccatctcttcgtgctcccttcgtgttgttgtaaaacactagtctggtgtctttggcggaataacagatcgtcg

SEQ ID NO: 4583 - protein, 409 aa, Zea mays subsp. mays
  peptide (1)..(409): Ceres Seq. ID no. 12409900
FFCLDEIAATLFLIHTCLILPSRSCSCQQPAKMGAGGRMTEKEREKHEQEQVARATGGGAAVQRSPVEKPPFTLGQIKKAIPPHCFERSVLRSFSYVAHDLSLAAALLYLAVAVIPALPCPLRYAAWPLYWVAQGCVCTGVWVIAHECGHHAFSDHALLDDAVGLALHSALLVPYFSWKYSHRRHHSNTGSLERDEVFVPRTKEALPWYAPYVHGSPAGRLAHVAVQLTLGWPLYLATNASGRPYPRFACHFDPYGPIYGDRERAQIFVSDAGVAAVAFGLYKLAAAFGLWWVVRVYAVPAADRQRVAGAHHVPAAHPPGAAPLRLGRVGLAARRARHRRPRLRRPQPRVPPHHGHARRAPPLLHHAALPRRGGHQGDQARPRRVLPVRPDPCRQGHLARGQGVHLRRA

SEQ ID NO: 4584 - protein, 377 aa, Zea mays subsp. mays
  peptide (1)..(377): Ceres Seq. ID no. 12409901
MGAGGRMTEKEREKHEQEQVARATGGGAAVQRSPVEKPPFTLGQIKKAIPPHCFERSVLRSFSYVAHDLSLAAALLYLAVAVIPALPCPLRYAAWPLYWVAQGCVCTGVWVIAHECGHHAFSDHALLDDAVGLALHSALLVPYFSWKYSHRRHHSNTGSLERDEVFVPRTKEALPWYAPYVHGSPAGRLAHVAVQLTLGWPLYLATNASGRPYPRFACHFDPYGPIYGDRERAQIFVSDAGVAAVAFGLYKLAAAFGLWWVVRVYAVPAADRQRVAGAHHVPAAHPPGAAPLRLGRVGLAARRARHRRPRLRRPQPRVPPHHGHARRAPPLLHHAALPRRGGHQGDQARPRRVLPVRPDPCRQGHLARGQGVHLRRA

SEQ ID NO: 4585 - protein, 371 aa, Zea mays subsp. mays
  peptide (1)..(371): Ceres Seq. ID no. 12409902
MTEKEREKHEQEQVARATGGGAAVQRSPVEKPPFTLGQIKKAIPPHCFERSVLRSFSYVAHDLSLAAALLYLAVAVIPALPCPLRYAAWPLYWVAQGCVCTGVWVIAHECGHHAFSDHALLDDAVGLALHSALLVPYFSWKYSHRRHHSNTGSLERDEVFVPRTKEALPWYAPYVHGSPAGRLAHVAVQLTLGWPLYLATNASGRPYPRFACHFDPYGPIYGDRERAQIFVSDAGVAAVAFGLYKLAAAFGLWWVVRVYAVPAADRQRVAGAHHVPAAHPPGAAPLRLGRVGLAARRARHRRPRLRRPQPRVPPHHGHARRAPPLLHHAALPRRGGHQGDQARPRRVLPVRPDPCRQGHLARGQGVHLRRA

SEQ ID NO: 4586 - DNA, 1318 bp, Zea mays subsp. mays
  misc_feature (1)..(1318): Ceres Seq. ID no. 12350973
  misc_feature (1)..(1318): Ortholog of  Ceres SEQ ID NO 13596048 as cited in SEQ ID NO 68476
  misc_feature (1)..(1318): Ortholog of  Ceres SEQ ID NO 12589137 as cited in SEQ ID NO 0
attccatcacagattcacagccaactaaagagaaggagagcgtgtgttcgtttcgagaacgcacgcacagacgccatggaggtgacaccaaaccacaccctgaccgtgaccgggtgggcggccatgaacgagtccgccggcaaggtggagcccttcgtcttcaagagaagggagaacggcccggacgacgtgacgatcaaagtgcagtactgcggcatgtgccacacggacctgcacttcatcaacaacgactggggcatcaccacgtacccgctggtcccggggcacgagatcacgggcgtggtcaccaaggccgggcgcaacgtcacgggcttccgtgtcggcgaccgcgtcggcgtgggctgcatcgccgcctcctgcctggactgcgaccactgccgccgctccgaggagaactactgcgaccgtgtggcgctcacctacaacggcgtcttctgggacggcagcgtcacgtacggcggctactcgcgcgcgctggtggcggacaagcgcttcgtggtgcgcgtccccgacgcgctgccgctggacgccgccgcgccgctgctgtgcgcgggcgtcacggtgtacagccccatgaagcaccacggcatgctggggcaccccggcgccagcctcggcgtcgtcgggctcggcggcctcggccacgtcgccgtcaagctcgccaaggcgttcggtctccgcgtcaccgtcgtcagcacgtcgccggccaaggaggccgaggccagggcccggctcggcgccgaccgcttcgtcgtcagcaccgacgacgcgcagatgcgggacgcggccaggtccctcgactacgtcatcgacaccgtctccgccaagcactcgctcggacccatcctggacctgctcaaggtcagcggcaagctcgtgctcgtcgccgcgccggaccagcccgtcgagctcccctccttcccgctcatctttgggaagaggaccgtcagcgggagcatgacgggagggatcagggagacgcaggagatgctcgacctctgcgcccgccacaacatcacctgcgacatcgagctcgtctccacggacgggatcaacgccgcgctcgcgcgcctcgcacgcaacgacgtccgataccgcttcgtcatcgacatcgccggcgactccacctcaaaactatagttcattcaattcgttgcattattatcatctatcaatatcgtcaccagtggcaggcatggcctctggttgcttgcattttgctctctatccatatcaagtgtgtgtcagcatgggccagcgtgcatattgcgccattgcttgcagcaaataaacattc

SEQ ID NO: 4587 - protein, 438 aa, Zea mays subsp. mays
  peptide (1)..(438): Ceres Seq. ID no. 12350974
SITDSQPTKEKESVCSFRERTHRRHGGDTKPHPDRDRVGGHERVRRQGGALRLQEKGERPGRRDDQSAVLRHVPHGPALHQQRLGHHHVPAGPGARDHGRGHQGRAQRHGLPCRRPRRRGLHRRLLPGLRPLPPLRGELLRPCGAHLQRRLLGRQRHVRRLLARAGGGQALRGARPRRAAAGRRRAAAVRGRHGVQPHEAPRHAGAPRRQPRRRRARRPRPRRRQARQGVRSPRHRRQHVAGQGGRGQGPARRRPLRRQHRRRADAGRGQVPRLRHRHRLRQALARTHPGPAQGQRQARARRRAGPARRAPLLPAHLWEEDRQREHDGRDQGDAGDARPLRPPQHHLRHRARLHGRDQRRARAPRTQRRPIPLRHRHRRRLHLKTIVHSIRCIIIIYQYRHQWQAWPLVACILLSIHIKCVSAWASVHIAPLLAANKH

SEQ ID NO: 4588 - protein, 386 aa, Zea mays subsp. mays
  peptide (1)..(386): Ceres Seq. ID no. 12350975
IPSQIHSQLKRRRACVRFENARTDAMEVTPNHTLTVTGWAAMNESAGKVEPFVFKRRENGPDDVTIKVQYCGMCHTDLHFINNDWGITTYPLVPGHEITGVVTKAGRNVTGFRVGDRVGVGCIAASCLDCDHCRRSEENYCDRVALTYNGVFWDGSVTYGGYSRALVADKRFVVRVPDALPLDAAAPLLCAGVTVYSPMKHHGMLGHPGASLGVVGLGGLGHVAVKLAKAFGLRVTVVSTSPAKEAEARARLGADRFVVSTDDAQMRDAARSLDYVIDTVSAKHSLGPILDLLKVSGKLVLVAAPDQPVELPSFPLIFGKRTVSGSMTGGIRETQEMLDLCARHNITCDIELVSTDGINAALARLARNDVRYRFVIDIAGDSTSKL

SEQ ID NO: 4589 - protein, 361 aa, Zea mays subsp. mays
  peptide (1)..(361): Ceres Seq. ID no. 12350976
MEVTPNHTLTVTGWAAMNESAGKVEPFVFKRRENGPDDVTIKVQYCGMCHTDLHFINNDWGITTYPLVPGHEITGVVTKAGRNVTGFRVGDRVGVGCIAASCLDCDHCRRSEENYCDRVALTYNGVFWDGSVTYGGYSRALVADKRFVVRVPDALPLDAAAPLLCAGVTVYSPMKHHGMLGHPGASLGVVGLGGLGHVAVKLAKAFGLRVTVVSTSPAKEAEARARLGADRFVVSTDDAQMRDAARSLDYVIDTVSAKHSLGPILDLLKVSGKLVLVAAPDQPVELPSFPLIFGKRTVSGSMTGGIRETQEMLDLCARHNITCDIELVSTDGINAALARLARNDVRYRFVIDIAGDSTSKL

SEQ ID NO: 4590 - DNA, 1522 bp, Zea mays subsp. mays
  misc_feature (1)..(1522): Ceres Seq. ID no. 12341968
  misc_feature (1)..(1522): Ortholog of  Ceres SEQ ID NO 13659759 as cited in SEQ ID NO 67663
accatcctcctcttcctcgaacggtcgaaccgccgaaagcacgcaccccgccgccgcgtaccctcccctcacccgctcaccatcgccggccgccgttcggcgcgacgcggattcgaatccggaaagcgggcgatgggggcgaagcgcgcggtgctggtgggcatcaattaccagggcaccaaagcggagctcaagggctgccacaacgacgtcgctcgcatgcgccggtgcctcgtcgaccgcttcggattcgacgagtccggcatccgcgtcctcatagatgacggctccgcgccgcagcccacgggggccaacatccggcgggaactcgcgcgcctcgtcggggacgcgcggcccggggacctcctcttcttccactacagcgggcacggcatacggctgcccgccgagaccgggaaggacgacgacaccggctacgacgagtgcatcgtgccctgcgacatgaaccttatcacagaccaagatttcacggagcttgcgcaaaaagtccccagtggctgtctctttaccatagtttctgattcgtgccacagtggagggctacttgacaagaccaaggagcagattgggcacagcaccaagcagaagcagaagcagacccagacccagacccagagccgggaacttgaggaacggtctccttctggcaccagcttccgggaattcctcaaaggtactgttcgggaagcgtttgagtctcaaggaattcacctgccccaccgtagccgtagccaccagcaagggagcggtcacggcgacgacggtgaccaagagtcgcgctacatcaacacagccgatgcccacgtcaaaaaccggtcgctacctctctcgacattgatcgagatgctgaaggagaagactgggaaggacgacattgatgtagggtcaatccggctaacgctttttaacctcttcaaagacgatgccagcccgaagataaagaagttcatgaaggtcatgctgaacaagttacagcaggggcagcacggaggcattgtgggcttcatgggcgctctggcacaggaggtcctgaaagccaagctcgatggcaaggaagaagaagagttcgacccggcaatgaaacagcacgtgcacagcgatcaagaggtgtacgccgggacgacggcaagggtgccgagcaacggtgtcctgatcagtgggtgccagaccgaccagacgtctgccgacgcgaccacgccgaagggggtgtcctacggtgcgctcagcaatgccatccaggccatcctcgcggagcgtgggacggtaacgaacaaggagctcgtgctgaaagcgcgcaagatgctgtcgaaacagggctacacccaacagcctgggctctactgcagcgatgagaatgccagtgcggcttttatatgctgatgatgattcattgggtttgtcctgtggattgcaatatttgtattttgtctctaagtgcatgtgagttggactggtggttatgttttttcgctgagatttgggaatgtatcgtttctttcgc

SEQ ID NO: 4591 - protein, 466 aa, Zea mays subsp. mays
  peptide (1)..(466): Ceres Seq. ID no. 12341969
TILLFLERSNRRKHAPRRRVPSPHPLTIAGRRSARRGFESGKRAMGAKRAVLVGINYQGTKAELKGCHNDVARMRRCLVDRFGFDESGIRVLIDDGSAPQPTGANIRRELARLVGDARPGDLLFFHYSGHGIRLPAETGKDDDTGYDECIVPCDMNLITDQDFTELAQKVPSGCLFTIVSDSCHSGGLLDKTKEQIGHSTKQKQKQTQTQTQSRELEERSPSGTSFREFLKGTVREAFESQGIHLPHRSRSHQQGSGHGDDGDQESRYINTADAHVKNRSLPLSTLIEMLKEKTGKDDIDVGSIRLTLFNLFKDDASPKIKKFMKVMLNKLQQGQHGGIVGFMGALAQEVLKAKLDGKEEEEFDPAMKQHVHSDQEVYAGTTARVPSNGVLISGCQTDQTSADATTPKGVSYGALSNAIQAILAERGTVTNKELVLKARKMLSKQGYTQQPGLYCSDENASAAFIC

SEQ ID NO: 4592 - protein, 422 aa, Zea mays subsp. mays
  peptide (1)..(422): Ceres Seq. ID no. 12341970
MGAKRAVLVGINYQGTKAELKGCHNDVARMRRCLVDRFGFDESGIRVLIDDGSAPQPTGANIRRELARLVGDARPGDLLFFHYSGHGIRLPAETGKDDDTGYDECIVPCDMNLITDQDFTELAQKVPSGCLFTIVSDSCHSGGLLDKTKEQIGHSTKQKQKQTQTQTQSRELEERSPSGTSFREFLKGTVREAFESQGIHLPHRSRSHQQGSGHGDDGDQESRYINTADAHVKNRSLPLSTLIEMLKEKTGKDDIDVGSIRLTLFNLFKDDASPKIKKFMKVMLNKLQQGQHGGIVGFMGALAQEVLKAKLDGKEEEEFDPAMKQHVHSDQEVYAGTTARVPSNGVLISGCQTDQTSADATTPKGVSYGALSNAIQAILAERGTVTNKELVLKARKMLSKQGYTQQPGLYCSDENASAAFIC

SEQ ID NO: 4593 - protein, 393 aa, Zea mays subsp. mays
  peptide (1)..(393): Ceres Seq. ID no. 12341971
MRRCLVDRFGFDESGIRVLIDDGSAPQPTGANIRRELARLVGDARPGDLLFFHYSGHGIRLPAETGKDDDTGYDECIVPCDMNLITDQDFTELAQKVPSGCLFTIVSDSCHSGGLLDKTKEQIGHSTKQKQKQTQTQTQSRELEERSPSGTSFREFLKGTVREAFESQGIHLPHRSRSHQQGSGHGDDGDQESRYINTADAHVKNRSLPLSTLIEMLKEKTGKDDIDVGSIRLTLFNLFKDDASPKIKKFMKVMLNKLQQGQHGGIVGFMGALAQEVLKAKLDGKEEEEFDPAMKQHVHSDQEVYAGTTARVPSNGVLISGCQTDQTSADATTPKGVSYGALSNAIQAILAERGTVTNKELVLKARKMLSKQGYTQQPGLYCSDENASAAFIC

SEQ ID NO: 4594 - DNA, 1630 bp, Zea mays subsp. mays
  misc_feature (1)..(1630): Ceres Seq. ID no. 12362880
  misc_feature (1)..(1630): Ortholog of  Ceres SEQ ID NO 13655724 as cited in SEQ ID NO 68973
  misc_feature (1)..(1630): Ortholog of  Ceres SEQ ID NO 12625899 as cited in SEQ ID NO 69079
gcacgagaccattacctagaacatcctaatcgaaaaaattggatcttggatccatctccatgggtgcctccagtacttgcccttgccaccacttcagctcgtcttccatcctcaccaagcgggccatcgccttcgtgctctacgccctcgtccccctcgccctcatccactacctcctatctcttcctccccgtctcccctctcctcccaccaccggcgccgccacctccccgtcacggccgcagcaggcggaggaggctccggcagcgcggtgcgattactcggacggggagtgggtgcgggccgcggcaggtcctcggtacaacgggtcgagctgcggcgagacgatcaaggccggccagaactgcgaggcgcacgggcggccggacacggggtacatctactggcggtggcgcccgcgcgggtgcgcgctgccgccgttcgacccggaggagttcctgagcgcggtgcgcggtcgccacgtggccttcgttggcgactcgctcgcgcggaaccagtgcgagtccctggtgtgcctgctcgcctccgcgttcccggcccagctggtgcgcggcgctggcggcggcgacggggacggggacggcgacgagctccgcaagttccggcgctgggcgttcccgtcgcacaacgcgacggtgtcggtgttctggtcgccgttcctagtgaacggcacggagaggcccaagtcgccggcggcggcgggagggctggaccacaaccggatctacttcgaccagcccgacgagcggtgggcggcggcggtcccggggttcgacgtggtggtgctgtcggcggggcagtggtacctgaactcggccatgttctacgaccgtggcgccgtcatcggctgccatcgatgcccggagcccaaccgcaccgagacgggcttcttcggcgtgttccgcctcgccgtccgcaacgcgctccgcgaggtcatagcccgcgtcgccgccacgtcctcgcccgcgcgcccccggctggctgtgatgacgacgttctcgcccgcgcacttccagggggattgggacagcccgaccgcgtgcgtgcgcactcagccgtacgcgcgcggggagcgggagatggagtacatggatctggagatgctgcgcgccggggtggaggaggtcgccgcggccggcgaggacgcgagggtgcgcgggggcggcctggcggtggaggcgctgcaggtgacgcggctggcggcgatgcgcccggacgggcacccgggcctgtacacccgggcgttcccgttcgccaagggtgcgagggatcggatgcccaacgactgtgtgcactggtgcctgcccgggcccatcgacacgtggaacgagatcctgctgcagctcgtcaagcgatgggccatcggcgtcggcaccgacacctcgtcgccatcgccatgaactggtcttaccatgagaggttcgaagctaccgagtggccgtttggatgggcgattttggtccaaatccttgcgatggatttcgaattatttactcactcaagcgctttagattttgtagagttggcctttcgttcaagcgctcagtcaggtatctttcgcttgtattttaatgataccagaactggaatcagcttaattagtcagctt

SEQ ID NO: 4595 - protein, 453 aa, Zea mays subsp. mays
  peptide (1)..(453): Ceres Seq. ID no. 12362881
MGASSTCPCHHFSSSSILTKRAIAFVLYALVPLALIHYLLSLPPRLPSPPTTGAATSPSRPQQAEEAPAARCDYSDGEWVRAAAGPRYNGSSCGETIKAGQNCEAHGRPDTGYIYWRWRPRGCALPPFDPEEFLSAVRGRHVAFVGDSLARNQCESLVCLLASAFPAQLVRGAGGGDGDGDGDELRKFRRWAFPSHNATVSVFWSPFLVNGTERPKSPAAAGGLDHNRIYFDQPDERWAAAVPGFDVVVLSAGQWYLNSAMFYDRGAVIGCHRCPEPNRTETGFFGVFRLAVRNALREVIARVAATSSPARPRLAVMTTFSPAHFQGDWDSPTACVRTQPYARGEREMEYMDLEMLRAGVEEVAAAGEDARVRGGGLAVEALQVTRLAAMRPDGHPGLYTRAFPFAKGARDRMPNDCVHWCLPGPIDTWNEILLQLVKRWAIGVGTDTSSPSP

SEQ ID NO: 4596 - protein, 251 aa, Zea mays subsp. mays
  peptide (1)..(251): Ceres Seq. ID no. 12362882
MPGAQPHRDGLLRRVPPRRPQRAPRGHSPRRRHVLARAPPAGCDDDVLARALPGGLGQPDRVRAHSAVRARGAGDGVHGSGDAARRGGGGRRGRRGREGARGRPGGGGAAGDAAGGDAPGRAPGPVHPGVPVRQGCEGSDAQRLCALVPARAHRHVERDPAAARQAMGHRRRHRHLVAIAMNWSYHERFEATEWPFGWAILVQILAMDFELFTHSSALDFVELAFRSSAQSGIFRLYFNDTRTGISLISQL

SEQ ID NO: 4597 - DNA, 1190 bp, Zea mays subsp. mays
  misc_feature (1)..(1190): Ceres Seq. ID no. 12565974
  misc_feature (1)..(1190): Ortholog of  Ceres SEQ ID NO 12609902 as cited in SEQ ID NO 51816
aaaatactccgcctgcatctccaaagcacactgctccctctggcttcccgcctcctcttcggctccttcgcgtcccgacgccccctcatggccaccgccgccgccaccgcagcagcagtagtctcctccccggctgccccacgcgccggggccgccgccgcctcccgccgggggttcgtcacgtttggtggaggcgccgcccgcttctctcccacgctgcggtccggccgtgggttctctggtgtgcaaacccatgttgccgctgttgaacaagcaattgtaaaagatgctaccaagctggaagctccagttgttgttgttacaggtgcatctagagggattggtaaggcaactgctctagcccttggaaaagcaggatgcaaggttctggtaaactatgcccggtcctcgaaagaggctgaagaggtctccaaagagattgaagcatctggtggtgaggctatcaccttcggaggagatgtttcaaaagaagctgatgtagagtctatgatgaaagcagctctagataaatggggaacaatagatgtgctggtaaataatgcagggattacacgagacacattgttgatgaggatgaagaaatctcagtggcaagacgtaattgatctgaatcttactggtgtcttcctttgtacacaggctgcaacaaaagtaatgatgaaaaagagaaagggaaaaattatcaacattgcatctgtagttggtcttactggcaatgttggccaagctaattatagcgcagccaaggctggagtgattggtttcacaaaaacagttgccagggagtatgcaagcagaaatatcaatgtgaatgctattgcaccagggttcattgcatctgatatgactgccgaacttggagaagagcttgagaagaaaatcttgtcaaccattccgttagggagatatggccaaccagaggaagttgcagggttggtcgagttcctggcccttaaccccgcagctagctatatgactggacaggtgcttacaattgacggagggatggtaatgtaagatttgagttagcttgatgcacttctacttttgctgagcatttaatgttgaacacccttgttgtgcacgggcgattttggacaacaaattagtgttgtctctttctttgtaatactctctggtaataaatctagcatgtggaatggaagttg

SEQ ID NO: 4598 - protein, 345 aa, Zea mays subsp. mays
  peptide (1)..(345): Ceres Seq. ID no. 12565975
KILRLHLQSTLLPLASRLLFGSFASRRPLMATAAATAAAVVSSPAAPRAGAAAASRRGFVTFGGGAARFSPTLRSGRGFSGVQTHVAAVEQAIVKDATKLEAPVVVVTGASRGIGKATALALGKAGCKVLVNYARSSKEAEEVSKEIEASGGEAITFGGDVSKEADVESMMKAALDKWGTIDVLVNNAGITRDTLLMRMKKSQWQDVIDLNLTGVFLCTQAATKVMMKKRKGKIINIASVVGLTGNVGQANYSAAKAGVIGFTKTVAREYASRNINVNAIAPGFIASDMTAELGEELEKKILSTIPLGRYGQPEEVAGLVEFLALNPAASYMTGQVLTIDGGMVM

SEQ ID NO: 4599 - protein, 316 aa, Zea mays subsp. mays
  peptide (1)..(316): Ceres Seq. ID no. 12565976
MATAAATAAAVVSSPAAPRAGAAAASRRGFVTFGGGAARFSPTLRSGRGFSGVQTHVAAVEQAIVKDATKLEAPVVVVTGASRGIGKATALALGKAGCKVLVNYARSSKEAEEVSKEIEASGGEAITFGGDVSKEADVESMMKAALDKWGTIDVLVNNAGITRDTLLMRMKKSQWQDVIDLNLTGVFLCTQAATKVMMKKRKGKIINIASVVGLTGNVGQANYSAAKAGVIGFTKTVAREYASRNINVNAIAPGFIASDMTAELGEELEKKILSTIPLGRYGQPEEVAGLVEFLALNPAASYMTGQVLTIDGGMVM

SEQ ID NO: 4600 - protein, 176 aa, Zea mays subsp. mays
  peptide (1)..(176): Ceres Seq. ID no. 12565977
MMKAALDKWGTIDVLVNNAGITRDTLLMRMKKSQWQDVIDLNLTGVFLCTQAATKVMMKKRKGKIINIASVVGLTGNVGQANYSAAKAGVIGFTKTVAREYASRNINVNAIAPGFIASDMTAELGEELEKKILSTIPLGRYGQPEEVAGLVEFLALNPAASYMTGQVLTIDGGMVM

SEQ ID NO: 4601 - DNA, 431 bp, Zea mays subsp. mays
  misc_feature (1)..(431): Ceres Seq. ID no. 12376962
  misc_feature (1)..(431): Ortholog of  Ceres SEQ ID NO 12784228 as cited in SEQ ID NO 66111
tagatttgatggtgcagttcccgagccacgaaaggggattagaagtgggcatgtgcctgggagcaaatgtgttccgtttcctcaggttcttgacagctcacaaaagctattgccttcagatgagctccgtaaacggtttgagcaagaaggaatatcacttgatcagcctcttgttacctcttgtggcactggtgtgacagcatgtgtattagccttgttgcaactgctgtttagtctcttcataataggacgcccgtgctcttcatagaggacctcttgattgtatttgccccgtgctgtgattctatggaggttggttggatgcttggatgtaaggctggggaagcgaagccttttggccttcactgtaaaagctgcaacagaaaaactgtcacatgcactgaattataagataactccccttgatctcc

SEQ ID NO: 4602 - protein, 88 aa, Zea mays subsp. mays
  peptide (1)..(88): Ceres Seq. ID no. 12376963
RFDGAVPEPRKGIRSGHVPGSKCVPFPQVLDSSQKLLPSDELRKRFEQEGISLDQPLVTSCGTGVTACVLALLQLLFSLFIIGRPCSS

SEQ ID NO: 4603 - protein, 64 aa, Zea mays subsp. mays
  peptide (1)..(64): Ceres Seq. ID no. 12376964
DLMVQFPSHERGLEVGMCLGANVFRFLRFLTAHKSYCLQMSSVNGLSKKEYHLISLLLPLVALV

SEQ ID NO: 4604 - protein, 62 aa, Zea mays subsp. mays
  peptide (1)..(62): Ceres Seq. ID no. 12376965
MVQFPSHERGLEVGMCLGANVFRFLRFLTAHKSYCLQMSSVNGLSKKEYHLISLLLPLVALV

SEQ ID NO: 4605 - DNA, 2165 bp, Zea mays subsp. mays
  misc_feature (1)..(2165): Ceres Seq. ID no. 13493004
  misc_feature (1)..(2165): Ortholog of  Ceres SEQ ID NO 15178310 as cited in SEQ ID NO 1089
  misc_feature (1)..(2165): Ortholog of  Ceres SEQ ID NO 15174879 as cited in SEQ ID NO 53786
  misc_feature (1)..(2165): Ortholog of  Ceres SEQ ID NO 14313336 as cited in SEQ ID NO 55501
  misc_feature (1)..(2165): Ortholog of  Ceres SEQ ID NO 15176941 as cited in SEQ ID NO 55559
  misc_feature (1)..(2165): Ortholog of  Ceres SEQ ID NO 12583314 as cited in SEQ ID NO 56435
  misc_feature (1)..(2165): Ortholog of  Ceres SEQ ID NO 13655237 as cited in SEQ ID NO 62892
  misc_feature (1)..(2165): Ortholog of  Ceres SEQ ID NO 13655640 as cited in SEQ ID NO 63844
  misc_feature (1)..(2165): Ortholog of  Ceres SEQ ID NO 13597268 as cited in SEQ ID NO 63929
  misc_feature (1)..(2165): Ortholog of  Ceres SEQ ID NO 14303173 as cited in SEQ ID NO 66550
  misc_feature (1)..(2165): Ortholog of  Ceres SEQ ID NO 13659840 as cited in SEQ ID NO 66970
  misc_feature (1)..(2165): Ortholog of  Ceres SEQ ID NO 13660544 as cited in SEQ ID NO 67401
  misc_feature (1)..(2165): Ortholog of  Ceres SEQ ID NO 15180683 as cited in SEQ ID NO 0
tacctagaacatcctaatcgaaaaatgcgttactgtaccaatggctccccacctcctggccgtggccgtggccgtggcggccatcatcgccaccgtctcgttgctggcgcccggcgccgctgcctacccgtggccagtttgtgggacgagcaacgacttcgagcccaacagcacataccaggccaacctcaacctcctcgccgccatgctgcccaacaacgtgtccgcatccccggtcctctacgccaccgccgtcgtcggcgccgtcccggagcaggtctggggcatgggactctgccgcggcgacgccaacgccagcagctgcctcgcctgcctcacccaggcgttccaggacctgcccaacgactgctcctacaacaaggacgccgccatctactacgacccctgcaccctccactactccgacgtccacaccctcgccgacgacgacaccggcccgacgaccatgtcgtacaacatcaacaacaacgccaacgtcacctcggacccggcccggttcgagcgcctcctcgccgccctcgtcaacgccaccgccgagcacgccgcgtccaactccacccggcgattcgccacgggggaggccgacgccgacttcgaccggcagttccccaaggtgtacgcgctggcgcagtgcacgccggaccagacgccggcgcagtgccgcaagtgcctcgccggcctcatatcgcagtcgctggacgggttccagaacaacatcggaggcagggtgctctgggtcaactgcacctggcggtacgagacctcgcccttcttcaatggaccggccatggtgcgcctggcatcgtcgtcgagccctccggcagcggcagcggcaggtggaggggagaggaagtacagcgtgttcatcgtggttcttgcagttgtgctgcccactctagctgccctgaatcttgtgttttgcttctgtttctggcggcggccagcaccacaggcaaagcagtcacagcccatgtattccaccgaagcagaggacgtggaaacggtggactccatgatgatcgacgtctccgccctgcgagccgcaacagggaatttcgacgagagcaacaagctcggcgaaggcgggtttggcgcggtgtacaagggcgtcctcccggacggcgacgagatagcggtgaagcgtctgtcgaagagctcgacgcagggagtggaggagctgaagaacgagctcgcgctggtcgccaggctgaggcacaggaacctcgtcaggctcgtcggcgtgtgcctggagcagcaagaacggctgctcgtctacgagtttgtccccaaccggagcctcgacctggtactcttcggtaccgacacgcgtgagccgctcagctgggagcagaggtacaggatcataaacggcatcgctcgaggcctgcagtacctccacgaggactcccagctcaaggtagtccaccgtgatctcaaggccagcaacatcctgctagacgtggagatgaaccccaagatctcagatttcggcctcgcgaggatcttcggccgggaccagacgcaggccgtcaccagccgcgttgtcggaacctatgggtacctagcaccagaatacctgatgcgcgggaactactccgtgaaatcggacgccttcagcttcggcgtcatggtgctggagatcgtcaccgggaggaagaacaacggcagctcccacaagtccggagacctcttgaccaccgtatgggagcactgggaggccgggacggtggcggagctggtggacccgtccctgggcggaagcttcccggagggcgacgtgctgaggtgcatccacatcggtctgctctgcgtccagggggaccccgctgcccgcccggtgatgtcgtccgtcgtgacgatgcttggaaccgacacggtcaccctccaggctccatccaagccgggattcttcgccagaaagagtggcactagcacgaccgtgtccgctgatgatgggtcgatttagagattgccactagagtacagagttgccagaaagagtagctcctttttttaacgatagccatctctatcgctaataagatcctgcgttttattagtatgggaggcatgggattattgaaggtctccttgactctaaagaaaatgtcttaggacagacttgagcctaaacgtctttgttc

SEQ ID NO: 4606 - protein, 648 aa, Zea mays subsp. mays
  peptide (1)..(648): Ceres Seq. ID no. 13493005
MAPHLLAVAVAVAAIIATVSLLAPGAAAYPWPVCGTSNDFEPNSTYQANLNLLAAMLPNNVSASPVLYATAVVGAVPEQVWGMGLCRGDANASSCLACLTQAFQDLPNDCSYNKDAAIYYDPCTLHYSDVHTLADDDTGPTTMSYNINNNANVTSDPARFERLLAALVNATAEHAASNSTRRFATGEADADFDRQFPKVYALAQCTPDQTPAQCRKCLAGLISQSLDGFQNNIGGRVLWVNCTWRYETSPFFNGPAMVRLASSSSPPAAAAAGGGERKYSVFIVVLAVVLPTLAALNLVFCFCFWRRPAPQAKQSQPMYSTEAEDVETVDSMMIDVSALRAATGNFDESNKLGEGGFGAVYKGVLPDGDEIAVKRLSKSSTQGVEELKNELALVARLRHRNLVRLVGVCLEQQERLLVYEFVPNRSLDLVLFGTDTREPLSWEQRYRIINGIARGLQYLHEDSQLKVVHRDLKASNILLDVEMNPKISDFGLARIFGRDQTQAVTSRVVGTYGYLAPEYLMRGNYSVKSDAFSFGVMVLEIVTGRKNNGSSHKSGDLLTTVWEHWEAGTVAELVDPSLGGSFPEGDVLRCIHIGLLCVQGDPAARPVMSSVVTMLGTDTVTLQAPSKPGFFARKSGTSTTVSADDGSI

SEQ ID NO: 4607 - protein, 593 aa, Zea mays subsp. mays
  peptide (1)..(593): Ceres Seq. ID no. 13493006
MLPNNVSASPVLYATAVVGAVPEQVWGMGLCRGDANASSCLACLTQAFQDLPNDCSYNKDAAIYYDPCTLHYSDVHTLADDDTGPTTMSYNINNNANVTSDPARFERLLAALVNATAEHAASNSTRRFATGEADADFDRQFPKVYALAQCTPDQTPAQCRKCLAGLISQSLDGFQNNIGGRVLWVNCTWRYETSPFFNGPAMVRLASSSSPPAAAAAGGGERKYSVFIVVLAVVLPTLAALNLVFCFCFWRRPAPQAKQSQPMYSTEAEDVETVDSMMIDVSALRAATGNFDESNKLGEGGFGAVYKGVLPDGDEIAVKRLSKSSTQGVEELKNELALVARLRHRNLVRLVGVCLEQQERLLVYEFVPNRSLDLVLFGTDTREPLSWEQRYRIINGIARGLQYLHEDSQLKVVHRDLKASNILLDVEMNPKISDFGLARIFGRDQTQAVTSRVVGTYGYLAPEYLMRGNYSVKSDAFSFGVMVLEIVTGRKNNGSSHKSGDLLTTVWEHWEAGTVAELVDPSLGGSFPEGDVLRCIHIGLLCVQGDPAARPVMSSVVTMLGTDTVTLQAPSKPGFFARKSGTSTTVSADDGSI

SEQ ID NO: 4608 - protein, 566 aa, Zea mays subsp. mays
  peptide (1)..(566): Ceres Seq. ID no. 13493007
MGLCRGDANASSCLACLTQAFQDLPNDCSYNKDAAIYYDPCTLHYSDVHTLADDDTGPTTMSYNINNNANVTSDPARFERLLAALVNATAEHAASNSTRRFATGEADADFDRQFPKVYALAQCTPDQTPAQCRKCLAGLISQSLDGFQNNIGGRVLWVNCTWRYETSPFFNGPAMVRLASSSSPPAAAAAGGGERKYSVFIVVLAVVLPTLAALNLVFCFCFWRRPAPQAKQSQPMYSTEAEDVETVDSMMIDVSALRAATGNFDESNKLGEGGFGAVYKGVLPDGDEIAVKRLSKSSTQGVEELKNELALVARLRHRNLVRLVGVCLEQQERLLVYEFVPNRSLDLVLFGTDTREPLSWEQRYRIINGIARGLQYLHEDSQLKVVHRDLKASNILLDVEMNPKISDFGLARIFGRDQTQAVTSRVVGTYGYLAPEYLMRGNYSVKSDAFSFGVMVLEIVTGRKNNGSSHKSGDLLTTVWEHWEAGTVAELVDPSLGGSFPEGDVLRCIHIGLLCVQGDPAARPVMSSVVTMLGTDTVTLQAPSKPGFFARKSGTSTTVSADDGSI

SEQ ID NO: 4609 - DNA, 1752 bp, Zea mays subsp. mays
  misc_feature (1)..(1752): Ceres Seq. ID no. 12461973
  misc_feature (1)..(1752): Ortholog of  Ceres SEQ ID NO 14305026 as cited in SEQ ID NO 52980
  misc_feature (1)..(1752): Ortholog of  Ceres SEQ ID NO 15175670 as cited in SEQ ID NO 55204
gcacgagaccattacctagaacatcctaatcaaaaagtgggaactgcatgctgagagcaaacccagaaaggaaaaaggaaaaaaagaaaacagagagaggggagagtgggagacggtcggagacagaggcctcactcctccacactctcagtcgtcttccagtcccagcgctttcttggatcgcgaggaaaccactcggggagtttgcagttgcagagaactgtatcggccgaagtggttgcacggtgtgttggccttggccatgcgccacggcagggaacagagacgagcagcagggaggcagcaatggaggcgctcattgaccctgctctcgctgtaaagatagtcccgcggtgccctccgaattccacttgatccaactctcgacatgaagcggccacgcggcgctactccctccctgtctgcgatgcccaatcatcaggaagatgacggctacggcgtggtcgggatggaggcggacgtggacgtggacgtggacgaggagatgatggcgttcggcggcggcggcggcggggagaagaagcggcgcctgagcgccgagcaggtgcgcgcgctggagcggagcttcgagagtggagaacaagctggagccggagcgcaaggcgcggctggcgcgcgacctcggcctgcagccccgccaggtcgccgtctggttccagaaccgccgcgcccgctggaagaccaagcagctggagcgcgactacgccgcgctgcgccgctcctacgacgcgcttcggctcgaccacgacgcgctccgccgcgacaaggacgccctcctcgccgagatcagggagctcaaggcgaagctgggggacgacgaggacgcagcggcgagcttcacgtcggtcaaggcggagccggcggcctcggacgggccggcccccgcgggggtggggtcgtccgagatcagtgactccagcgcggtgctgaacgacgcggacccgcccgtggcggaggcgccggcgccggcgcccgaggtgcagggcacccttcttgtcgcgccggctggccccgttgccggcgcagcggcggcgaaccatggcggggtgttcttccacgggagtttcctgaaggtggaggaggacgagacgggccttttagacgacgacgggccgtgcggcgggttcttcgccgtggagcagccgccggcgatggcgtggtggaacgagcccgcggaacactggaactgaaccgaggtggacgcggcagtgcagcgtagtagaatcgggatctcggacgagcggtggaggaataaccgaatagaggaattcggagcgataaagaaggggcttttctgcaaattttgtaaaacggggttttacctagccctactttttgtcaattctcgagcgtattagcagtagacagtagtagtagtctgggtcggaacccaggtcaagctcagcgcctgggttgcgtttggactccagtgcagaattgcgtagaggatttagaggaagagcggagctgagctgagcgaggcaggagtaaaggacaacctgtatgtcactgttagtgggcccagtgccacgtgaaagtcaggcactgttggtgcccattgacggccggacttgccagcgacgcggatgggcgacgtgaacgtgtctggccgagcagtgcgctcgctccctccccccaatgggccatggcctcttccgcgaaagcgtgctcccctgtaagtatctgatttggatgctagccaaggctgctggatgattacttcgattatct

SEQ ID NO: 4610 - protein, 181 aa, Zea mays subsp. mays
  peptide (1)..(181): Ceres Seq. ID no. 12461974
MKRPRGATPSLSAMPNHQEDDGYGVVGMEADVDVDVDEEMMAFGGGGGGEKKRRLSAEQVRALERSFESGEQAGAGAQGAAGARPRPAAPPGRRLVPEPPRPLEDQAAGARLRRAAPLLRRASARPRRAPPRQGRPPRRDQGAQGEAGGRRGRSGELHVGQGGAGGLGRAGPRGGGVVRDQ

SEQ ID NO: 4611 - protein, 168 aa, Zea mays subsp. mays
  peptide (1)..(168): Ceres Seq. ID no. 12461975
MPNHQEDDGYGVVGMEADVDVDVDEEMMAFGGGGGGEKKRRLSAEQVRALERSFESGEQAGAGAQGAAGARPRPAAPPGRRLVPEPPRPLEDQAAGARLRRAAPLLRRASARPRRAPPRQGRPPRRDQGAQGEAGGRRGRSGELHVGQGGAGGLGRAGPRGGGVVRDQ

SEQ ID NO: 4612 - protein, 154 aa, Zea mays subsp. mays
  peptide (1)..(154): Ceres Seq. ID no. 12461976
MEADVDVDVDEEMMAFGGGGGGEKKRRLSAEQVRALERSFESGEQAGAGAQGAAGARPRPAAPPGRRLVPEPPRPLEDQAAGARLRRAAPLLRRASARPRRAPPRQGRPPRRDQGAQGEAGGRRGRSGELHVGQGGAGGLGRAGPRGGGVVRDQ

SEQ ID NO: 4613 - DNA, 1176 bp, Zea mays subsp. mays
  misc_feature (1)..(1176): Ceres Seq. ID no. 12566580
  misc_feature (1)..(1176): Ortholog of  Ceres SEQ ID NO 13599328 as cited in SEQ ID NO 1002
  misc_feature (1)..(1176): Ortholog of  Ceres SEQ ID NO 14302544 as cited in SEQ ID NO 56628
  misc_feature (1)..(1176): Ortholog of  Ceres SEQ ID NO 14312239 as cited in SEQ ID NO 59176
  misc_feature (1)..(1176): Ortholog of  Ceres SEQ ID NO 14302529 as cited in SEQ ID NO 59789
  misc_feature (1)..(1176): Ortholog of  Ceres SEQ ID NO 13584819 as cited in SEQ ID NO 64536
  misc_feature (1)..(1176): Ortholog of  Ceres SEQ ID NO 13663748 as cited in SEQ ID NO 67516
  misc_feature (1)..(1176): Ortholog of  Ceres SEQ ID NO 12635897 as cited in SEQ ID NO 0
atctccatctccatcttcctcgcagcgccggcgatccatcttccgctgcctcccttcctcgcgctcgggctctcagtgacggcatcagcggtttcccctcccgcctctcgccagtcgcatcacgccctcgcctccggtccaccgcacaccggccggtgaccctgcattacttgctaatctttcttgagggcagatggccgtttcttttgcaaatgtcaacgccgaggcagggctgaaaaagcttgatgagtaccttctcactcgcagctacatcactggctaccaagcttccaaggatgacctggctgtctactcttcatttttggctgatccctcatccaagtatatcaatgtagcaaggtggtttaatcacattgatgcactcctgaggctgagtggagttaccgcagagggcctaggtgttaaggttgagccatcagcggttccttcagcttcaattcttgatgttgctgatggacaggccccagctgctgacgaggatgacgatgatgatgttgacctttttggcgaggagactgaagaggagaagaaggctgctgaagaacgtgctgcggctgccaaggcttctggcaagaagaaagaatctgggaaatcgtcagttttacttgatgtgaagccatgggacgatgagactgacatggccaagctcgaggaagctgttaggagtgtccagatggaaggactgctttggggcgcatccaagcttgtcccagttggatatggcatcaagaagctgcaaatcatgatgaccattgtcgatgaccttgtctctgttgacactctcatcgaggaccatctctgcgctgagccagtgagcgaatacgtccagagctgcgacattgtcgccttcaacaagatctaaatttccttgtgatggtggcaatggtggttggtgggcactgtaccagcctaatttataattttccatgagcatcttcaagagtttttctaaattatcatttggagtcatttacataaaaagcactttctatatctttttaatctcaacaacttttctatatcttgtttgcaccctggagagctatttacgttttctatatttagctagcgagaaacctggatggctggaatagaagataactatatttagacaatactttaaataagctgttggaagatagtaattcttgtgtc

SEQ ID NO: 4614 - protein, 229 aa, Zea mays subsp. mays
  peptide (1)..(229): Ceres Seq. ID no. 12566581
MAVSFANVNAEAGLKKLDEYLLTRSYITGYQASKDDLAVYSSFLADPSSKYINVARWFNHIDALLRLSGVTAEGLGVKVEPSAVPSASILDVADGQAPAADEDDDDDVDLFGEETEEEKKAAEERAAAAKASGKKKESGKSSVLLDVKPWDDETDMAKLEEAVRSVQMEGLLWGASKLVPVGYGIKKLQIMMTIVDDLVSVDTLIEDHLCAEPVSEYVQSCDIVAFNKI

SEQ ID NO: 4615 - DNA, 1547 bp, Zea mays subsp. mays
  misc_feature (1)..(1547): Ceres Seq. ID no. 12409896
  misc_feature (1)..(1547): Ortholog of  Ceres SEQ ID NO 13654431 as cited in SEQ ID NO 67761
attttcaaacccggaaaaaccccaagcgcattgaggaagcggccagcggtggtcccttcccccctccagtctccactctccagagtccagacctccactccactgtccactccaaagcgcagcagcgggcaaaaccaggcacccgcccgatccgattcggcttccgtctcactcatctcgcccggcctccacggagagatctggcggcggaggcgatgccactgggcgacggcgcggaggcggcggacttcgtgctgccggacgagctcctggcggcgctgccgcgggacccctacgagcagctggatctggcacgccgcatcaccgcgctggcggtgtccgggcgggtgtccggcctggagcgggaggcggggcgcctgcgggcggaggccgcggggaaggaccgcgagaacgccgagctccgggagcgagtggtgctgctcgacaccgcgctgcaggagaccaacgccaggctcccgcgccgcgctcgaggacaatattaagctcagcaaggagcgagactcgctggcgcagacgtccaagaagctggcgcgcgacctgcagaagctggagtcattcaagaggcatctgatgcagtcattgcgtgatgatagttcatcaccacaggaaacagttgacattacaacatgtgaccagtcagtagcaacaaaagcatcgtctagtggagatggtggatctggcagccaccctacaacaaatatatttagtgaatctttggatgctggaagtacgaaccgagacggtacggcatcaaggcctccgatccaaaaatatgccccctcatcgcacatcactccttggcttacccccaaggccactcctaaaataatgtccacttctgcttctccaaggcaaatatctaccacagcaacaccgaagctgatgtctggtgctacctcgccaacaaaatctcgaattgaagctcacatgtcaatgacaccatggtacccatcaagcaagcagtcatcggcagctagctcacctccacgaggaggttcaaacccaggtcggactcctcgtgttgatggaaaggaattttttcgccaagccaggagtcgtctatcctatgaacaatttggagcattcttagccaacatcaaagaactcaatgcccataagcagtcccgtgaggaaactctcaagaaagctgaggacatctttggtcccgaaaacaaagatctatatctgtctttccgaggcttgctaaatcgtagcatgccgtaggctccgtatgtctcttttttgttgttgggtttgcaggtaatgaagttgccgcattggcaacttattgccatctaagttgtggatttgaagatctagttggaagttttgccccccataatccacactaggtttaacgagcgtcgagcggacctctctgaacaactgagtgcgctaacccagagttgctcctgtaagtggtgcacctgtcgagtgctaaactataggatgcatcctgtcatggtgcctacattcttcgtaaaaccatgaaacagaatcttgggagtaaaattccatctcgtctc

SEQ ID NO: 4616 - protein, 414 aa, Zea mays subsp. mays
  peptide (1)..(414): Ceres Seq. ID no. 12409897
IFKPGKTPSALRKRPAVVPSPLQSPLSRVQTSTPLSTPKRSSGQNQAPARSDSASVSLISPGLHGEIWRRRRCHWATARRRRTSCCRTSSWRRCRGTPTSSWIWHAASPRWRCPGGCPAWSGRRGACGRRPRGRTARTPSSGSEWCCSTPRCRRPTPGSRAALEDNIKLSKERDSLAQTSKKLARDLQKLESFKRHLMQSLRDDSSSPQETVDITTCDQSVATKASSSGDGGSGSHPTTNIFSESLDAGSTNRDGTASRPPIQKYAPSSHITPWLTPKATPKIMSTSASPRQISTTATPKLMSGATSPTKSRIEAHMSMTPWYPSSKQSSAASSPPRGGSNPGRTPRVDGKEFFRQARSRLSYEQFGAFLANIKELNAHKQSREETLKKAEDIFGPENKDLYLSFRGLLNRSMP

SEQ ID NO: 4617 - protein, 217 aa, Zea mays subsp. mays
  peptide (1)..(217): Ceres Seq. ID no. 12409898
MQSLRDDSSSPQETVDITTCDQSVATKASSSGDGGSGSHPTTNIFSESLDAGSTNRDGTASRPPIQKYAPSSHITPWLTPKATPKIMSTSASPRQISTTATPKLMSGATSPTKSRIEAHMSMTPWYPSSKQSSAASSPPRGGSNPGRTPRVDGKEFFRQARSRLSYEQFGAFLANIKELNAHKQSREETLKKAEDIFGPENKDLYLSFRGLLNRSMP

SEQ ID NO: 4618 - DNA, 1681 bp, Zea mays subsp. mays
  misc_feature (1)..(1681): Ceres Seq. ID no. 12373285
  misc_feature (1)..(1681): Ortholog of  Ceres SEQ ID NO 14302828 as cited in SEQ ID NO 65549
atcgcgtgcgctctgtggaccgtggtggcgactactgggtggccgccgccacccccgctcggccgccctacgccaggtgctcaccgtcttcgggaccttcgccggcaacgaacactcaccagggaggatgttgcccttgtttagacactgctgtgcctttggaagtcatcatcctcatcccttaatttggaggaacatcttccaaacatcgcgaagagaacaaaaacaaatcaggagttgggatgcacagtgctcagcaaatcaggatcaagcttctatagagaaatgcaatgctccaaagaatttaccaatacctgataattcacttctcgatgctcgtattctctattgtacctctcctgccctgggtcataacaaagaagcacacccagaatcgaacaaaagagttcctgtgatagttgatactcttgagaaattggagcttagtcccaagcatcgtggttcacaggttcttgaaattcaaaatttcaaccctgcttctctagatgatgttgcacgagttcattcaagatcttacatcactggactagaaaaggctatgggcagagcttcagatgaaggtctgatattgattgaagggacaggaccaacatacgctacagaaactactttccgagaatcacttctatcagctggtgccggaatcacactggttgattcagtggtcgcagcgtcaaagttaggtcctaatccgccccttggctttgcattgataaggccaccaggacatcatgctgttcctcaaggtcccatgggtttttgtgtctttgggaacattgcagtggcagctcggtacgctcagcatcaacatggactaaagcgtgtgatgataatagattttgatgttcaccatggcaatgggacgtcagattcattttatgatgatccagatatcttcttcttgtcaactcaccagcttggaagctaccctggtactggtaagatcaatgaagtcggacagggtgatggtgaaggcacgacactcaaccttcctctgcccggtggcgcaggtgactacgcaatgagatgtgcatttgatgaggtcattgctccatcggcccatcgattcaagcctgatataatccttgtatcagctggatacgacgcacacgcgctggaccctctggctggccttcagttcacaacaggcacgttctacatgctggcatccagcatcaagcaggtgaccaaggaactctgtggtggccgctgtgtcttcttcctggaaggcgggtacaacctgcagtcgctctccagctccgttgccgacacgttccgtgcattccttgatgagcccagcctcgcagcacagtttgatgatccagcgatacttttcgaagagccgactcggaagatcaaggaagcaatcgagaaggccaagagcatccactcactctaggctgtcagctaattttccccccaatccccagaaatcccggaggggtagccctaaattgggaaaaggtgctgtcagcagtgtgcactgcagaactgcaagatcttgtggcaattggcattttgcaggtaggtagtgcatagtttgaacttggaaggcatggtcattttaatttagccaattctcaccagaaaatggaattaccgttctctcaatactagctgtatatattgaccaaaagttatgtgctacattattaatttt

SEQ ID NO: 4619 - protein, 472 aa, Zea mays subsp. mays
  peptide (1)..(472): Ceres Seq. ID no. 12373286
SRALCGPWWRLLGGRRHPRSAALRQVLTVFGTFAGNEHSPGRMLPLFRHCCAFGSHHPHPLIWRNIFQTSRREQKQIRSWDAQCSANQDQASIEKCNAPKNLPIPDNSLLDARILYCTSPALGHNKEAHPESNKRVPVIVDTLEKLELSPKHRGSQVLEIQNFNPASLDDVARVHSRSYITGLEKAMGRASDEGLILIEGTGPTYATETTFRESLLSAGAGITLVDSVVAASKLGPNPPLGFALIRPPGHHAVPQGPMGFCVFGNIAVAARYAQHQHGLKRVMIIDFDVHHGNGTSDSFYDDPDIFFLSTHQLGSYPGTGKINEVGQGDGEGTTLNLPLPGGAGDYAMRCAFDEVIAPSAHRFKPDIILVSAGYDAHALDPLAGLQFTTGTFYMLASSIKQVTKELCGGRCVFFLEGGYNLQSLSSSVADTFRAFLDEPSLAAQFDDPAILFEEPTRKIKEAIEKAKSIHSL

SEQ ID NO: 4620 - protein, 430 aa, Zea mays subsp. mays
  peptide (1)..(430): Ceres Seq. ID no. 12373287
MLPLFRHCCAFGSHHPHPLIWRNIFQTSRREQKQIRSWDAQCSANQDQASIEKCNAPKNLPIPDNSLLDARILYCTSPALGHNKEAHPESNKRVPVIVDTLEKLELSPKHRGSQVLEIQNFNPASLDDVARVHSRSYITGLEKAMGRASDEGLILIEGTGPTYATETTFRESLLSAGAGITLVDSVVAASKLGPNPPLGFALIRPPGHHAVPQGPMGFCVFGNIAVAARYAQHQHGLKRVMIIDFDVHHGNGTSDSFYDDPDIFFLSTHQLGSYPGTGKINEVGQGDGEGTTLNLPLPGGAGDYAMRCAFDEVIAPSAHRFKPDIILVSAGYDAHALDPLAGLQFTTGTFYMLASSIKQVTKELCGGRCVFFLEGGYNLQSLSSSVADTFRAFLDEPSLAAQFDDPAILFEEPTRKIKEAIEKAKSIHSL

SEQ ID NO: 4621 - protein, 286 aa, Zea mays subsp. mays
  peptide (1)..(286): Ceres Seq. ID no. 12373288
MGRASDEGLILIEGTGPTYATETTFRESLLSAGAGITLVDSVVAASKLGPNPPLGFALIRPPGHHAVPQGPMGFCVFGNIAVAARYAQHQHGLKRVMIIDFDVHHGNGTSDSFYDDPDIFFLSTHQLGSYPGTGKINEVGQGDGEGTTLNLPLPGGAGDYAMRCAFDEVIAPSAHRFKPDIILVSAGYDAHALDPLAGLQFTTGTFYMLASSIKQVTKELCGGRCVFFLEGGYNLQSLSSSVADTFRAFLDEPSLAAQFDDPAILFEEPTRKIKEAIEKAKSIHSL

SEQ ID NO: 4622 - DNA, 1418 bp, Zea mays subsp. mays
  misc_feature (1)..(1418): Ceres Seq. ID no. 12382218
  misc_feature (1)..(1418): Ortholog of  Ceres SEQ ID NO 15175496 as cited in SEQ ID NO 56127
  misc_feature (1)..(1418): Ortholog of  Ceres SEQ ID NO 15175700 as cited in SEQ ID NO 58584
  misc_feature (1)..(1418): Ortholog of  Ceres SEQ ID NO 13596474 as cited in SEQ ID NO 62169
  misc_feature (1)..(1418): Ortholog of  Ceres SEQ ID NO 13596969 as cited in SEQ ID NO 63375
  misc_feature (1)..(1418): Ortholog of  Ceres SEQ ID NO 13597519 as cited in SEQ ID NO 64759
  misc_feature (1)..(1418): Ortholog of  Ceres SEQ ID NO 13597870 as cited in SEQ ID NO 64982
  misc_feature (1)..(1418): Ortholog of  Ceres SEQ ID NO 13595926 as cited in SEQ ID NO 67778
  misc_feature (1)..(1418): Ortholog of  Ceres SEQ ID NO 12567001 as cited in SEQ ID NO 0
gcacgagaccattacctagaacatcctaatcgaaaaaaagagctcgagaccgacaggacgagactcgcagctagctgacacggccgagaagcagcttcattgcaggcgtagtacgtacccagcagcagctagcactagcagtccatcggagcgacgatggtgagaaggacggtgctggcggcgctgctggtggccgccgccctcgccggcggcgcgcgggcgcagctcaaggaggggttctacgactactcctgcccacaggcggagaagatcgtcaaggactacgtgaaggcgcacatcccccacgcgcccgacgtcgcctccaccctgctccgcacccacttccacgactgcttcgtcaggggctgcgacgcgtcagtgctgctcaacgcgacgggcggcagcgaggcggagaaggacgcggcgcccaacctgacgctgcgcggcttcggcttcatcgaccgcatcaaggcgctgctcgagaaggagtgccccggcgtggtgtcctgcgccgacatcgtcgcgctcgccgcccgcgactccgtcggcgtcatcggcggtccgttctggagcgtgccgacggggaggcgcgacggcaccgtgtccatcaagcaggaggcgctggaccagatccccgcgcccaccatgaacttcacccaactcctccagtccttccagaacaagagcctcaacctcgccgacctcgtctggctctcaggggctcacacgatcggcatctcccaatgcaactccttcagcgagcgcctgtacaacttcacggggcgcggcgggcccgacgacgcggacccgtcgctggacccgctgtacgccgcgaagttgcggctcaagtgcaagacgctgacggacaacacgacgatcgtggagatggaccccggcagcttccgcaccttcgacctgagctactaccgcggcgtgctcaagcggcggggcctgttccagtccgacgccgcgctcatcaccgacgccgcctccaaggccgacatcctcagcgtgatcaacgcgccgcccgaggtgttcttccaggtcttcgcgggctccatggtcaagatgggcgccatcgaggtcaagaccggctccgagggcgagatcaggaagcactgcgccctcgtcaacaagcactaggcggcggaattcatgcgggagatggctccattgctcgcaaaaaatccttgtgagacacacaacatgctctgcatctgcaggcgttgtcgtcaccttggtggacgtagtacatcggtgcatggattatctgttgtttaatttgtacgttcagttcattctgtttcttgtattcttttggttcctttcctcttgtttattcatggatgatgaggtgtttctgttttattctctggttcagctgtaaccatgtaacatgtaaggtgcgcgttttgtcc

SEQ ID NO: 4623 - protein, 328 aa, Zea mays subsp. mays
  peptide (1)..(328): Ceres Seq. ID no. 12382219
MVRRTVLAALLVAAALAGGARAQLKEGFYDYSCPQAEKIVKDYVKAHIPHAPDVASTLLRTHFHDCFVRGCDASVLLNATGGSEAEKDAAPNLTLRGFGFIDRIKALLEKECPGVVSCADIVALAARDSVGVIGGPFWSVPTGRRDGTVSIKQEALDQIPAPTMNFTQLLQSFQNKSLNLADLVWLSGAHTIGISQCNSFSERLYNFTGRGGPDDADPSLDPLYAAKLRLKCKTLTDNTTIVEMDPGSFRTFDLSYYRGVLKRRGLFQSDAALITDAASKADILSVINAPPEVFFQVFAGSMVKMGAIEVKTGSEGEIRKHCALVNKH

SEQ ID NO: 4624 - protein, 165 aa, Zea mays subsp. mays
  peptide (1)..(165): Ceres Seq. ID no. 12382220
MNFTQLLQSFQNKSLNLADLVWLSGAHTIGISQCNSFSERLYNFTGRGGPDDADPSLDPLYAAKLRLKCKTLTDNTTIVEMDPGSFRTFDLSYYRGVLKRRGLFQSDAALITDAASKADILSVINAPPEVFFQVFAGSMVKMGAIEVKTGSEGEIRKHCALVNKH

SEQ ID NO: 4625 - DNA, 1611 bp, Zea mays subsp. mays
  misc_feature (1)..(1611): Ceres Seq. ID no. 12344708
  misc_feature (1)..(1611): Ortholog of  Ceres SEQ ID NO 15171508 as cited in SEQ ID NO 58526
  misc_feature (1)..(1611): Ortholog of  Ceres SEQ ID NO 15225226 as cited in SEQ ID NO 58693
  misc_feature (1)..(1611): Ortholog of  Ceres SEQ ID NO 15168378 as cited in SEQ ID NO 59129
  misc_feature (1)..(1611): Ortholog of  Ceres SEQ ID NO 13654989 as cited in SEQ ID NO 63117
  misc_feature (1)..(1611): Ortholog of  Ceres SEQ ID NO 13656662 as cited in SEQ ID NO 65594
  misc_feature (1)..(1611): Ortholog of  Ceres SEQ ID NO 13584744 as cited in SEQ ID NO 69137
aaaagcctgtctagaaccaaacacccctctccaccgactgcaaataatccgactcccactgctgggtgccctgtcccctacctcgggttccgcgcagaggaaggtgagacaccaattccactcccaaaccccacgaaaaccctcgccgtcttcgtccaaatcactcgcttgatctctcctctccgaacccggcaaccccttgaactagggttccagcgacccaatgacggacggcgacgacgagtacaagcgcgaggagtcggtggccctgctggtcatcgtcttcctcgccgcgctctcgctcctttccgtcatcgctgccttcgcctactactgctacattactcgcaaggtctcccgtcgcctccaggcgttccatatccccaagcgttccagctcccatcatacgcttcctccccgggccctgccgccgcagcagcaggggacggacaacccgtccagtaactccaccagagatggtgtcggagcggcggcgatgtcggtggtggctgctggggagaggggcgtgcaggtgttcagctaccggcagcttcacgcggccacgggtgggtttgaccgggcgcacatggttgggcagggcagcttcgggaccgtgtaccgcggggtgctccccgacgggaggaaggtcgcggtcaagctcatggaccgcccagggaaacagggagaagatgagtttgagatggaggtggagttgctgagtaggctccgatcaccgtatttattgggcctgattggccattgttcggaaggtgaacactgtctacttgtatatgagttcatggccaatgggggtctccaggagcatctctatccaaacagaggttcatgtggtggaatctcaaaattggactgggacacaagaatgagaattgcacttgaagcagccaaaggtttggaatatcttcatgaacatgttaatccacctgttatacatagagacttcaagagtagcaatattctcctggacaaggacttccatgcaagaatttcagactttggtctagccaaacttggatctgatagagctggtggtcatgtctcaactcgagttttgggcacacaaggctatgttgcaccagagtatgcattggctgggcatttgactaccaaatcagatgtgtacagttatggtgttgtgcttttggaattgcttactggcagagtaccagttgatatgaagaggtctcctggagaaggtgttttagttaactgggcattgcctatgctcactgaccgagataaagttgtgcggatcttggatccagcatcggaaggtcaatattccttgaaagatgctgtccaagtggctgctattgctgccatgtgtgttcaaccagaggctgactataggccattaatggctgatgttgtccaatcgctggttccacttgtcaagaaccgttataatcagaaatcttgcaatcccaatgtgcaaccatcgaagccacttgactaggagaaaagctagtgtttgatctgcagtttgtgctcgtccttctggaacccttctcgagttctcgtctataacgaactactgttgagacagattcacacgcttcctaacaatgatttcgtctgctggtgccctcc

SEQ ID NO: 4626 - protein, 417 aa, Zea mays subsp. mays
  peptide (1)..(417): Ceres Seq. ID no. 12344709
MTDGDDEYKREESVALLVIVFLAALSLLSVIAAFAYYCYITRKVSRRLQAFHIPKRSSSHHTLPPRALPPQQQGTDNPSSNSTRDGVGAAAMSVVAAGERGVQVFSYRQLHAATGGFDRAHMVGQGSFGTVYRGVLPDGRKVAVKLMDRPGKQGEDEFEMEVELLSRLRSPYLLGLIGHCSEGEHCLLVYEFMANGGLQEHLYPNRGSCGGISKLDWDTRMRIALEAAKGLEYLHEHVNPPVIHRDFKSSNILLDKDFHARISDFGLAKLGSDRAGGHVSTRVLGTQGYVAPEYALAGHLTTKSDVYSYGVVLLELLTGRVPVDMKRSPGEGVLVNWALPMLTDRDKVVRILDPASEGQYSLKDAVQVAAIAAMCVQPEADYRPLMADVVQSLVPLVKNRYNQKSCNPNVQPSKPLD

SEQ ID NO: 4627 - protein, 326 aa, Zea mays subsp. mays
  peptide (1)..(326): Ceres Seq. ID no. 12344710
MSVVAAGERGVQVFSYRQLHAATGGFDRAHMVGQGSFGTVYRGVLPDGRKVAVKLMDRPGKQGEDEFEMEVELLSRLRSPYLLGLIGHCSEGEHCLLVYEFMANGGLQEHLYPNRGSCGGISKLDWDTRMRIALEAAKGLEYLHEHVNPPVIHRDFKSSNILLDKDFHARISDFGLAKLGSDRAGGHVSTRVLGTQGYVAPEYALAGHLTTKSDVYSYGVVLLELLTGRVPVDMKRSPGEGVLVNWALPMLTDRDKVVRILDPASEGQYSLKDAVQVAAIAAMCVQPEADYRPLMADVVQSLVPLVKNRYNQKSCNPNVQPSKPLD

SEQ ID NO: 4628 - protein, 296 aa, Zea mays subsp. mays
  peptide (1)..(296): Ceres Seq. ID no. 12344711
MVGQGSFGTVYRGVLPDGRKVAVKLMDRPGKQGEDEFEMEVELLSRLRSPYLLGLIGHCSEGEHCLLVYEFMANGGLQEHLYPNRGSCGGISKLDWDTRMRIALEAAKGLEYLHEHVNPPVIHRDFKSSNILLDKDFHARISDFGLAKLGSDRAGGHVSTRVLGTQGYVAPEYALAGHLTTKSDVYSYGVVLLELLTGRVPVDMKRSPGEGVLVNWALPMLTDRDKVVRILDPASEGQYSLKDAVQVAAIAAMCVQPEADYRPLMADVVQSLVPLVKNRYNQKSCNPNVQPSKPLD

SEQ ID NO: 4629 - DNA, 1524 bp, Zea mays subsp. mays
  misc_feature (1)..(1524): Ceres Seq. ID no. 12365476
  misc_feature (1)..(1524): Ortholog of  Ceres SEQ ID NO 14305944 as cited in SEQ ID NO 52294
  misc_feature (1)..(1524): Ortholog of  Ceres SEQ ID NO 14307370 as cited in SEQ ID NO 54127
  misc_feature (1)..(1524): Ortholog of  Ceres SEQ ID NO 13596338 as cited in SEQ ID NO 68005
  misc_feature (1)..(1524): Ortholog of  Ceres SEQ ID NO 14302128 as cited in SEQ ID NO 0
agagattagtgaatccaaaaggcgaccaaacagatcccccgcaccccgctcctgtgctccgctcatggcagagaaccccctgggaaaacgcagcggagaaactctggagatcgaaaccccggcacgcagctaggcgaactgcacgcagctgcaggtcgacagtctaatcaatttcttgtcgcttcagcttctggtgctggtcttcttccagttgcatcctggttacctgtgtcaaggggcggttggtgtctggtgtagttggagggcagagcttcggcggcggcgaagaagaagagcagcagagagactctgctgacactgaccgagggagatatgatgaggaagctgagagagttgctgcagaagagcgacaaccgcgtatgtgccgactgcggcgcacctgatcccaaatgggcatcggctaacattggagtattcatttgcctaaagtgttctggtgttcacagaagcctcgggacacatgtttcaaaggtgctgtcagtcacactagatcaatggacggatgatgagatcaactccatgatagaagttggtggaaactcttatgccaatgctatatatgaagcatttctgccagagggctatcagaagccgcatccagattctagccaagaagagagagctgatttcatcaggtcgaagtatgagttgcaagaattcctgaagccaagcctaaggttagtttccagcaataagggctctttagaggctaccagtaccagctctcgaaaacataaggacaatactgtgtctctttctgctagtttcagcagtgaggctggaatggttgagttcattggaatactaaaagttaaagtgataagagggactaaactagctgtaagagacctgatgagtagtgacccctatattgtactgaccctaggacagcagaaagcaaaaacttctgtgagtaaacgtaatctgaatcctgtttggaatgaagagcttaagctgtcagttccccagcagtacgggcctctgaagcttcaagtgttcgaccacgacatgctatcgaaggatgacgagatgggtgacgcagagattgacctgcagccgatgatcagtgcagctacagcgtttggcgaccctgatctgctcgcggacatgcagatcggcaagtggctcaggtccccagataatgcgctggcaagggacagcgccgtcaatgtcgttggtggcaaggtcaagcaggaggtctctctgaggctgcagaacgtggaatcgggggaggtggaactggagctggagtggataccactcaatcagtagagttcaaatccacctgtaggctatatgtgatgcatgtttcatgtgtgccacacaagtcctgatgctcttgatcatcttcagtttgtcagggtgcctgcagtgttgtagactatctttgcggttgtagaatcagtgtcggagcccggccaccgtgactggttcagcaactctgtacaatgatagtttgaggactcaatgacttgttagtacaagtatgagactgttgtttgc

SEQ ID NO: 4630 - protein, 319 aa, Zea mays subsp. mays
  peptide (1)..(319): Ceres Seq. ID no. 12365477
MMRKLRELLQKSDNRVCADCGAPDPKWASANIGVFICLKCSGVHRSLGTHVSKVLSVTLDQWTDDEINSMIEVGGNSYANAIYEAFLPEGYQKPHPDSSQEERADFIRSKYELQEFLKPSLRLVSSNKGSLEATSTSSRKHKDNTVSLSASFSSEAGMVEFIGILKVKVIRGTKLAVRDLMSSDPYIVLTLGQQKAKTSVSKRNLNPVWNEELKLSVPQQYGPLKLQVFDHDMLSKDDEMGDAEIDLQPMISAATAFGDPDLLADMQIGKWLRSPDNALARDSAVNVVGGKVKQEVSLRLQNVESGEVELELEWIPLNQ

SEQ ID NO: 4631 - protein, 318 aa, Zea mays subsp. mays
  peptide (1)..(318): Ceres Seq. ID no. 12365478
MRKLRELLQKSDNRVCADCGAPDPKWASANIGVFICLKCSGVHRSLGTHVSKVLSVTLDQWTDDEINSMIEVGGNSYANAIYEAFLPEGYQKPHPDSSQEERADFIRSKYELQEFLKPSLRLVSSNKGSLEATSTSSRKHKDNTVSLSASFSSEAGMVEFIGILKVKVIRGTKLAVRDLMSSDPYIVLTLGQQKAKTSVSKRNLNPVWNEELKLSVPQQYGPLKLQVFDHDMLSKDDEMGDAEIDLQPMISAATAFGDPDLLADMQIGKWLRSPDNALARDSAVNVVGGKVKQEVSLRLQNVESGEVELELEWIPLNQ

SEQ ID NO: 4632 - protein, 250 aa, Zea mays subsp. mays
  peptide (1)..(250): Ceres Seq. ID no. 12365479
MIEVGGNSYANAIYEAFLPEGYQKPHPDSSQEERADFIRSKYELQEFLKPSLRLVSSNKGSLEATSTSSRKHKDNTVSLSASFSSEAGMVEFIGILKVKVIRGTKLAVRDLMSSDPYIVLTLGQQKAKTSVSKRNLNPVWNEELKLSVPQQYGPLKLQVFDHDMLSKDDEMGDAEIDLQPMISAATAFGDPDLLADMQIGKWLRSPDNALARDSAVNVVGGKVKQEVSLRLQNVESGEVELELEWIPLNQ

SEQ ID NO: 4633 - DNA, 1419 bp, Zea mays subsp. mays
  misc_feature (1)..(1419): Ceres Seq. ID no. 12383193
  misc_feature (1)..(1419): Ortholog of  Ceres SEQ ID NO 15177270 as cited in SEQ ID NO 51703
gcacgagaccattacctagaacatcctaatcgaaaaattacggacacacgggcaccccgtctcctcttttttctctctgtctcctcaccaaagaaccgcagctaggaacggctcgccacagaagaacgtacggctatgaagacgaggcgcggtgcctgctactcctgccatgcggcgccgggcgagggcccggaggtgcaacgccggaagaggcgcaggacggcggccgaggcatcgccggcggctgccgaagatccaggtgtccgcctgggcgccagagacatgttcgaggatctgcccgacgatctcgtcgtctccatactgagggacgtcgccgcgtccgccggctcgccggccgatctcgccggcgccatgctcacgtgcaagagattcagggagctagtagcgcggagcaaggtggtggtgctcgcgcgggcgtcgccgcggtgcctctcggtgcgcgccaaggcctggtcggacgaggcgcaccggttcctgcagcgctgcgccgacgccggcaacctcgaagcctgctaccttctcggcatgattcggttctactgcctggggagccgcggctcgggcgcggcgctgatggcggcggcggcggtgggcgggcaccgcgaggcgctgtactcgctggccgtgatccagttcaacggcagcggcggcgggaaggacgaccgcgacctccgcgccggagccgcgctgtgcgcgcgcgcggcggcgcggggncacgtgnacgcgctccgngagctggggcactgnctgcaggacggctacggcgtgcgccggtccgtgctggacgggcggngcctnctcatnnaggcaaacgcgcgcgagctcgcggccgcctcggcggcgcacccgtgcctncttctgagcgacttggggtgccacgccggcgaggcgcacgcggccaaccggttcctggtggactggttcgcgtcgcggccgctgggcttgacgcccggcggcaacggcaacggcagcgccgggacggcgggctcggcggaggaggacggcgttggcggtctccggctgtgctcgcaggcgctgtgcgggcggcccgagacgcggcggcacgagttcaggcggtgctcggtgtgcggcgtggtgaactactgctcccgcgcgtgccaggcgctgcactggaggatggcgcacaaggcggagtgcacgcccatggaccggtggctcgacgcggtgcagcccaacgccatcgccaatgcggacgcggcggccccggcgccgtgacgttctccgttactatatatgtcagttagcggccggccgtttctctgttttgccttttgcgtcgttctctgaacctgcgtacgtacatggtttgttggcaaatgctgatgtaacgttcttctggcgcgggcgatacgtagaacataggcagtgaaatttttt

SEQ ID NO: 4634 - protein, 373 aa, Zea mays subsp. mays
  peptide (1)..(373): Ceres Seq. ID no. 12383194
  misc_feature (200)..(200): Xaa is any aa, unknown or other
  misc_feature (203)..(203): Xaa is any aa, unknown or other
  misc_feature (206)..(206): Xaa is any aa, unknown or other
  misc_feature (211)..(211): Xaa is any aa, unknown or other
  misc_feature (227)..(227): Xaa is any aa, unknown or other
  misc_feature (228)..(228): Xaa is any aa, unknown or other
  misc_feature (230)..(230): Xaa is any aa, unknown or other
  misc_feature (231)..(231): Xaa is any aa, unknown or other
  misc_feature (247)..(247): Xaa is any aa, unknown or other
MKTRRGACYSCHAAPGEGPEVQRRKRRRTAAEASPAAAEDPGVRLGARDMFEDLPDDLVVSILRDVAASAGSPADLAGAMLTCKRFRELVARSKVVVLARASPRCLSVRAKAWSDEAHRFLQRCADAGNLEACYLLGMIRFYCLGSRGSGAALMAAAAVGGHREALYSLAVIQFNGSGGGKDDRDLRAGAALCARAAARXHVXALXELGHXLQDGYGVRRSVLDGRXXLXXANARELAAASAAHPCXLLSDLGCHAGEAHAANRFLVDWFASRPLGLTPGGNGNGSAGTAGSAEEDGVGGLRLCSQALCGRPETRRHEFRRCSVCGVVNYCSRACQALHWRMAHKAECTPMDRWLDAVQPNAIANADAAAPAP

SEQ ID NO: 4635 - protein, 324 aa, Zea mays subsp. mays
  peptide (1)..(324): Ceres Seq. ID no. 12383195
  misc_feature (151)..(151): Xaa is any aa, unknown or other
  misc_feature (154)..(154): Xaa is any aa, unknown or other
  misc_feature (157)..(157): Xaa is any aa, unknown or other
  misc_feature (162)..(162): Xaa is any aa, unknown or other
  misc_feature (178)..(178): Xaa is any aa, unknown or other
  misc_feature (179)..(179): Xaa is any aa, unknown or other
  misc_feature (181)..(181): Xaa is any aa, unknown or other
  misc_feature (182)..(182): Xaa is any aa, unknown or other
  misc_feature (198)..(198): Xaa is any aa, unknown or other
MFEDLPDDLVVSILRDVAASAGSPADLAGAMLTCKRFRELVARSKVVVLARASPRCLSVRAKAWSDEAHRFLQRCADAGNLEACYLLGMIRFYCLGSRGSGAALMAAAAVGGHREALYSLAVIQFNGSGGGKDDRDLRAGAALCARAAARXHVXALXELGHXLQDGYGVRRSVLDGRXXLXXANARELAAASAAHPCXLLSDLGCHAGEAHAANRFLVDWFASRPLGLTPGGNGNGSAGTAGSAEEDGVGGLRLCSQALCGRPETRRHEFRRCSVCGVVNYCSRACQALHWRMAHKAECTPMDRWLDAVQPNAIANADAAAPAP

SEQ ID NO: 4636 - protein, 294 aa, Zea mays subsp. mays
  peptide (1)..(294): Ceres Seq. ID no. 12383196
  misc_feature (121)..(121): Xaa is any aa, unknown or other
  misc_feature (124)..(124): Xaa is any aa, unknown or other
  misc_feature (127)..(127): Xaa is any aa, unknown or other
  misc_feature (132)..(132): Xaa is any aa, unknown or other
  misc_feature (148)..(148): Xaa is any aa, unknown or other
  misc_feature (149)..(149): Xaa is any aa, unknown or other
  misc_feature (151)..(151): Xaa is any aa, unknown or other
  misc_feature (152)..(152): Xaa is any aa, unknown or other
  misc_feature (168)..(168): Xaa is any aa, unknown or other
MLTCKRFRELVARSKVVVLARASPRCLSVRAKAWSDEAHRFLQRCADAGNLEACYLLGMIRFYCLGSRGSGAALMAAAAVGGHREALYSLAVIQFNGSGGGKDDRDLRAGAALCARAAARXHVXALXELGHXLQDGYGVRRSVLDGRXXLXXANARELAAASAAHPCXLLSDLGCHAGEAHAANRFLVDWFASRPLGLTPGGNGNGSAGTAGSAEEDGVGGLRLCSQALCGRPETRRHEFRRCSVCGVVNYCSRACQALHWRMAHKAECTPMDRWLDAVQPNAIANADAAAPAP

SEQ ID NO: 4637 - DNA, 1364 bp, Zea mays subsp. mays
  misc_feature (1)..(1364): Ceres Seq. ID no. 12346003
  misc_feature (1)..(1364): Ortholog of  Ceres SEQ ID NO 15176941 as cited in SEQ ID NO 55559
gaaaaaaagaaccgcgagacgcaagccagcaacaacgccgtggaagatgcggtgatcgaggtcgggccagtcgagacgttcctgaatcagatcctgaacgagaagccgatgcgtttcagctccgagcaactggcggcctgcacccggaactactcgtcggagctgggatccggcggctacggcacggtctacaagggtgagctcccgaacggcctgctggtggccgtgaaggtgctcaaggtgtccatgaacaagaaggtgcaggaggcgttcatggcggagatcggcactataggccggacgtaccacgtgcacctcgtccgcctctacggcttctgcttcgacgcgaacaccaaggcactagtctacgagtatttggagaaggggtcgctggagaagtacctttactacggcgacgtggagtgcagcacgagcacgggcaaaaggcttgagtggggaacgctgcacggcatcgccgtcggcacggcgaaggggatcaggtacctgcacgaggagtgccagcagcggatcgtgcactacgacatcaagccggccaacatcctgctcacggccgatgacaccccgaaggtggccgacttcgggctggcacgactgggcgagcgcgaggacacgcacatgtcgctgaccggcggcggccgcgggacgcccgggtacgcggcgccggagctgtggatggcgctgccggcgtcggagaagtgcgacgtgtacagcttcgggatggtgctgttcgagatcctggggcagcgcaggaactacgacccctgccggggcgagagcagagagtggttcccgagatgggtgtgggagaggtacgagcagggtgagattgagtacgtcgtgtcgtgcgatgggatcggggaggcggacatggagaaggcagagatcatgtgcaaggtggcgctgtggtgcgtgcagttccagccggcggcgcggccgacgatgagcagcgtggtgcggatgctggagggggagatgccgattgtcccgcctgtgaacccattccactacgtcatggacagcagcagtggctcaactagctcggggctgtggagtgacacataccaaagtagcagagagaccattggcattgccatagacagtgagctatcggttagccctattgccaagtcgacttgattgtaagatgatgatcggactcatatgttgatgttgatgaaatcctgtactgtttgcttattataaacaaaaaaaggctgaggtttgtaaattagcatcatgcataagaatcaaagatatgcgagttgagtggattagtgtggtgtggcacatgtaggctatccctggctaataagctaagtaccgaaagatagagggcttgtttg

SEQ ID NO: 4638 - protein, 385 aa, Zea mays subsp. mays
  peptide (1)..(385): Ceres Seq. ID no. 12346004
EKKNRETQASNNAVEDAVIEVGPVETFLNQILNEKPMRFSSEQLAACTRNYSSELGSGGYGTVYKGELPNGLLVAVKVLKVSMNKKVQEAFMAEIGTIGRTYHVHLVRLYGFCFDANTKALVYEYLEKGSLEKYLYYGDVECSTSTGKRLEWGTLHGIAVGTAKGIRYLHEECQQRIVHYDIKPANILLTADDTPKVADFGLARLGEREDTHMSLTGGGRGTPGYAAPELWMALPASEKCDVYSFGMVLFEILGQRRNYDPCRGESREWFPRWVWERYEQGEIEYVVSCDGIGEADMEKAEIMCKVALWCVQFQPAARPTMSSVVRMLEGEMPIVPPVNPFHYVMDSSSGSTSSGLWSDTYQSSRETIGIAIDSELSVSPIAKST

SEQ ID NO: 4639 - protein, 349 aa, Zea mays subsp. mays
  peptide (1)..(349): Ceres Seq. ID no. 12346005
MRFSSEQLAACTRNYSSELGSGGYGTVYKGELPNGLLVAVKVLKVSMNKKVQEAFMAEIGTIGRTYHVHLVRLYGFCFDANTKALVYEYLEKGSLEKYLYYGDVECSTSTGKRLEWGTLHGIAVGTAKGIRYLHEECQQRIVHYDIKPANILLTADDTPKVADFGLARLGEREDTHMSLTGGGRGTPGYAAPELWMALPASEKCDVYSFGMVLFEILGQRRNYDPCRGESREWFPRWVWERYEQGEIEYVVSCDGIGEADMEKAEIMCKVALWCVQFQPAARPTMSSVVRMLEGEMPIVPPVNPFHYVMDSSSGSTSSGLWSDTYQSSRETIGIAIDSELSVSPIAKST

SEQ ID NO: 4640 - protein, 303 aa, Zea mays subsp. mays
  peptide (1)..(303): Ceres Seq. ID no. 12346006
MNKKVQEAFMAEIGTIGRTYHVHLVRLYGFCFDANTKALVYEYLEKGSLEKYLYYGDVECSTSTGKRLEWGTLHGIAVGTAKGIRYLHEECQQRIVHYDIKPANILLTADDTPKVADFGLARLGEREDTHMSLTGGGRGTPGYAAPELWMALPASEKCDVYSFGMVLFEILGQRRNYDPCRGESREWFPRWVWERYEQGEIEYVVSCDGIGEADMEKAEIMCKVALWCVQFQPAARPTMSSVVRMLEGEMPIVPPVNPFHYVMDSSSGSTSSGLWSDTYQSSRETIGIAIDSELSVSPIAKST

SEQ ID NO: 4641 - DNA, 1180 bp, Zea mays subsp. mays
  misc_feature (1)..(1180): Ceres Seq. ID no. 12363224
  misc_feature (1)..(1180): Ortholog of  Ceres SEQ ID NO 13594560 as cited in SEQ ID NO 51329
  misc_feature (1)..(1180): Ortholog of  Ceres SEQ ID NO 12613701 as cited in SEQ ID NO 67983
gcacgagaccattacctagaacatcctaatcaaaaaaaggggcggcattcagtgattcagccgccagtcccgctcgtctctgccaagtcccgcgcgctcgagcatcgatcagccgctggcgccgcgacgagcgacgacgccgcgccagtcgcgcgcagatggccgccgtctcgctcctgcgagccgcggcgctcgggctggttgtcctcgcgtcggcgctgccgtcggctcggccgtggagcaaggagggtcacgtgctcacatgccaaatcgcgcagggtctgctggagcctgacgccgcgcacgccgtgcggaacctgctcccggacgacgccggcggcgacctgtccggcgctgtgcgtgtggccggaccaggtgaggcactggtacaggtacatgtggacgggcccgctccacttcatcgacacccctgacgaggcctgcagcttcgactactcgagggactgccacggccccgacggcgccaaggacatgtgcgtcgccggcgccatcgccaacttcacgtcccagctgctgcactacaggcacggcagcgccgacaggagatacaacctgactgaagcccttctgttcctgtcgcacttcatgggagatgttcatcagccaatgcacgtggggttcaccagcgaccaaggcggcaactccatagagctgcggtggttccggcacaaatccaacctccaccacgtgtgggacagggagatcatacagacggctctcgccgacttctacggcaaggacatggacgccttccgcaagcagctcgagcacaacctcaccaagggtacctggtccgacgatgtatcggcttggacagactgccaagacctctcgtcttgcccaaccaagtacgcgaccgagagcataggcctggcgtgcaaatgggcgtacagcggcgtccgcgaaggggagacactgtccgacgactactttgactcgaggctgccgatcgtgtcgcggcggatcgcgcagggcggggtgcggctggccatgttcctcaaccggatcttcggcgcgcacaaccgcgacgtgccgccgccgtcttcttgattgatggatggacccgatcccgatctgcctgtcgcgtcacagactcgaagtctaatctaatccatgtggttgtagtgtctttgcttctttttaagtaaataagtaattc

SEQ ID NO: 4642 - protein, 356 aa, Zea mays subsp. mays
  peptide (1)..(356): Ceres Seq. ID no. 12363225
ARDHYLEHPNQKKGRHSVIQPPVPLVSAKSRALEHRSAAGAATSDDAAPVARRWPPSRSCEPRRSGWLSSRRRCRRLGRGARRVTCSHAKSRRVCWSLTPRTPCGTCSRTTPAATCPALCVWPDQVRHWYRYMWTGPLHFIDTPDEACSFDYSRDCHGPDGAKDMCVAGAIANFTSQLLHYRHGSADRRYNLTEALLFLSHFMGDVHQPMHVGFTSDQGGNSIELRWFRHKSNLHHVWDREIIQTALADFYGKDMDAFRKQLEHNLTKGTWSDDVSAWTDCQDLSSCPTKYATESIGLACKWAYSGVREGETLSDDYFDSRLPIVSRRIAQGGVRLAMFLNRIFGAHNRDVPPPSS

SEQ ID NO: 4643 - protein, 224 aa, Zea mays subsp. mays
  peptide (1)..(224): Ceres Seq. ID no. 12363226
MWTGPLHFIDTPDEACSFDYSRDCHGPDGAKDMCVAGAIANFTSQLLHYRHGSADRRYNLTEALLFLSHFMGDVHQPMHVGFTSDQGGNSIELRWFRHKSNLHHVWDREIIQTALADFYGKDMDAFRKQLEHNLTKGTWSDDVSAWTDCQDLSSCPTKYATESIGLACKWAYSGVREGETLSDDYFDSRLPIVSRRIAQGGVRLAMFLNRIFGAHNRDVPPPSS

SEQ ID NO: 4644 - protein, 192 aa, Zea mays subsp. mays
  peptide (1)..(192): Ceres Seq. ID no. 12363227
MCVAGAIANFTSQLLHYRHGSADRRYNLTEALLFLSHFMGDVHQPMHVGFTSDQGGNSIELRWFRHKSNLHHVWDREIIQTALADFYGKDMDAFRKQLEHNLTKGTWSDDVSAWTDCQDLSSCPTKYATESIGLACKWAYSGVREGETLSDDYFDSRLPIVSRRIAQGGVRLAMFLNRIFGAHNRDVPPPSS

SEQ ID NO: 4645 - DNA, 683 bp, Zea mays subsp. mays
  misc_feature (1)..(683): Ceres Seq. ID no. 12346028
  misc_feature (1)..(683): Ortholog of  Ceres SEQ ID NO 13600072 as cited in SEQ ID NO 0
acgcatccgcgaaatccaagagcagcagcagcagcagaccaagatcgagggagggaggaagacagacagacagacagagagatggagcggatgagctcgtcggtgcagtcctgggtggaggaacacaagctctcgtccatcggagccgtgtgggcgacggcggtgggcgcgtccgtggcgtacagccggcggagggcgccggcgcgggccacgagcctgcgcctcatccacgccaggatgcacgcccaggcgctcacgctcgccgtgctcgggggagccgcgctcgcgcaccgctattacggcagcagcgagaggaggcagaggcaggaggacctggactacggcttcaaatcccagctgccgccggccaccgacgccgagggcaacgagaacgagcgctggagctggtagtggcagggcagactagcagtgagtgaccagtgagccttcagatgcatacatcagatcagagagaaggaaggaagagggacaataaatagattaattagtactagtagcaataataataattgcatgcctgtttgccaatcaatgatacatgacgtggcgcctgatcctgttcgtcacggcccataaacccaggaagcagctagcccatgtatgtgtggcctgttatgcgttaccgtacttcgttttcactcgttaatagtactctagatttc

SEQ ID NO: 4646 - protein, 144 aa, Zea mays subsp. mays
  peptide (1)..(144): Ceres Seq. ID no. 12346029
ASAKSKSSSSSRPRSREGGRQTDRQRDGADELVGAVLGGGTQALVHRSRVGDGGGRVRGVQPAEGAGAGHEPAPHPRQDARPGAHARRARGSRARAPLLRQQREEAEAGGPGLRLQIPAAAGHRRRGQRERALELVVAGQTSSE

SEQ ID NO: 4647 - protein, 136 aa, Zea mays subsp. mays
  peptide (1)..(136): Ceres Seq. ID no. 12346030
THPRNPRAAAAADQDRGREEDRQTDREMERMSSSVQSWVEEHKLSSIGAVWATAVGASVAYSRRRAPARATSLRLIHARMHAQALTLAVLGGAALAHRYYGSSERRQRQEDLDYGFKSQLPPATDAEGNENERWSW

SEQ ID NO: 4648 - protein, 109 aa, Zea mays subsp. mays
  peptide (1)..(109): Ceres Seq. ID no. 12346031
MERMSSSVQSWVEEHKLSSIGAVWATAVGASVAYSRRRAPARATSLRLIHARMHAQALTLAVLGGAALAHRYYGSSERRQRQEDLDYGFKSQLPPATDAEGNENERWSW

SEQ ID NO: 4649 - DNA, 1448 bp, Zea mays subsp. mays
  misc_feature (1)..(1448): Ceres Seq. ID no. 12373281
  misc_feature (1)..(1448): Ortholog of  Ceres SEQ ID NO 14311489 as cited in SEQ ID NO 51404
  misc_feature (1)..(1448): Ortholog of  Ceres SEQ ID NO 12607391 as cited in SEQ ID NO 59508
  misc_feature (1)..(1448): Ortholog of  Ceres SEQ ID NO 15169292 as cited in SEQ ID NO 59616
atatccccgcagtttctagctcgattccccaaccgccgtgcttccgctctcgcaccgcgtcttccttgttcgtgtgctccttcctcagacccaggctcttcccgagtccgaatccgagtctgagatccagatccgcgctcagatccatcgctggggggcgccatgaacccgacgcgccccgcgcaggcgtcgttccgcgaccgtaccaacgagttccgcgccgcagttgagagcgcgcgccgccacgctgcaccttcctcgtcgtcggcccccaccgcggcgagcagcagctctaccgggtccctcgacgggatgatctcggccacgtcggctcgctcggagttcaacaaccgcgcgtccaagatcgggctcgggatccaccagacctcccagaagctagcccgccttgccaaattggcaaagagaacgtctgtttttgatgatcctacattagagattcaagagctgacctcagttatcaaaaaggatatcacggctttgaatactgctgtcgtagacctacaagctctctgcaattcacaaaatgagagtggcagtctctccaaggacacaacaaaccattccactacagtcgtggacaaccttaaaaatcgtctgatgagtgcaacaaaagaatttaaagaagttcttaccatgcgaaccgagaatttgaaggttcatgaaaatagaaggcaaatattttcttcgtcagctgcaaaggatgagtcaaatccattcatccgtcaacgaccccttgttgctagggatccatcggagtcctctgtgcccccagcaccatgggccagcgactctgcatctaccccactattccagaggaagaagactaatggagatcatggagcatcatcatcatctcagcctttcgtgcagcagcagcaattggcagtacaacaggacagttacatgcagagcagagctgaagctctacaaaatgtggaatcaacaatccatgagctgagcaacatctttacacagttggcaaccatggtttctcaacagggagagctagcaatcagaatcgacgagaacatggaggaaaccgtggctaacgtggagggagcgcagggccagctcctgaagtacctcaacagcatttcgtccaacaggtggctgatgatgaagatattctttgtgctgatggtgttcctcatgatcttcatattcttcgtcgcttgaccttctgcaatcattctgcccgagacgctctggctgctaaacgcatagcattcttttatttttaactcatactacaccgtgtacacaattttcacccatggatgatgagcagagtcgttcacccttttgtggtcatgtaaatcgggaggagttccagtacttaagtttactcttgattggtaatatctccactgtatttgatgtatcagtatgctgaacagtaatagtaataggcaggtggtagcagtgtt

SEQ ID NO: 4650 - protein, 344 aa, Zea mays subsp. mays
  peptide (1)..(344): Ceres Seq. ID no. 12373282
MNPTRPAQASFRDRTNEFRAAVESARRHAAPSSSSAPTAASSSSTGSLDGMISATSARSEFNNRASKIGLGIHQTSQKLARLAKLAKRTSVFDDPTLEIQELTSVIKKDITALNTAVVDLQALCNSQNESGSLSKDTTNHSTTVVDNLKNRLMSATKEFKEVLTMRTENLKVHENRRQIFSSSAAKDESNPFIRQRPLVARDPSESSVPPAPWASDSASTPLFQRKKTNGDHGASSSSQPFVQQQQLAVQQDSYMQSRAEALQNVESTIHELSNIFTQLATMVSQQGELAIRIDENMEETVANVEGAQGQLLKYLNSISSNRWLMMKIFFVLMVFLMIFIFFVA

SEQ ID NO: 4651 - protein, 294 aa, Zea mays subsp. mays
  peptide (1)..(294): Ceres Seq. ID no. 12373283
MISATSARSEFNNRASKIGLGIHQTSQKLARLAKLAKRTSVFDDPTLEIQELTSVIKKDITALNTAVVDLQALCNSQNESGSLSKDTTNHSTTVVDNLKNRLMSATKEFKEVLTMRTENLKVHENRRQIFSSSAAKDESNPFIRQRPLVARDPSESSVPPAPWASDSASTPLFQRKKTNGDHGASSSSQPFVQQQQLAVQQDSYMQSRAEALQNVESTIHELSNIFTQLATMVSQQGELAIRIDENMEETVANVEGAQGQLLKYLNSISSNRWLMMKIFFVLMVFLMIFIFFVA

SEQ ID NO: 4652 - protein, 192 aa, Zea mays subsp. mays
  peptide (1)..(192): Ceres Seq. ID no. 12373284
MSATKEFKEVLTMRTENLKVHENRRQIFSSSAAKDESNPFIRQRPLVARDPSESSVPPAPWASDSASTPLFQRKKTNGDHGASSSSQPFVQQQQLAVQQDSYMQSRAEALQNVESTIHELSNIFTQLATMVSQQGELAIRIDENMEETVANVEGAQGQLLKYLNSISSNRWLMMKIFFVLMVFLMIFIFFVA

SEQ ID NO: 4653 - DNA, 1974 bp, Zea mays subsp. mays
  misc_feature (1)..(1974): Ceres Seq. ID no. 12356209
  misc_feature (1)..(1974): Ortholog of  Ceres SEQ ID NO 14313288 as cited in SEQ ID NO 67419
atgccattccgtggtcccgaacgacgccctcgctcgtgcactctctggtctctttctcttcgcctgaccctgagcacagcgccacagacacaacaacctcggactcgggagtacgtgtagctaggcccgatcggtcgagactgagtgcctgccgtgccgagacaggatgaccaaagccaaactggccttctggctcggatggattgctctcctgcaaggctgcatggtgaaatcatctctcccgtacgagtacgactactctgcaagcatcgagtgcttgccggagccgctggagccgcagtacggcgggggcgtcctccgcaacgccgacttcagcgcgggcctgcggggctggtccgccttcggctacggcagcatcgccgagagcacgtcggcggcgggcaacgggttcgccgtcgcgctcaaccggacgcggccgtaccagagcgtcagccagaaggtgtacctgcaggccgacacgcactacaccctctccgcgtggttgcaggtcagcgacggaggcgccgacgtgcgggccgtcgtcaagaccgtcggtgacttcgtccacgccggcggcggcgtcgccaaggccgggtgctggtccatgctcaagggcggcctcaccgccgcgtcttcgggtcctgccgagctctacttcgagagcaacgctacggtggacctgtgggtggacagcgtctcgctcaagcccttctccaaggacgagtggacggcgcaccgcgccgagtccgtgtccgcggcgcgcaagaaggcggtgaggctccaggcgacggactccgcggggaatccgctggagggcgcggcggtgtccctggacgcggtccggaccaacttcccgctgggcgcggccgtgagccggtacatcctcaccaactcggcgtaccagacgtggttcgcgtcccggttcgcggtggccaccttcgagaacgagatgaagtggtacagcacggagcctgcgccgggccaagaggactacacggtcccggacgccatgatggcgttcgccaagtccaacggcatcgccgtgcgcggccacaacgtgttctgggaccagcccagccagcagccccggtgggtgcagtcgctgccgtacccgcagctgctggcggcggcgtcgcgccgcatccgctccgtagtgtcgcgctacgccggccaggtcatcggctgggacgtcgtcaacgagaacctgcacttcaacttctacgagggccgcttcggctgggacgcgtccaccgccttctacgccgccgcgcgcctgctggacgccggctccgcgctcatgttcatgaacgagttcaacaccgtggagcagccgggcgacatggccgcgctgccggcgaggtacctgcagcgcctgcagcagatcatcgccgcctacccggagaacggcgccgggatggccatcggcctcgagggccacttcaccaccaaccccaacatcccgtacatgcgcgccgccctcgacaccctcgcccaggccggcatccccgtctggctcaccgaggtcgacgtcgcgccgggcccgtcgcaggcgcagcacctcgaggaggtgctgcgcgaggcgtacgcgcacccggcggtgcaggggatcgtcatctggtcggcgtggcggcccgaggggtgctacgtcatgtgcctcaccgacaacagcttcaacaacctgccgcagggggacgtcgtggaccgcctcatcgccgagtggcgggcgactccgcgggccggctccacggacgcgcagggctacttcgaggccgagctcgtccacggcgagtataaggtcaccgtcagccacccggcgctcaacagctccatctcccggagcgtcaaggtggagctgggctcagggagtgaccactacttcattgacatgcaggtctagaccaactggttcatcagttgctaggtgtaatgtaatgtaagattacctgctgttgtcacagaactgtgaaagcttag

SEQ ID NO: 4654 - protein, 576 aa, Zea mays subsp. mays
  peptide (1)..(576): Ceres Seq. ID no. 12356210
MTKAKLAFWLGWIALLQGCMVKSSLPYEYDYSASIECLPEPLEPQYGGGVLRNADFSAGLRGWSAFGYGSIAESTSAAGNGFAVALNRTRPYQSVSQKVYLQADTHYTLSAWLQVSDGGADVRAVVKTVGDFVHAGGGVAKAGCWSMLKGGLTAASSGPAELYFESNATVDLWVDSVSLKPFSKDEWTAHRAESVSAARKKAVRLQATDSAGNPLEGAAVSLDAVRTNFPLGAAVSRYILTNSAYQTWFASRFAVATFENEMKWYSTEPAPGQEDYTVPDAMMAFAKSNGIAVRGHNVFWDQPSQQPRWVQSLPYPQLLAAASRRIRSVVSRYAGQVIGWDVVNENLHFNFYEGRFGWDASTAFYAAARLLDAGSALMFMNEFNTVEQPGDMAALPARYLQRLQQIIAAYPENGAGMAIGLEGHFTTNPNIPYMRAALDTLAQAGIPVWLTEVDVAPGPSQAQHLEEVLREAYAHPAVQGIVIWSAWRPEGCYVMCLTDNSFNNLPQGDVVDRLIAEWRATPRAGSTDAQGYFEAELVHGEYKVTVSHPALNSSISRSVKVELGSGSDHYFIDMQV

SEQ ID NO: 4655 - protein, 557 aa, Zea mays subsp. mays
  peptide (1)..(557): Ceres Seq. ID no. 12356211
MVKSSLPYEYDYSASIECLPEPLEPQYGGGVLRNADFSAGLRGWSAFGYGSIAESTSAAGNGFAVALNRTRPYQSVSQKVYLQADTHYTLSAWLQVSDGGADVRAVVKTVGDFVHAGGGVAKAGCWSMLKGGLTAASSGPAELYFESNATVDLWVDSVSLKPFSKDEWTAHRAESVSAARKKAVRLQATDSAGNPLEGAAVSLDAVRTNFPLGAAVSRYILTNSAYQTWFASRFAVATFENEMKWYSTEPAPGQEDYTVPDAMMAFAKSNGIAVRGHNVFWDQPSQQPRWVQSLPYPQLLAAASRRIRSVVSRYAGQVIGWDVVNENLHFNFYEGRFGWDASTAFYAAARLLDAGSALMFMNEFNTVEQPGDMAALPARYLQRLQQIIAAYPENGAGMAIGLEGHFTTNPNIPYMRAALDTLAQAGIPVWLTEVDVAPGPSQAQHLEEVLREAYAHPAVQGIVIWSAWRPEGCYVMCLTDNSFNNLPQGDVVDRLIAEWRATPRAGSTDAQGYFEAELVHGEYKVTVSHPALNSSISRSVKVELGSGSDHYFIDMQV

SEQ ID NO: 4656 - protein, 430 aa, Zea mays subsp. mays
  peptide (1)..(430): Ceres Seq. ID no. 12356212
MLKGGLTAASSGPAELYFESNATVDLWVDSVSLKPFSKDEWTAHRAESVSAARKKAVRLQATDSAGNPLEGAAVSLDAVRTNFPLGAAVSRYILTNSAYQTWFASRFAVATFENEMKWYSTEPAPGQEDYTVPDAMMAFAKSNGIAVRGHNVFWDQPSQQPRWVQSLPYPQLLAAASRRIRSVVSRYAGQVIGWDVVNENLHFNFYEGRFGWDASTAFYAAARLLDAGSALMFMNEFNTVEQPGDMAALPARYLQRLQQIIAAYPENGAGMAIGLEGHFTTNPNIPYMRAALDTLAQAGIPVWLTEVDVAPGPSQAQHLEEVLREAYAHPAVQGIVIWSAWRPEGCYVMCLTDNSFNNLPQGDVVDRLIAEWRATPRAGSTDAQGYFEAELVHGEYKVTVSHPALNSSISRSVKVELGSGSDHYFIDMQV

SEQ ID NO: 4657 - DNA, 1648 bp, Zea mays subsp. mays
  misc_feature (1)..(1648): Ceres Seq. ID no. 12352702
  misc_feature (1)..(1648): Ortholog of  Ceres SEQ ID NO 13594345 as cited in SEQ ID NO 58043
  misc_feature (1)..(1648): Ortholog of  Ceres SEQ ID NO 14314755 as cited in SEQ ID NO 59919
  misc_feature (1)..(1648): Ortholog of  Ceres SEQ ID NO 13597574 as cited in SEQ ID NO 64677
  misc_feature (1)..(1648): Ortholog of  Ceres SEQ ID NO 13597843 as cited in SEQ ID NO 64850
  misc_feature (1)..(1648): Ortholog of  Ceres SEQ ID NO 12617417 as cited in SEQ ID NO 65089
  misc_feature (1)..(1648): Ortholog of  Ceres SEQ ID NO 13597678 as cited in SEQ ID NO 65375
  misc_feature (1)..(1648): Ortholog of  Ceres SEQ ID NO 13596180 as cited in SEQ ID NO 67941
  misc_feature (1)..(1648): Ortholog of  Ceres SEQ ID NO 13591190 as cited in SEQ ID NO 68044
  misc_feature (1)..(1648): Ortholog of  Ceres SEQ ID NO 13595961 as cited in SEQ ID NO 68223
gtcctgcagtctccatggccgccgcagtcgacaccgcggccgtggcgggcgcgaccgggaggctcagggtgttcttcctgccctccttcatccggggacacctcatcccgcagaccgacatggcgtgccgcgtcgccgcggcaaggcccgcggaggtggaggcgaccgtggtcgtgacgccggccaacgcggccctcatcgcgccgaccgtggcgcgcgccgcggccgccggccacgccgtgcgcgtgctctgctacccgttcccggacgtcggcctcggggagggcgtggagtgcctcgccaccgccaccgcgcgcgacgcgtggcgcgtctaccgcgccatggaggtggtgcagccgtcccacgagtcgctgctccgggaccaccgccccgacgccatcgtcgccgacgtgccgttctggtggaccaccggtgtcgccgccgagctcggggtgccgcgcctcacgttccaccctgtcggaatcttcgctctgctcgccatgaacagcctgttcaccatacggcccgacatcatcggccgggccagctccgacgccgctgggacggtgctgtccgtgccgggcttgcccgggaaggagatcacgatcccggtgtccgagctcccgaccttcttggtccaggacgaccacctctccaaggcgtggcagcggatgagggcgtgccagctcactggcttcggcgtcatcgtcaacaccttcgccgacctggagcagccctactgcgaggaattcagccgcgtggaggcgcgccgcgcctacttcgtcgggcccctgggaaagccatcgcgctccaccatgcaccgcggcggcagcggcaacgcggactgcctgagctggttgtccaccaaaccgagccggtcggtagtgttcgtctgcttcgggagctgggccgagttctcagcgactcagacaagagagctcgccctggggctcgaggcgtcgaaccagccattcctgtgggttgtccgctccaatgactccagcgatgaccagtgggcaccggagggctgggagcagcgcgtcgccaaccgtggcctggtcgtccacggatgggccccgcagctggccgttctggcccacccgtcggtgggcgcgttcgtgacgcactgcggttggaactcggtcctcgaagccgcgtccgccggcgtgccggtgctcacgtggccgttagtgttcgagcagttcatcaacgagcggctggccaccgaggtggccgccttcggcgtgcgcctgtgggacggcggcaggcgcagcgagagggccgaggatgcggagatcgtgccggcggaggcgatcgcgcgggccgtggccggtttcatggaaggcggagagcagcgcgacaagttgaacgccagggccggggaactagcggagcgcgcgcgcgccgctgtcagtgaggacgggtcgtcgtggcgtgacataaaccgcctgatcgatgatctcctgcaggcgagagcgtcagggctgccacaaatgaattccgtccagcttgagtgatttaaattattctacacagacattgtacgcaaatgcaaggctaaaaataaagagtgaagttaaggtggtgtttggttcatctaaatgtaacgtaaatagtttacatgggtaatggataccgctaattttgt

SEQ ID NO: 4658 - protein, 504 aa, Zea mays subsp. mays
  peptide (1)..(504): Ceres Seq. ID no. 12352703
PAVSMAAAVDTAAVAGATGRLRVFFLPSFIRGHLIPQTDMACRVAAARPAEVEATVVVTPANAALIAPTVARAAAAGHAVRVLCYPFPDVGLGEGVECLATATARDAWRVYRAMEVVQPSHESLLRDHRPDAIVADVPFWWTTGVAAELGVPRLTFHPVGIFALLAMNSLFTIRPDIIGRASSDAAGTVLSVPGLPGKEITIPVSELPTFLVQDDHLSKAWQRMRACQLTGFGVIVNTFADLEQPYCEEFSRVEARRAYFVGPLGKPSRSTMHRGGSGNADCLSWLSTKPSRSVVFVCFGSWAEFSATQTRELALGLEASNQPFLWVVRSNDSSDDQWAPEGWEQRVANRGLVVHGWAPQLAVLAHPSVGAFVTHCGWNSVLEAASAGVPVLTWPLVFEQFINERLATEVAAFGVRLWDGGRRSERAEDAEIVPAEAIARAVAGFMEGGEQRDKLNARAGELAERARAAVSEDGSSWRDINRLIDDLLQARASGLPQMNSVQLE

SEQ ID NO: 4659 - protein, 500 aa, Zea mays subsp. mays
  peptide (1)..(500): Ceres Seq. ID no. 12352704
MAAAVDTAAVAGATGRLRVFFLPSFIRGHLIPQTDMACRVAAARPAEVEATVVVTPANAALIAPTVARAAAAGHAVRVLCYPFPDVGLGEGVECLATATARDAWRVYRAMEVVQPSHESLLRDHRPDAIVADVPFWWTTGVAAELGVPRLTFHPVGIFALLAMNSLFTIRPDIIGRASSDAAGTVLSVPGLPGKEITIPVSELPTFLVQDDHLSKAWQRMRACQLTGFGVIVNTFADLEQPYCEEFSRVEARRAYFVGPLGKPSRSTMHRGGSGNADCLSWLSTKPSRSVVFVCFGSWAEFSATQTRELALGLEASNQPFLWVVRSNDSSDDQWAPEGWEQRVANRGLVVHGWAPQLAVLAHPSVGAFVTHCGWNSVLEAASAGVPVLTWPLVFEQFINERLATEVAAFGVRLWDGGRRSERAEDAEIVPAEAIARAVAGFMEGGEQRDKLNARAGELAERARAAVSEDGSSWRDINRLIDDLLQARASGLPQMNSVQLE

SEQ ID NO: 4660 - protein, 465 aa, Zea mays subsp. mays
  peptide (1)..(465): Ceres Seq. ID no. 12352705
MACRVAAARPAEVEATVVVTPANAALIAPTVARAAAAGHAVRVLCYPFPDVGLGEGVECLATATARDAWRVYRAMEVVQPSHESLLRDHRPDAIVADVPFWWTTGVAAELGVPRLTFHPVGIFALLAMNSLFTIRPDIIGRASSDAAGTVLSVPGLPGKEITIPVSELPTFLVQDDHLSKAWQRMRACQLTGFGVIVNTFADLEQPYCEEFSRVEARRAYFVGPLGKPSRSTMHRGGSGNADCLSWLSTKPSRSVVFVCFGSWAEFSATQTRELALGLEASNQPFLWVVRSNDSSDDQWAPEGWEQRVANRGLVVHGWAPQLAVLAHPSVGAFVTHCGWNSVLEAASAGVPVLTWPLVFEQFINERLATEVAAFGVRLWDGGRRSERAEDAEIVPAEAIARAVAGFMEGGEQRDKLNARAGELAERARAAVSEDGSSWRDINRLIDDLLQARASGLPQMNSVQLE

SEQ ID NO: 4661 - DNA, 1578 bp, Zea mays subsp. mays
  misc_feature (1)..(1578): Ceres Seq. ID no. 13492685
  misc_feature (1)..(1578): Ortholog of  Ceres SEQ ID NO 14303770 as cited in SEQ ID NO 53890
attcgatcgcctcacccgaagcacatcccgtcgcatcccatcccactaccacccatctcgtcgtccgccgattcgatccggttcttccaacccaggggcagtgatggcgacgaagaggagcgtgggcaccctcggcgaggcggatctgaaggggaagaaggtgttcgtgcgcgccgacctcaacgtcccgctcgacgatgcccagaagatcaccgacgacacccgcatccgcgcctccgtccccaccatcaagttcctcctcgagaagggcgccaaggtcatcctcgccagccacctgggtcgtccaaaaggtgtcaccccaaagtacagcttgaagcctcttgttccacgcttgtctgagctccttggagttgaagtcgtgatggccaatgattgcattggtgaggaagtcgagaagttggctgccgctttgccagaaggtggagttctgctcctagagaatgttagattctacaaggaggaagagaagaacgaacctgagtttgctaagaagcttgcatctgttgctgacctttatgtcaatgatgcttttggcacggcacacagagctcatgcttcaaccgaaggagttaccaagtatttgaagcctgctgttgctggcttcctcatgcagaaggaacttgactaccttgttggagctgttgccaacccaaagaagccatttgccgccattgttggtggatccaaggtctcaactaagattggtgtcattgagtcgttgctggcgaaggtcgatatcctcatccttggtggtggtatgatctacacattttacaaggcacagggatattctgttggaaaatctctcgtggaagaggataaactcgagctcgcaacttctcttattgagaaggcgaaggcaaagggggtttctcttttgcttcccactgatattgtagtagcggacaagtttgcagccgatgctgagagcaagattgtccctgccactgctatccctgatgactggatgggtcttgatgttggccctgatgccaccaaaacattcgacgaagcattggacaccaccaagactgttatttggaacggccccatgggagtgtttgagttccagaagtttgcagctggcaccgaggcgattgccaagaagctagctgagcttacaaccacgaagggtgtcactaccatcatcggcggtggcgactctgtcgctgctgtcgagaaggctgggctggccgacaagatgagccacatttcgaccggcggcggtgcgagcttggaactcttggaaggcaagactctacctggtgtccttgccctcgatgacgcctagatccgctgctgctgctgctactcaggttctgccagctttgcgtgtcatcttgtttcggaccttggtgtagcactgcaaggctaaggtttactcctccacacatggactttcgaggataggcttgccaccgtgttttgctagatgagtcgtgaaataagcttttacttcctcgctgctgtgggtgaagtgactggaattcggaaatttggaactaacaaaaccccccgtggatttgtatgatacgttttgttcgacagtttgcgtcc

SEQ ID NO: 4662 - protein, 436 aa, Zea mays subsp. mays
  peptide (1)..(436): Ceres Seq. ID no. 13492686
FDRLTRSTSRRIPSHYHPSRRPPIRSGSSNPGAVMATKRSVGTLGEADLKGKKVFVRADLNVPLDDAQKITDDTRIRASVPTIKFLLEKGAKVILASHLGRPKGVTPKYSLKPLVPRLSELLGVEVVMANDCIGEEVEKLAAALPEGGVLLLENVRFYKEEEKNEPEFAKKLASVADLYVNDAFGTAHRAHASTEGVTKYLKPAVAGFLMQKELDYLVGAVANPKKPFAAIVGGSKVSTKIGVIESLLAKVDILILGGGMIYTFYKAQGYSVGKSLVEEDKLELATSLIEKAKAKGVSLLLPTDIVVADKFAADAESKIVPATAIPDDWMGLDVGPDATKTFDEALDTTKTVIWNGPMGVFEFQKFAAGTEAIAKKLAELTTTKGVTTIIGGGDSVAAVEKAGLADKMSHISTGGGASLELLEGKTLPGVLALDDA

SEQ ID NO: 4663 - protein, 402 aa, Zea mays subsp. mays
  peptide (1)..(402): Ceres Seq. ID no. 13492687
MATKRSVGTLGEADLKGKKVFVRADLNVPLDDAQKITDDTRIRASVPTIKFLLEKGAKVILASHLGRPKGVTPKYSLKPLVPRLSELLGVEVVMANDCIGEEVEKLAAALPEGGVLLLENVRFYKEEEKNEPEFAKKLASVADLYVNDAFGTAHRAHASTEGVTKYLKPAVAGFLMQKELDYLVGAVANPKKPFAAIVGGSKVSTKIGVIESLLAKVDILILGGGMIYTFYKAQGYSVGKSLVEEDKLELATSLIEKAKAKGVSLLLPTDIVVADKFAADAESKIVPATAIPDDWMGLDVGPDATKTFDEALDTTKTVIWNGPMGVFEFQKFAAGTEAIAKKLAELTTTKGVTTIIGGGDSVAAVEKAGLADKMSHISTGGGASLELLEGKTLPGVLALDDA

SEQ ID NO: 4664 - protein, 309 aa, Zea mays subsp. mays
  peptide (1)..(309): Ceres Seq. ID no. 13492688
MANDCIGEEVEKLAAALPEGGVLLLENVRFYKEEEKNEPEFAKKLASVADLYVNDAFGTAHRAHASTEGVTKYLKPAVAGFLMQKELDYLVGAVANPKKPFAAIVGGSKVSTKIGVIESLLAKVDILILGGGMIYTFYKAQGYSVGKSLVEEDKLELATSLIEKAKAKGVSLLLPTDIVVADKFAADAESKIVPATAIPDDWMGLDVGPDATKTFDEALDTTKTVIWNGPMGVFEFQKFAAGTEAIAKKLAELTTTKGVTTIIGGGDSVAAVEKAGLADKMSHISTGGGASLELLEGKTLPGVLALDDA

SEQ ID NO: 4665 - DNA, 1191 bp, Zea mays subsp. mays
  misc_feature (1)..(1191): Ceres Seq. ID no. 13492990
  misc_feature (1)..(1191): Ortholog of  Ceres SEQ ID NO 13594727 as cited in SEQ ID NO 52169
  misc_feature (1)..(1191): Ortholog of  Ceres SEQ ID NO 14301430 as cited in SEQ ID NO 56553
  misc_feature (1)..(1191): Ortholog of  Ceres SEQ ID NO 13639124 as cited in SEQ ID NO 56718
  misc_feature (1)..(1191): Ortholog of  Ceres SEQ ID NO 13581579 as cited in SEQ ID NO 58361
  misc_feature (1)..(1191): Ortholog of  Ceres SEQ ID NO 13598714 as cited in SEQ ID NO 62656
  misc_feature (1)..(1191): Ortholog of  Ceres SEQ ID NO 13596969 as cited in SEQ ID NO 63375
  misc_feature (1)..(1191): Ortholog of  Ceres SEQ ID NO 14302240 as cited in SEQ ID NO 64162
  misc_feature (1)..(1191): Ortholog of  Ceres SEQ ID NO 13597519 as cited in SEQ ID NO 64759
  misc_feature (1)..(1191): Ortholog of  Ceres SEQ ID NO 15170183 as cited in SEQ ID NO 65667
  misc_feature (1)..(1191): Ortholog of  Ceres SEQ ID NO 13595926 as cited in SEQ ID NO 67778
  misc_feature (1)..(1191): Ortholog of  Ceres SEQ ID NO 13662323 as cited in SEQ ID NO 68305
cttccagttcgcaagggtttcccagccaaagaaccagcatcctggttgtgaaaatggggggtgtgcgtagctacttcttcatcatcgccgccgcggtcgttgccgtcgtcctcgcgcttctcccggccggcgccacaggtgccggcctcaaggtcggcttctacagcaagacatgcccgtcggcggagtccctggtgcagcaggcggtggctgccgccttcaagaacaacagcggcatcgccgccggcctcatccgcctgcacttccatgactgcttcgtcaggggctgcgacggctcggtgctgatcgactcgacggcgaacaacacggcggagaaggacgcggtcccgaacaacccgagcctgcggggcttcgaggtcatcgacgccgccaagaaggcggtggaggcacggtgccccaagacggtgtcctgcgccgacatcctggcgttcgcggcgcgggacagcatcgcgctggcggggaacaacctgacgtacaaggtccccgcggggcggcgcgacgggcgggtgtccagggacacggacgccaacagcaacctcccctcgccgctctccaccgccgccgagctcgtcggcaacttcacgcgcaagaacctcaccgccgaggacatggtggtgctctccggcgcgcacaccgtcggccgctcccactgctcctccttcaccaaccgcctctacggcttcagcaacgccagcgacgtcgaccccaccatcagctccgcctacgccctcctgctgcgggccatctgcccgtccaacaccagccagttcttccccaacaccaccaccgacatggacctcatcacgcccgcgctgctcgacaacaggtactacgtcggcctcgccaacaacctcggcctcttcacgtccgaccaggctctgctcaccaacgccacgctcaagaagtccgtcgacgccttcgtcaagagcgaaagcgcgtggaagaccaagttcgccaagtccatggtcaagatgggcaatatcgacgtgctcacgggcaccaagggggagatcaggctcaactgcagggtcatcaacagcggcagcagcagctctggattattccagcttcacacggcaaccgcctctgacgaggaattcgcccacgttgcaactaactagcagctactatatctctatccgtagaggatctagtgatctactgctaccc

SEQ ID NO: 4666 - protein, 379 aa, Zea mays subsp. mays
  peptide (1)..(379): Ceres Seq. ID no. 13492991
SSSQGFPSQRTSILVVKMGGVRSYFFIIAAAVVAVVLALLPAGATGAGLKVGFYSKTCPSAESLVQQAVAAAFKNNSGIAAGLIRLHFHDCFVRGCDGSVLIDSTANNTAEKDAVPNNPSLRGFEVIDAAKKAVEARCPKTVSCADILAFAARDSIALAGNNLTYKVPAGRRDGRVSRDTDANSNLPSPLSTAAELVGNFTRKNLTAEDMVVLSGAHTVGRSHCSSFTNRLYGFSNASDVDPTISSAYALLLRAICPSNTSQFFPNTTTDMDLITPALLDNRYYVGLANNLGLFTSDQALLTNATLKKSVDAFVKSESAWKTKFAKSMVKMGNIDVLTGTKGEIRLNCRVINSGSSSSGLFQLHTATASDEEFAHVATN

SEQ ID NO: 4667 - protein, 362 aa, Zea mays subsp. mays
  peptide (1)..(362): Ceres Seq. ID no. 13492992
MGGVRSYFFIIAAAVVAVVLALLPAGATGAGLKVGFYSKTCPSAESLVQQAVAAAFKNNSGIAAGLIRLHFHDCFVRGCDGSVLIDSTANNTAEKDAVPNNPSLRGFEVIDAAKKAVEARCPKTVSCADILAFAARDSIALAGNNLTYKVPAGRRDGRVSRDTDANSNLPSPLSTAAELVGNFTRKNLTAEDMVVLSGAHTVGRSHCSSFTNRLYGFSNASDVDPTISSAYALLLRAICPSNTSQFFPNTTTDMDLITPALLDNRYYVGLANNLGLFTSDQALLTNATLKKSVDAFVKSESAWKTKFAKSMVKMGNIDVLTGTKGEIRLNCRVINSGSSSSGLFQLHTATASDEEFAHVATN

SEQ ID NO: 4668 - DNA, 1212 bp, Zea mays subsp. mays
  misc_feature (1)..(1212): Ceres Seq. ID no. 12349007
  misc_feature (1)..(1212): Ortholog of  Ceres SEQ ID NO 13638532 as cited in SEQ ID NO 51186
  misc_feature (1)..(1212): Ortholog of  Ceres SEQ ID NO 14306733 as cited in SEQ ID NO 53866
  misc_feature (1)..(1212): Ortholog of  Ceres SEQ ID NO 13596350 as cited in SEQ ID NO 68204
aacggtcgcgagagtgaaggcaaggaaaaacacccaaacggccaaaccccaggaagccccgtcggaccctacagaccctaaccctagcgctcccgacgcgccgcggagcgatggcgatggacgcggagcggcggcaggcggagctgatcgcgcagttctccgctcaggcggcggcgctttcgtccgcgccccagctcgccgcgctggtgcttgaggccacctcccacccggccctcttcgccttctccgagctcctcaccctcccggccctctccaagctcactggcacgcagtacgcgtcgtcactggacttgctccggctcttcgcctacggtaccctgaatgactacaagagtaattctggattccttccagcactgttgcctgaccaggtccgaaagctaaagcagctcagcgtgctaactctggcagagtcaactaagatactaccgtatgatcagctcatgcaagagttagacgtttcaaatgtaagagaactcgaagatttcctaatcaatgagtgcatgtattcgggtatcgttagaggcaaactggatcagctgagaaggtgctttgaggtacaatttgcagctggaagagatcttacacctgatcagctaaagaacatgatagagactttgtctgattggttgggaacatcagatagactgttgcatcaaattcaggagaaaatcaagtgggctgacacaatgagtgaggtgaacaagaagcaccagaaagaatttgaagacagagtggaagaggccaaaaaatcaatcaagcaggcagacattgacttacgggggcatgacgagtttctctctgaatctggaggaataatggattttgaagaggaccgcgtccgaccaaaaaggaggaggcaaccaccggcgtagtttcaattagcccttaccaatctctcccagaatgggacctgctgataccttgattgagacattttgacgccggagttgagtaaactttgtacatctgtcgtgtgatgcctccactgtagcgagtctgtttattttgccttctggtcttggtggggacgtacaaggccaaacctaggcgttatgttgcatttatttggtagtaaatggcccatggaagaaataacgttgttatgattatggcactgggttattctcaagtgtactgaacgataacagaagcacctctgttaaatgatgattgactcgaggcttgctg

SEQ ID NO: 4669 - protein, 261 aa, Zea mays subsp. mays
  peptide (1)..(261): Ceres Seq. ID no. 12349008
MAMDAERRQAELIAQFSAQAAALSSAPQLAALVLEATSHPALFAFSELLTLPALSKLTGTQYASSLDLLRLFAYGTLNDYKSNSGFLPALLPDQVRKLKQLSVLTLAESTKILPYDQLMQELDVSNVRELEDFLINECMYSGIVRGKLDQLRRCFEVQFAAGRDLTPDQLKNMIETLSDWLGTSDRLLHQIQEKIKWADTMSEVNKKHQKEFEDRVEEAKKSIKQADIDLRGHDEFLSESGGIMDFEEDRVRPKRRRQPPA

SEQ ID NO: 4670 - protein, 259 aa, Zea mays subsp. mays
  peptide (1)..(259): Ceres Seq. ID no. 12349009
MDAERRQAELIAQFSAQAAALSSAPQLAALVLEATSHPALFAFSELLTLPALSKLTGTQYASSLDLLRLFAYGTLNDYKSNSGFLPALLPDQVRKLKQLSVLTLAESTKILPYDQLMQELDVSNVRELEDFLINECMYSGIVRGKLDQLRRCFEVQFAAGRDLTPDQLKNMIETLSDWLGTSDRLLHQIQEKIKWADTMSEVNKKHQKEFEDRVEEAKKSIKQADIDLRGHDEFLSESGGIMDFEEDRVRPKRRRQPPA

SEQ ID NO: 4671 - protein, 143 aa, Zea mays subsp. mays
  peptide (1)..(143): Ceres Seq. ID no. 12349010
MQELDVSNVRELEDFLINECMYSGIVRGKLDQLRRCFEVQFAAGRDLTPDQLKNMIETLSDWLGTSDRLLHQIQEKIKWADTMSEVNKKHQKEFEDRVEEAKKSIKQADIDLRGHDEFLSESGGIMDFEEDRVRPKRRRQPPA

SEQ ID NO: 4672 - DNA, 1725 bp, Zea mays subsp. mays
  misc_feature (1)..(1725): Ceres Seq. ID no. 13577779
  misc_feature (1)..(1725): Ortholog of  Ceres SEQ ID NO 15171144 as cited in SEQ ID NO 60227
gaccgttgtgcttgcggcttcgctcgttcccctccaccactccgtctccttcctattgctgagtgcggcacccttgcctataataaaccccgccgcacgcccgcaccggagaagaaagctcccaagtcccaatccacgttcctcgccccctgccgctccggagagtcatggccaccgccgtttccacccccgcggacctgtcgcccacgcctgccccgagacggcggggccggccgccgaagaaccccgccccagccgaggccccaggcagcccggcggaccaagcggaggtgattggggactacgagcgcgagagggacgcgaggatccgggagaacatggagcggatgcagaagctcggcatcctcgacctcgcgcacaccctcagccactgcgccgccgcctcgggtctgggtaccggcagcgggcggtggcgccggaagcccgtggagccggggtctgctggtggggccagggtgaagcccgcgtcgccggcgccctcgcggagatcgctcaggttgaaggacgtggaaccggttacctatcgtgaaattgagccaaagaaagagaaacgctctgaaggtggcaaaactgttttaatggaggtgggagccaaggaagaaatatacactgaagagcatgacaagcttttgggtacatgcaacactccttggactctctttgttgatggttatggcaaagatggaaaacgcatttatgatcaagtgaggggtcaaacctgtcatcagtgccgtcagaagactcttggtcatcatacaagctgctgtaaatgccagattgtccaaggacagttctgtggagactgtttgtacatgaggtatggtgaaaatgtgttagaggttaagaagaatcctaactggatatgtccagtttgccgtggcatctgtaattgcagtctatgcagaactaagaaaggatggttccctactgggtctgcgtataggaaggcgatcggacttgggtacaaatctgtggcacactttctaattgcaacacatcgagcatcatcagtcaattcaagctcagtcgacaataacaagctgccgtttgctaaatctgaaacctcgtgcatttctgaccatgccaatgagagcccagaggatggagaaacgaccagcaaagctaagcagaacaaagcaactcgccgccgagtgaggaagagttctgatggcgacaacgatagcagaagtgggtccgtggtgacatctgactgccaggatgatcaagccaacaaggatgctgggtgtgtgactccgtcgtctaagccagcgtcaacgaagaggaagtacgttgaacgaagccctgactgcatcgcaagcaggctgcggtctcggctcaatatgccatgagcccatgaagatgtgatcaggatcatgtatctcttttactgcctgaccgcaggctctgtcccttcttgcgatgatgttgtggctctttcatctacaagcagttcatggtttgccagtaacgatgttctgcgcgagtaagaaggtgattgttatagtctcttgcgcagctgtgttaagagcttgaaactagactcagtcatgtgtagtatttgtaccattagtgccaactgtggtctctggcattagtgcctactgtggtttgtgagctatgagttgacgcgatagcctgtagctttaatgtacaattcatgatatgcaagtgaatatgttcattttcagctggaaagaaaaaagg

SEQ ID NO: 4673 - protein, 400 aa, Zea mays subsp. mays
  peptide (1)..(400): Ceres Seq. ID no. 13577780
MATAVSTPADLSPTPAPRRRGRPPKNPAPAEAPGSPADQAEVIGDYERERDARIRENMERMQKLGILDLAHTLSHCAAASGLGTGSGRWRRKPVEPGSAGGARVKPASPAPSRRSLRLKDVEPVTYREIEPKKEKRSEGGKTVLMEVGAKEEIYTEEHDKLLGTCNTPWTLFVDGYGKDGKRIYDQVRGQTCHQCRQKTLGHHTSCCKCQIVQGQFCGDCLYMRYGENVLEVKKNPNWICPVCRGICNCSLCRTKKGWFPTGSAYRKAIGLGYKSVAHFLIATHRASSVNSSSVDNNKLPFAKSETSCISDHANESPEDGETTSKAKQNKATRRRVRKSSDGDNDSRSGSVVTSDCQDDQANKDAGCVTPSSKPASTKRKYVERSPDCIASRLRSRLNMP

SEQ ID NO: 4674 - protein, 343 aa, Zea mays subsp. mays
  peptide (1)..(343): Ceres Seq. ID no. 13577781
MERMQKLGILDLAHTLSHCAAASGLGTGSGRWRRKPVEPGSAGGARVKPASPAPSRRSLRLKDVEPVTYREIEPKKEKRSEGGKTVLMEVGAKEEIYTEEHDKLLGTCNTPWTLFVDGYGKDGKRIYDQVRGQTCHQCRQKTLGHHTSCCKCQIVQGQFCGDCLYMRYGENVLEVKKNPNWICPVCRGICNCSLCRTKKGWFPTGSAYRKAIGLGYKSVAHFLIATHRASSVNSSSVDNNKLPFAKSETSCISDHANESPEDGETTSKAKQNKATRRRVRKSSDGDNDSRSGSVVTSDCQDDQANKDAGCVTPSSKPASTKRKYVERSPDCIASRLRSRLNMP

SEQ ID NO: 4675 - protein, 340 aa, Zea mays subsp. mays
  peptide (1)..(340): Ceres Seq. ID no. 13577782
MQKLGILDLAHTLSHCAAASGLGTGSGRWRRKPVEPGSAGGARVKPASPAPSRRSLRLKDVEPVTYREIEPKKEKRSEGGKTVLMEVGAKEEIYTEEHDKLLGTCNTPWTLFVDGYGKDGKRIYDQVRGQTCHQCRQKTLGHHTSCCKCQIVQGQFCGDCLYMRYGENVLEVKKNPNWICPVCRGICNCSLCRTKKGWFPTGSAYRKAIGLGYKSVAHFLIATHRASSVNSSSVDNNKLPFAKSETSCISDHANESPEDGETTSKAKQNKATRRRVRKSSDGDNDSRSGSVVTSDCQDDQANKDAGCVTPSSKPASTKRKYVERSPDCIASRLRSRLNMP

SEQ ID NO: 4676 - DNA, 1020 bp, Zea mays subsp. mays
  misc_feature (1)..(1020): Ceres Seq. ID no. 12566601
  misc_feature (1)..(1020): Ortholog of  Ceres SEQ ID NO 12609566 as cited in SEQ ID NO 52161
agacacccatactgattcgctggcggcaggccgacggctacggagacggaagtggcgaccggttccggcgaggcgcaggcgacagataggggacagggcgaccatttctagcgaggcaggagcgcgggaagatccggaagctgcgatgtcgaagcggctgctgtcgcggctgctcggcatgttccaatcgcggacgcaggtgggcgtcgacaaggccggcaaccgctacttcacccgcgttgaggaggtcgacggcacaatgaaggagaggcgctgggtggagttcaagggcgcagaccaggactcgaccaccgttccagtcgagtggatttgctggctgaatggccaaaggaagaaagctccaacaccagaggaattggctgagctggaggcaagacgtgaacgtgtcaagcaaaacattcagcttctcaaaaagaaagaagaagaggaaagaaaaactggtatccaaccagtcaagaaaattgggaaagctgaatctccaaatctccaaagtttcgtgaagcagcagttctcgggtactcctccagatcagcagaaagttaacactctaggacctgaggataggcctaaggacacaactcatacagaagatgctacgacagacaatgagaggtatactgaaccaacgggaactggtgccactttcaagccagggacttggcagccaccaacatgaatgccaacatgaactttagaagatgaaggacggtgtaccggagcattttcctttcacctatctgtgtaacattttaacatttgctctgaaagaatcactagcctatgttccttctttcagatggttacccatctgatggagttatagccttaagttccttcttttagatgcttacccatctgatggagttataggtgatcgggggctcccacggtatgctgttttttttgtggctaaattgtcctctgtaatctttactgtgatagcaactgtaataaactggaccagtgttttgcttcagggctctcttagagacactgttc

SEQ ID NO: 4677 - protein, 231 aa, Zea mays subsp. mays
  peptide (1)..(231): Ceres Seq. ID no. 12566602
DTHTDSLAAGRRLRRRKWRPVPARRRRQIGDRATISSEAGAREDPEAAMSKRLLSRLLGMFQSRTQVGVDKAGNRYFTRVEEVDGTMKERRWVEFKGADQDSTTVPVEWICWLNGQRKKAPTPEELAELEARRERVKQNIQLLKKKEEEERKTGIQPVKKIGKAESPNLQSFVKQQFSGTPPDQQKVNTLGPEDRPKDTTHTEDATTDNERYTEPTGTGATFKPGTWQPPT

SEQ ID NO: 4678 - protein, 183 aa, Zea mays subsp. mays
  peptide (1)..(183): Ceres Seq. ID no. 12566603
MSKRLLSRLLGMFQSRTQVGVDKAGNRYFTRVEEVDGTMKERRWVEFKGADQDSTTVPVEWICWLNGQRKKAPTPEELAELEARRERVKQNIQLLKKKEEEERKTGIQPVKKIGKAESPNLQSFVKQQFSGTPPDQQKVNTLGPEDRPKDTTHTEDATTDNERYTEPTGTGATFKPGTWQPPT

SEQ ID NO: 4679 - protein, 172 aa, Zea mays subsp. mays
  peptide (1)..(172): Ceres Seq. ID no. 12566604
MFQSRTQVGVDKAGNRYFTRVEEVDGTMKERRWVEFKGADQDSTTVPVEWICWLNGQRKKAPTPEELAELEARRERVKQNIQLLKKKEEEERKTGIQPVKKIGKAESPNLQSFVKQQFSGTPPDQQKVNTLGPEDRPKDTTHTEDATTDNERYTEPTGTGATFKPGTWQPPT

SEQ ID NO: 4680 - DNA, 800 bp, Zea mays subsp. mays
  misc_feature (1)..(800): Ceres Seq. ID no. 12409878
  misc_feature (1)..(800): Ortholog of  Ceres SEQ ID NO 13595613 as cited in SEQ ID NO 59866
ggtttctctgattctctccctcccttgccttcgtctccgcctccgtctttcctcaagaagtcgattcccttccccaagaacccaagcccctaccatgacaagctcctcctctccttcccgaaaggcgctgagcaagatcgcttgcaatcggctgcagaaggaactcgccgagtggcaactcagcccccctgctggattcaagcacaaggtctccgataacctacaaaggtgggtaattgaggtcactggagcggcgggcaccctttacgccggcgagacctaccagttgcaggttgacttccctgagcattatcctatggaggcacctcaggtcatttttctcaatccagcgccaatgcatccacacatctacagcaacgggcacatctgcttagatattttgtatgactcgtggtctccagcgatgaccgtgagctctgtctgtatcagtatcctgtctatgttgtctagttcgccagcaaagcaacgtccagtggacaatgaccgctatgtcaggaactgccgcaacgggaggtcgccgaaggagaccagatggtggttccatgacgacacggtgtaattgagcgcctgacagccttccttgctgtggtatatctcgtcaaggggagattggggatgatttaggcctatttgtaagcatccctctatcggattgcgaagcttaccttgctgtggtggtgtgttaaatgagttgcacacatgtgtcgagtctgagaatacatattaccatcatcaatgatataagtaatatagaataagcatgagtgtaccctgcctgc

SEQ ID NO: 4681 - protein, 192 aa, Zea mays subsp. mays
  peptide (1)..(192): Ceres Seq. ID no. 12409879
VSLILSLPCLRLRLRLSSRSRFPSPRTQAPTMTSSSSPSRKALSKIACNRLQKELAEWQLSPPAGFKHKVSDNLQRWVIEVTGAAGTLYAGETYQLQVDFPEHYPMEAPQVIFLNPAPMHPHIYSNGHICLDILYDSWSPAMTVSSVCISILSMLSSSPAKQRPVDNDRYVRNCRNGRSPKETRWWFHDDTV

SEQ ID NO: 4682 - protein, 161 aa, Zea mays subsp. mays
  peptide (1)..(161): Ceres Seq. ID no. 12409880
MTSSSSPSRKALSKIACNRLQKELAEWQLSPPAGFKHKVSDNLQRWVIEVTGAAGTLYAGETYQLQVDFPEHYPMEAPQVIFLNPAPMHPHIYSNGHICLDILYDSWSPAMTVSSVCISILSMLSSSPAKQRPVDNDRYVRNCRNGRSPKETRWWFHDDTV

SEQ ID NO: 4683 - DNA, 1748 bp, Zea mays subsp. mays
  misc_feature (1)..(1748): Ceres Seq. ID no. 12406975
  misc_feature (1)..(1748): Ortholog of  Ceres SEQ ID NO 13656849 as cited in SEQ ID NO 65764
  misc_feature (1)..(1748): Ortholog of  Ceres SEQ ID NO 13655298 as cited in SEQ ID NO 68914
gcacgagaccattacctagaacatcctaatcgaaaataaaaaagaggcgtggtagtgtacagtgtgagctgacagggacagtgcccaccaatggtccccttctcacggtcacgctagcagcagtagccctcccccatcaccgaggagagagaagcctgtcgccgcgcgaccgccccacatggctaccgcgctcggtggggagcccaaccccaccgccgacgccatggaggtcgaccctccgcgcgcctccgccgacgagaagcatgtcgccactattattgcggggggtagtgatgcagtgacaggccacataatatcgactacgattgggggaaagaatggtgaaccaaagaggaccatcagctatatggctgagcgagttgttggaactggatcgtttggggttgtcttccaggcaaaatgcattgagactggtgaaactgttgcaattaagaaggttctacaggacaaaagatacaagaatagggagttacaaataatgcgatcaattgaccattgcaatgtcatttccctgaagcattgtttcttctctaccacaagtagggatgaacttttccttaacttagtcatggagtttgttccagagtcactttatcgcgttctgaaacactacaaagacatgaagcagaggatgccccttatatatgttaaattgtatatgtaccagatattccggggactagcttatattcatactgtaccaggaatttgtcaccgagatattaagcctcagaatatcttggtggatcctctttcccaccaagtcaaggtttgtgacttcgggagtgctaaaatcttgattaaaggtgaagctaatatatcatatatatgctcacgctattatcgtgctcctgagctcatatttggtgcaactgaatacacaacatctattgatatatggtcagctggatgtgttcttgctgagcttcttcttagtcaaccattatttcctggggaaagtgctgtggaccagctggttgagattatcaaggttttgggcaccccaacacgagaggaaattcgttgtatgaatcccaactatacagaattcaagtttcctcagataaaagcatgtccatggcacaagatcttccacaagagaatgcctccagaagcaatagatcttgtttcccgtcttcttcagtattcgccgaatctgcgatgtagtgcacttgaggtgtgtgctcattcattctttgacgaattacgagaatcacatgcaagactccctaacggacgcccatttcctccactattcaactttaagcaggaactagcaaacgcaccaccggagcttgtcagcaggctattaccagagcatgctcgacggcattcaggattcggttccttatttgggagtggaccgtagcccgtaggaaaatctcgttttaatgttgggctgctgtacgccgtcagagggcaatctgcatatcccaaatctaagttttagaacctgaccatcttgtcgaaaagttaccagccttagaaaaacccgaggtggcctcttgtgtccatgttctgccagtagcggcacataatgctggggggatggttaggtgtaattgttaagcacagagggtaactgactgagctaatgtattttcacgtttcagtctgtatcgaacttgtacctgtgtaccctgtaccaatcgcagctgatgtaatcatgtaaatgcttctaaactacttcaagttatcatgatggccaattcgcaattttacagtgc

SEQ ID NO: 4684 - protein, 403 aa, Zea mays subsp. mays
  peptide (1)..(403): Ceres Seq. ID no. 12406976
MATALGGEPNPTADAMEVDPPRASADEKHVATIIAGGSDAVTGHIISTTIGGKNGEPKRTISYMAERVVGTGSFGVVFQAKCIETGETVAIKKVLQDKRYKNRELQIMRSIDHCNVISLKHCFFSTTSRDELFLNLVMEFVPESLYRVLKHYKDMKQRMPLIYVKLYMYQIFRGLAYIHTVPGICHRDIKPQNILVDPLSHQVKVCDFGSAKILIKGEANISYICSRYYRAPELIFGATEYTTSIDIWSAGCVLAELLLSQPLFPGESAVDQLVEIIKVLGTPTREEIRCMNPNYTEFKFPQIKACPWHKIFHKRMPPEAIDLVSRLLQYSPNLRCSALEVCAHSFFDELRESHARLPNGRPFPPLFNFKQELANAPPELVSRLLPEHARRHSGFGSLFGSGP

SEQ ID NO: 4685 - protein, 388 aa, Zea mays subsp. mays
  peptide (1)..(388): Ceres Seq. ID no. 12406977
MEVDPPRASADEKHVATIIAGGSDAVTGHIISTTIGGKNGEPKRTISYMAERVVGTGSFGVVFQAKCIETGETVAIKKVLQDKRYKNRELQIMRSIDHCNVISLKHCFFSTTSRDELFLNLVMEFVPESLYRVLKHYKDMKQRMPLIYVKLYMYQIFRGLAYIHTVPGICHRDIKPQNILVDPLSHQVKVCDFGSAKILIKGEANISYICSRYYRAPELIFGATEYTTSIDIWSAGCVLAELLLSQPLFPGESAVDQLVEIIKVLGTPTREEIRCMNPNYTEFKFPQIKACPWHKIFHKRMPPEAIDLVSRLLQYSPNLRCSALEVCAHSFFDELRESHARLPNGRPFPPLFNFKQELANAPPELVSRLLPEHARRHSGFGSLFGSGP

SEQ ID NO: 4686 - protein, 340 aa, Zea mays subsp. mays
  peptide (1)..(340): Ceres Seq. ID no. 12406978
MAERVVGTGSFGVVFQAKCIETGETVAIKKVLQDKRYKNRELQIMRSIDHCNVISLKHCFFSTTSRDELFLNLVMEFVPESLYRVLKHYKDMKQRMPLIYVKLYMYQIFRGLAYIHTVPGICHRDIKPQNILVDPLSHQVKVCDFGSAKILIKGEANISYICSRYYRAPELIFGATEYTTSIDIWSAGCVLAELLLSQPLFPGESAVDQLVEIIKVLGTPTREEIRCMNPNYTEFKFPQIKACPWHKIFHKRMPPEAIDLVSRLLQYSPNLRCSALEVCAHSFFDELRESHARLPNGRPFPPLFNFKQELANAPPELVSRLLPEHARRHSGFGSLFGSGP

SEQ ID NO: 4687 - DNA, 1388 bp, Zea mays subsp. mays
  misc_feature (1)..(1388): Ceres Seq. ID no. 12409874
  misc_feature (1)..(1388): Ortholog of  Ceres SEQ ID NO 13596643 as cited in SEQ ID NO 62565
  misc_feature (1)..(1388): Ortholog of  Ceres SEQ ID NO 13597550 as cited in SEQ ID NO 65037
acagaggggcagccgcctgcgcggtggccagcatcgtccggccgggttcgtcgggaagcgacccaaccccacgcccgcttccaacctcgttctgaccgacggcgaccgccgtgccgcgccaccgctatacttacatctgctccatcatccctcgccgcgaccaccaacctcggcagggaaatccaactccggtttctcctcctcgcagcgtctctcccgcagtcggggagatccgggttggcccgcccggtaatccatccctcgccctcgtgccgcctgtaatttcgcctcctaacccgaccgccgggggccacagcggcgccggaggcggtggagtggggacgatggggatcggggcggtgtcggacgagttgctgggcacgttcgtgccgatcgccgtgtactggctctactcagggctctacgtcgcgctggatggggtggggcggctcgacggataccggctgcacaccagggaggaggccgctacgaagaacgtcgtctccaaggccgccgtcgtcagaggcgttctcgtccagcaggtcttccaggtcgccgtctcgctcaccctctttgcggttattggtgatgagagtagtactggacagaagcaacctcctgttcttgtcatagtgttgcagtttataactgcaatggttgttatggacacatggcagtacttcatgcacagatacatgcacattaacaagtttctgtataaacacatccattctaagcaccatactcttgtagtcccttattcctttggagctctatacaaccatcctcttgagggccttattttggacaccattggtggtgcactctcattcctcgtctctggtatgactccacggacatccatattctttttctcctttgcaaccatcaaaactgtggatgatcattgtgggctgtggcttcctggtaatatcctccaggcgctgttcagcaataacagtgcttatcatgacattcaccatcagctctatggaaacaagtacaacttttcacaacccttctttgtgatgtgggacaagattctcggaacttacatgccctactctattgaacaacgaaaaggaggggggatcgaatcaaaaccagctaaactcgactgagctgaggataccaagactgattagtacatgcatgcatagtttctattttttttttttgacttgtccaatactcatgccttgtggtactgctgactgcgcaaatgatgtacacaccctgtgtcataacttcatatagtgaggctgcttttgctctctacatttcttgttttgttttttagggtgttctatcttgtaacaagatacagtgagtaaagtattgtaatgtaccaaagaatactcaacaccacttggatttgtgttctgttg

SEQ ID NO: 4688 - protein, 258 aa, Zea mays subsp. mays
  peptide (1)..(258): Ceres Seq. ID no. 12409875
MGIGAVSDELLGTFVPIAVYWLYSGLYVALDGVGRLDGYRLHTREEAATKNVVSKAAVVRGVLVQQVFQVAVSLTLFAVIGDESSTGQKQPPVLVIVLQFITAMVVMDTWQYFMHRYMHINKFLYKHIHSKHHTLVVPYSFGALYNHPLEGLILDTIGGALSFLVSGMTPRTSIFFFSFATIKTVDDHCGLWLPGNILQALFSNNSAYHDIHHQLYGNKYNFSQPFFVMWDKILGTYMPYSIEQRKGGGIESKPAKLD

SEQ ID NO: 4689 - protein, 155 aa, Zea mays subsp. mays
  peptide (1)..(155): Ceres Seq. ID no. 12409876
MVVMDTWQYFMHRYMHINKFLYKHIHSKHHTLVVPYSFGALYNHPLEGLILDTIGGALSFLVSGMTPRTSIFFFSFATIKTVDDHCGLWLPGNILQALFSNNSAYHDIHHQLYGNKYNFSQPFFVMWDKILGTYMPYSIEQRKGGGIESKPAKLD

SEQ ID NO: 4690 - protein, 152 aa, Zea mays subsp. mays
  peptide (1)..(152): Ceres Seq. ID no. 12409877
MDTWQYFMHRYMHINKFLYKHIHSKHHTLVVPYSFGALYNHPLEGLILDTIGGALSFLVSGMTPRTSIFFFSFATIKTVDDHCGLWLPGNILQALFSNNSAYHDIHHQLYGNKYNFSQPFFVMWDKILGTYMPYSIEQRKGGGIESKPAKLD

SEQ ID NO: 4691 - DNA, 1822 bp, Zea mays subsp. mays
  misc_feature (1)..(1822): Ceres Seq. ID no. 12406971
  misc_feature (1)..(1822): Ortholog of  Ceres SEQ ID NO 15169511 as cited in SEQ ID NO 65927
attccaccctcctccgtctccgatcctcgccttcaactccactccctcgctctctcgggccttcttccctagcacgacggggtgatcactgattcactgccgcccgcgccaggtcggcccagaactagtgggcgccaaacatcatagcgatcatggaggtggtctcttgcagccactcctgctcggcattacatcaaacaccagcaagcacatggaggcttcggggcagtgctcttggccttggtcttgggcatgccagcccttcccggaccagaagatacacagttgcgtgtgtaggaaccacgagtggagcttcgaatccgggtggttccggcaaggtccatgcagcccagggattccatgtaagcgacgtggatgcagccctgcagggcattccttccatgaaagccggggaggccgagagggtgatgattcaaggccttccggaaggccctgacagctccccgatcagtactgggttctgggagtggaagccgaagctgactgtgtactacgagaggtccggcatgaagaacagcaaggcacctgcggtgctcttcctgccggggttcggagtcgggacgttccatttcgagaagcagctgagggatcttggtcgcgatcatcgggtgtggacgatggattttctcgggcaggggatgtcgctgcctggtgaagatcctgctcctagtagcatagcgagcgaagatgcgttttggggctttggacaagattcccagccttgggcagaggagctggtgtattctgtggatttatggcaaaaccaagttcagcatttcattgaggaggttatccgtgaaccagtttatattgtggggaactctcttggaggttttgttgctctgtattttgctgcatccagtccacaccttgtaaaaggtgtcacactgcttaatgcaacaccgttttggggattctttcccaaccctgctacatctccccgattgtcaaagattttcccatgggctgggacatttccgcttccatcatttgtgaggaaaattactgaagcagtttggcaaaagataagtgacccaaaaagtattcaggacatactcaaacaagtatacgctgaccattcaacaaatgtggacaaagtattctctcgtattgtggagataacacaacacccagcagctgctgcatcgtttgcctccattatgtttgctccaaggggtcagatatccttccaagaggccatctctaggtgccaagaccaaggcattcctatatctctcatgtatggaagagaagatccttggattagacctatttggggccttaaagttaaacagcaagtgcccgaagcaccttattatgaaattagccccgctggtcattgtcctcatgatgaggtccctgaggttataaactacttgctccgtgggtggctgaagaacctcgagtctgagggctcagtcgacctgccgtttctagaagaacgcagctatgctgagcgtggtgtatccagggagctggagtttgtcagagaaggatcaaggaagtcagttagtgtgcggctctatggtaccaagatttccctatggagccagctaagctcattcttgaacacacgtgtccccaagtcacggatagtcttgagataatccatcctcaactccaatagatctcaatcttagaagctttgattcagatattgtatttattactttattaaattggtcagcagacagtgtttccagaattcctagcgcatgtaaatattggcactacagtggtagtttcgaatttatcatgattcatatcatgtcaagatatgcttgaagttctgttcatagct

SEQ ID NO: 4692 - protein, 491 aa, Zea mays subsp. mays
  peptide (1)..(491): Ceres Seq. ID no. 12406972
MEVVSCSHSCSALHQTPASTWRLRGSALGLGLGHASPSRTRRYTVACVGTTSGASNPGGSGKVHAAQGFHVSDVDAALQGIPSMKAGEAERVMIQGLPEGPDSSPISTGFWEWKPKLTVYYERSGMKNSKAPAVLFLPGFGVGTFHFEKQLRDLGRDHRVWTMDFLGQGMSLPGEDPAPSSIASEDAFWGFGQDSQPWAEELVYSVDLWQNQVQHFIEEVIREPVYIVGNSLGGFVALYFAASSPHLVKGVTLLNATPFWGFFPNPATSPRLSKIFPWAGTFPLPSFVRKITEAVWQKISDPKSIQDILKQVYADHSTNVDKVFSRIVEITQHPAAAASFASIMFAPRGQISFQEAISRCQDQGIPISLMYGREDPWIRPIWGLKVKQQVPEAPYYEISPAGHCPHDEVPEVINYLLRGWLKNLESEGSVDLPFLEERSYAERGVSRELEFVREGSRKSVSVRLYGTKISLWSQLSSFLNTRVPKSRIVLR

SEQ ID NO: 4693 - protein, 408 aa, Zea mays subsp. mays
  peptide (1)..(408): Ceres Seq. ID no. 12406973
MKAGEAERVMIQGLPEGPDSSPISTGFWEWKPKLTVYYERSGMKNSKAPAVLFLPGFGVGTFHFEKQLRDLGRDHRVWTMDFLGQGMSLPGEDPAPSSIASEDAFWGFGQDSQPWAEELVYSVDLWQNQVQHFIEEVIREPVYIVGNSLGGFVALYFAASSPHLVKGVTLLNATPFWGFFPNPATSPRLSKIFPWAGTFPLPSFVRKITEAVWQKISDPKSIQDILKQVYADHSTNVDKVFSRIVEITQHPAAAASFASIMFAPRGQISFQEAISRCQDQGIPISLMYGREDPWIRPIWGLKVKQQVPEAPYYEISPAGHCPHDEVPEVINYLLRGWLKNLESEGSVDLPFLEERSYAERGVSRELEFVREGSRKSVSVRLYGTKISLWSQLSSFLNTRVPKSRIVLR

SEQ ID NO: 4694 - protein, 399 aa, Zea mays subsp. mays
  peptide (1)..(399): Ceres Seq. ID no. 12406974
MIQGLPEGPDSSPISTGFWEWKPKLTVYYERSGMKNSKAPAVLFLPGFGVGTFHFEKQLRDLGRDHRVWTMDFLGQGMSLPGEDPAPSSIASEDAFWGFGQDSQPWAEELVYSVDLWQNQVQHFIEEVIREPVYIVGNSLGGFVALYFAASSPHLVKGVTLLNATPFWGFFPNPATSPRLSKIFPWAGTFPLPSFVRKITEAVWQKISDPKSIQDILKQVYADHSTNVDKVFSRIVEITQHPAAAASFASIMFAPRGQISFQEAISRCQDQGIPISLMYGREDPWIRPIWGLKVKQQVPEAPYYEISPAGHCPHDEVPEVINYLLRGWLKNLESEGSVDLPFLEERSYAERGVSRELEFVREGSRKSVSVRLYGTKISLWSQLSSFLNTRVPKSRIVLR

SEQ ID NO: 4695 - DNA, 1490 bp, Zea mays subsp. mays
  misc_feature (1)..(1490): Ceres Seq. ID no. 12409866
  misc_feature (1)..(1490): Ortholog of  Ceres SEQ ID NO 13662984 as cited in SEQ ID NO 64419
aaagagggacgagggagacgttggggaggggagcgagcgagccgtaacatccgagctgttccaatggcgacccctgccgttgctttcgtcgccagcgctttgttggggcggtggtagcgctaggagcggagcagtactaggttggtaggtggttgtagctttgcgcgtgacccgagcgcgcgctcgctcgctcctgtgcctctctacctcgcttgcgtgcgccgggaaggcagtgggtggctggtcggttctcgcaagaggttgctggtgctgttcctcctcccccggttgatgagcatggggcattgctccgagcagcggacggggttcgaggtgactaaggactggaacggcgccgaccagttcgcgatccggtcccccgcggggggcgtccgttcgggtctgcctgcacggcgggcaggtcgtctcgtggaggaaccaccgcggcgaggaactcctcttcagcagcagcaaggcaatcttcaagccgccaagagcgacccgtggtggcattccgatatgcttcccacagtttggaaactgtggaacattggagcagcatggatttgcaaggaacaagatatggacaatagacgatgaggctccacctctaaattatggtgataataacagcaacaaagcttctgttgaccttctgctaaagccatctgaagatgacctgaagtgctggccacactgttttgagttacgtctcagagtctctctttcaatggatggagacctttcactgatatcacgggtcagaaatgttaatgggaagccattcagtttcgcatttgcttaccatacatacctttctgtttctgacatcagtgaagtgaggatagaaggtctggagacccttgattatcttgacaaccttagccagcgggaacgttttaccgaacagggagatgccataacatttgaatcagaggttgatcgagtctatgttggctgcccaggcgtaatagctgttcttgaccatggaaagaaacgcacattcatcgtgcggaaagaagggcttcctgatattgttgtgtggaacccctgggagaagaagtccaagacgatggcagacttcggcgacgacgagtacaagcagatgctgtgcgtggatgcagccgcggtcgagagggccatcacgctgaagcccggggaggagtggacggggaagctggagctctccgccgtggcgtcgaccaactgcagcgaccacctggatcgcccgggcaggctgtagagcgctgggtgggtgggttcgttcgcccctgacgaaaggcatgtactagttttttttcatgtacatgggggcgctaggtccggcccttgcaggctgcagtatcatctacctgtcaggtgtgtcatgtgtgagtttaaacttatgtcagatccaagtattgctgtgatcgacatgttcgatgttcctggactgcgaagtctcaagcgcaggctgttcgtttggctggctttaatccgaaacggcatct

SEQ ID NO: 4696 - protein, 170 aa, Zea mays subsp. mays; identical to SEQ ID NO: 1488
  peptide (1)..(170): Ceres Seq. ID no. 12409867

SEQ ID NO: 4697 - protein, 102 aa, Zea mays subsp. mays
  peptide (1)..(102): Ceres Seq. ID no. 12409868
MSMGHCSEQRTGFEVTKDWNGADQFAIRSPAGGVRSGLPARRAGRLVEEPPRRGTPLQQQQGNLQAAKSDPWWHSDMLPTVWKLWNIGAAWICKEQDMDNRR

SEQ ID NO: 4698 - protein, 100 aa, Zea mays subsp. mays
  peptide (1)..(100): Ceres Seq. ID no. 12409869
MGHCSEQRTGFEVTKDWNGADQFAIRSPAGGVRSGLPARRAGRLVEEPPRRGTPLQQQQGNLQAAKSDPWWHSDMLPTVWKLWNIGAAWICKEQDMDNRR

SEQ ID NO: 4699 - DNA, 1559 bp, Zea mays subsp. mays
  misc_feature (1)..(1559): Ceres Seq. ID no. 12409862
  misc_feature (1)..(1559): Ortholog of  Ceres SEQ ID NO 14311136 as cited in SEQ ID NO 56694
gcacgagaccattacctagaacatcctaatcgaaaagcccgcccccaaaccaaagggaaaccctcaccacgcttcccgaaacttctcctttctccatcctcaaccctactcccccttcatccgcacgaacgaagcagcgcgagcgaggagcagacgatccttcccgacctcgaagcctaccccccttccagctgcggccatggcgaccgtcatgcagaagatcaaggacatcgaggacgagatggcaaggacacagaagaataaagccactgctcaccatcttggtcttcttaaggctaaacttgcaaaattgcggcgggagttgctcactccaacatccaaaggtggtggtggtgcaggtgaaggatttgatgtgacgaagagtggagatgcacgtgttggtttagttggctttccttcggttgggaaatcaacattgttgaacaagctaacagggacattttcagaggttgcttcctacgagtttacaactttaacatgtattcctggagttatcatgtataagggtgctaaaatccagcttctagatctcccagggatcatcgaaggtgctaaagatggaaagggcagaggaagacaggttatcagcacagctaggacatgcaatgttattttgattgttcttgatgccataaaaccaataactcacaagcgtcttattgagaaggagcttgaaggatttggcattaggttgaacaaaacaccacccaatttgactttcagaagaaaggacaagggtggaatcaacttcacatcaacagtgacgaacacacatttggaccttgatacagtaaaagcaatctgtagcgagtacaggatacataatgctgatgtctccctgagatatgatgctacagcagatgatctcatagatgttattgaaggaagccggatttacactccttgcgtatatgttgtcaacaagattgatcagataacactcgaggagctggaaatcttggacaaacttccccattactgcccggttagtgctcatcttgaatggaatcttgatggacttctggagaaggtatgggaatacttggatttggttaggatatacacaaaacctaaagggctgaacccagattatgaggatcctgttatcgtatcatctaagaagaaaaccgtggaagatttctgcgacagaatccacaaggacatggtcaaacaatttaaatacgctctggtatggggttccagtgtgaaacataagcctcagagagttggcaaggagcatgagcttgacgatgaggacgtcgttcagatcattaagaaaatataggcgtatcatgtggtggaacaaaacctgttttttctggaaaactgggagcgttgaggattttgttgagtagtagcctcgcgagaagagcttgaactcggcctttgcttgttggtgaggctcatatgtaatgttccctgttctcagaaaatttgctttgatccaaagacaatgtgagtcggcatttacttatatacaacgagtcatgtagctgtgatgtaacttcctctaacttggtgccatgtggactggagcc

SEQ ID NO: 4700 - protein, 368 aa, Zea mays subsp. mays
  peptide (1)..(368): Ceres Seq. ID no. 12409863
MATVMQKIKDIEDEMARTQKNKATAHHLGLLKAKLAKLRRELLTPTSKGGGGAGEGFDVTKSGDARVGLVGFPSVGKSTLLNKLTGTFSEVASYEFTTLTCIPGVIMYKGAKIQLLDLPGIIEGAKDGKGRGRQVISTARTCNVILIVLDAIKPITHKRLIEKELEGFGIRLNKTPPNLTFRRKDKGGINFTSTVTNTHLDLDTVKAICSEYRIHNADVSLRYDATADDLIDVIEGSRIYTPCVYVVNKIDQITLEELEILDKLPHYCPVSAHLEWNLDGLLEKVWEYLDLVRIYTKPKGLNPDYEDPVIVSSKKKTVEDFCDRIHKDMVKQFKYALVWGSSVKHKPQRVGKEHELDDEDVVQIIKKI

SEQ ID NO: 4701 - protein, 364 aa, Zea mays subsp. mays
  peptide (1)..(364): Ceres Seq. ID no. 12409864
MQKIKDIEDEMARTQKNKATAHHLGLLKAKLAKLRRELLTPTSKGGGGAGEGFDVTKSGDARVGLVGFPSVGKSTLLNKLTGTFSEVASYEFTTLTCIPGVIMYKGAKIQLLDLPGIIEGAKDGKGRGRQVISTARTCNVILIVLDAIKPITHKRLIEKELEGFGIRLNKTPPNLTFRRKDKGGINFTSTVTNTHLDLDTVKAICSEYRIHNADVSLRYDATADDLIDVIEGSRIYTPCVYVVNKIDQITLEELEILDKLPHYCPVSAHLEWNLDGLLEKVWEYLDLVRIYTKPKGLNPDYEDPVIVSSKKKTVEDFCDRIHKDMVKQFKYALVWGSSVKHKPQRVGKEHELDDEDVVQIIKKI

SEQ ID NO: 4702 - protein, 354 aa, Zea mays subsp. mays
  peptide (1)..(354): Ceres Seq. ID no. 12409865
MARTQKNKATAHHLGLLKAKLAKLRRELLTPTSKGGGGAGEGFDVTKSGDARVGLVGFPSVGKSTLLNKLTGTFSEVASYEFTTLTCIPGVIMYKGAKIQLLDLPGIIEGAKDGKGRGRQVISTARTCNVILIVLDAIKPITHKRLIEKELEGFGIRLNKTPPNLTFRRKDKGGINFTSTVTNTHLDLDTVKAICSEYRIHNADVSLRYDATADDLIDVIEGSRIYTPCVYVVNKIDQITLEELEILDKLPHYCPVSAHLEWNLDGLLEKVWEYLDLVRIYTKPKGLNPDYEDPVIVSSKKKTVEDFCDRIHKDMVKQFKYALVWGSSVKHKPQRVGKEHELDDEDVVQIIKKI

SEQ ID NO: 4703 - DNA, 1217 bp, Zea mays subsp. mays
  misc_feature (1)..(1217): Ceres Seq. ID no. 12409859
  misc_feature (1)..(1217): Ortholog of  Ceres SEQ ID NO 14307589 as cited in SEQ ID NO 20466
  misc_feature (1)..(1217): Ortholog of  Ceres SEQ ID NO 14303324 as cited in SEQ ID NO 54563
  misc_feature (1)..(1217): Ortholog of  Ceres SEQ ID NO 14316404 as cited in SEQ ID NO 57641
  misc_feature (1)..(1217): Ortholog of  Ceres SEQ ID NO 14308575 as cited in SEQ ID NO 58782
  misc_feature (1)..(1217): Ortholog of  Ceres SEQ ID NO 12611159 as cited in SEQ ID NO 59821
  misc_feature (1)..(1217): Ortholog of  Ceres SEQ ID NO 13661001 as cited in SEQ ID NO 67531
  misc_feature (1)..(1217): Ortholog of  Ceres SEQ ID NO 15180029 as cited in SEQ ID NO 0
gcaaattaaggcttcagctcgcgcgagacctcagctttcactcgagtgagtgcgagtccatcgccggagagagagagagcgagagcacgcaatcgagttaaacaagccctgtctcttggttctctgtccacggcgggagagtggtagagatgggcaggcagccgtgctgcgagaagatcggtatcaagaaggggccgtggaccgcggaggaggaccagaagctggtcaccttcctcctgtctcacggccattgctgctggcggctcgtccccaagctcgcggggctgctgaggtgcgggaagagctgccggctgcggtggaccaactacctgaggccggacctcaagcgcggcctcctctcggaggaggaagaggcgctggtcatcgacctccacgcgcagctcggcaaccggtggtccaagatcgcggcgcggctgccggggaggacggacaacgagataaagaaccactggaacacccacatcaagaagaagctcaagaagatgggcatcgaccccgtcacccacgggccgctcgcgccggccactcaacctctggcgctggcgcagcagcgcgatcctccgcaggtggtgcgagaagaggaacgttgcgacgacgaccccagcaagcaggcatcgtcgcaagggctggcggcgggcgccgacgaggacgacgacgtggaggagacgccggcgagcgccgcccagccgcacggcgcgacgaccacctcccctgcttccgcagcggctggatccgtctcgccgtcctgctcctcctcggcctccggcgcggacgcggacgcggccgcctggcccggccccatcgacctcttcctcgaagtggacggcatcatggacatggactgggcgggcatcctttcgggctgcggcgatgacgacgccgcggacataagcgtcgatcttttcgaccattacgcaggcgatggctttgatgaacaagtctggatgtgatgcttgctcttcctgcaggtagcagcagtacactgggcggtaggatggttagaactgtgttgtgttgttactggtgatcgtatctctgctcttgcgtttgcgtgtccagttgcctctcttgttttcttgggtcaattcaagttcgcccgcgtccatgcatgcatggttgctggtatgggggagaggcacggcctggtttgtgtggtacgttcttcgtgaagattgaggaaatgaattgtgattgcg

SEQ ID NO: 4704 - protein, 273 aa, Zea mays subsp. mays
  peptide (1)..(273): Ceres Seq. ID no. 12409860
MGRQPCCEKIGIKKGPWTAEEDQKLVTFLLSHGHCCWRLVPKLAGLLRCGKSCRLRWTNYLRPDLKRGLLSEEEEALVIDLHAQLGNRWSKIAARLPGRTDNEIKNHWNTHIKKKLKKMGIDPVTHGPLAPATQPLALAQQRDPPQVVREEERCDDDPSKQASSQGLAAGADEDDDVEETPASAAQPHGATTTSPASAAAGSVSPSCSSSASGADADAAAWPGPIDLFLEVDGIMDMDWAGILSGCGDDDAADISVDLFDHYAGDGFDEQVWM

SEQ ID NO: 4705 - protein, 155 aa, Zea mays subsp. mays
  peptide (1)..(155): Ceres Seq. ID no. 12409861
MGIDPVTHGPLAPATQPLALAQQRDPPQVVREEERCDDDPSKQASSQGLAAGADEDDDVEETPASAAQPHGATTTSPASAAAGSVSPSCSSSASGADADAAAWPGPIDLFLEVDGIMDMDWAGILSGCGDDDAADISVDLFDHYAGDGFDEQVWM

SEQ ID NO: 4706 - DNA, 1527 bp, Zea mays subsp. mays
  misc_feature (1)..(1527): Ceres Seq. ID no. 12356270
  misc_feature (1)..(1527): Ortholog of  Ceres SEQ ID NO 14301874 as cited in SEQ ID NO 66215
aacgcaacacttccgtgccctacgccccagaacctcccaccgcatcggagggctccgcgcctccgctacgccgatggcgtcccagccgccgccagagcccgcaccggccgaggcgggtctggaaagcatggagggcctcgtcctcgacacggtcatctcaagagccggcgcgcgccccgcagcggcgctcgcctgcgccagcacgcgcctccgcaccgccgttgccgacgactccctctggcgcagattctgcggtgaggacctggggctcgacgctcccgtcgatccagagggccggcctcttccctccttccaggttgcatataaactttggttggagtcttttggcatgtaccctctacctatggtaaagagagtgagacaattctggacttcaatgaaaacttggttgtctgaaaactttcctgaggcatacaaaacgttatgcgaaggtgtttctgaagctcaattaaagtcagcagaggatgatcttggtttcaagctccctatgcccacaaagctgttgtatcgcttttgcaatgctcaactgccttttagtgaggaccatgacacaaataaaagcatttccactcatggattgattgggggctatgcgttttatgatcattgggtgaatgtgcatttgtcaccgcttgagcaaatagttgaagagacgaaggactctatcgggagttccctgatgtatttcatgggcgcaaattcattgtagtggcaacttcatggtttcatccgaaaacatttcttctagattgctcaaatggtgaactttatgttggtacatacaacttaccgataggaggaatgcttccctgtgtgcccaaagcattgataaagccagcaggtaatgatctagcacaagatggactacttctgtggttagaagaacaccttaggcgtttacagagtggcatgatcaagacccgtatgctgatggcatcgagatatatcagcttatatccagaagcacctccatcatgcagttcagctgttacaaatggcattaaggtacgctcatctgctgtctttgtgccagaacatcctgggaggcctggggaaaaatttatgttcacttactcaattcgcatgtcagttccagaggcatgcatgctaggtggcgtgtactattcttcctgccagctttgctcccgccactggaccatcagatcgtgtgacagggttgtttctgatgtgagcggaggaggggttattggagagtatcctctactgttacctggcgaggatgagtttgtctacgagagttgcacgccactgccccaagtacctggatctgtggagggctctttttcgtttgtgcctggcaagttgagccgacctgaagggaagccgttcgaagtcatggtggctcctttccctcttgatgtgccagaatacatcttctgatgatcacagcagaaataaatgtatgtatgcttgttggggaaaagtccggatgcttgtaataaccttattggagtaatgtaaaataaggaaccgtgcgctcttcgt

SEQ ID NO: 4707 - protein, 242 aa, Zea mays subsp. mays
  peptide (1)..(242): Ceres Seq. ID no. 12356271
TQHFRALRPRTSHRIGGLRASATPMASQPPPEPAPAEAGLESMEGLVLDTVISRAGARPAAALACASTRLRTAVADDSLWRRFCGEDLGLDAPVDPEGRPLPSFQVAYKLWLESFGMYPLPMVKRVRQFWTSMKTWLSENFPEAYKTLCEGVSEAQLKSAEDDLGFKLPMPTKLLYRFCNAQLPFSEDHDTNKSISTHGLIGGYAFYDHWVNVHLSPLEQIVEETKDSIGSSLMYFMGANSL

SEQ ID NO: 4708 - protein, 218 aa, Zea mays subsp. mays
  peptide (1)..(218): Ceres Seq. ID no. 12356272
MASQPPPEPAPAEAGLESMEGLVLDTVISRAGARPAAALACASTRLRTAVADDSLWRRFCGEDLGLDAPVDPEGRPLPSFQVAYKLWLESFGMYPLPMVKRVRQFWTSMKTWLSENFPEAYKTLCEGVSEAQLKSAEDDLGFKLPMPTKLLYRFCNAQLPFSEDHDTNKSISTHGLIGGYAFYDHWVNVHLSPLEQIVEETKDSIGSSLMYFMGANSL

SEQ ID NO: 4709 - protein, 200 aa, Zea mays subsp. mays
  peptide (1)..(200): Ceres Seq. ID no. 12356273
MEGLVLDTVISRAGARPAAALACASTRLRTAVADDSLWRRFCGEDLGLDAPVDPEGRPLPSFQVAYKLWLESFGMYPLPMVKRVRQFWTSMKTWLSENFPEAYKTLCEGVSEAQLKSAEDDLGFKLPMPTKLLYRFCNAQLPFSEDHDTNKSISTHGLIGGYAFYDHWVNVHLSPLEQIVEETKDSIGSSLMYFMGANSL

SEQ ID NO: 4710 - DNA, 709 bp, Zea mays subsp. mays
  misc_feature (1)..(709): Ceres Seq. ID no. 12412856
  misc_feature (1)..(709): Ortholog of  Ceres SEQ ID NO 13582048 as cited in SEQ ID NO 56639
aaaaaacgaaacggctaagaaatccccaccttcacccacaaactagccggacaagcgaacaaaaggtgtaagagcttacgaccgacgcggccaaatagagataagagcaagatgacgtcgtcgacggcgttcagccaactgttcccttccgccgctgcggtatcccccgtccctcgctgcgtctccctgcagctcttctgcgccagcggtggagttgtccctggatggaggagaagatgccgccgcatggccatggtgcgcgcggcaaccgcggatgctgcggcgcccgcctacacctccgattccctcatcctctacttcaaggcggagggcaccatggaggagagggccattcccaagatcacagaatctcttgagggtatggagggagtcaaggacctggaggtgctcattgaagaaggcatcggaagtgttgtgttaacaaaggagacaactgtgcaagctactggagtagcctcgaacctggtggaagctatccagggagctgggttcaagctgcaaactctaagcttgagcttcgatgatttcgacgagccagcagcaggagcgggaggcactgtccaatccagcgagtgagctaatttgtggtgccgtgcgtggtgccaaatgcatataattcggtctcctgattttgtttaccctgctccttacctttgatttccgaagcacgatcttgtttttttttggc

SEQ ID NO: 4711 - protein, 161 aa, Zea mays subsp. mays
  peptide (1)..(161): Ceres Seq. ID no. 12412857
MTSSTAFSQLFPSAAAVSPVPRCVSLQLFCASGGVVPGWRRRCRRMAMVRAATADAAAPAYTSDSLILYFKAEGTMEERAIPKITESLEGMEGVKDLEVLIEEGIGSVVLTKETTVQATGVASNLVEAIQGAGFKLQTLSLSFDDFDEPAAGAGGTVQSSE

SEQ ID NO: 4712 - protein, 116 aa, Zea mays subsp. mays
  peptide (1)..(116): Ceres Seq. ID no. 12412858
MAMVRAATADAAAPAYTSDSLILYFKAEGTMEERAIPKITESLEGMEGVKDLEVLIEEGIGSVVLTKETTVQATGVASNLVEAIQGAGFKLQTLSLSFDDFDEPAAGAGGTVQSSE

SEQ ID NO: 4713 - protein, 114 aa, Zea mays subsp. mays
  peptide (1)..(114): Ceres Seq. ID no. 12412859
MVRAATADAAAPAYTSDSLILYFKAEGTMEERAIPKITESLEGMEGVKDLEVLIEEGIGSVVLTKETTVQATGVASNLVEAIQGAGFKLQTLSLSFDDFDEPAAGAGGTVQSSE

SEQ ID NO: 4714 - DNA, 1356 bp, Zea mays subsp. mays
  misc_feature (1)..(1356): Ceres Seq. ID no. 12373716
  misc_feature (1)..(1356): Ortholog of  Ceres SEQ ID NO 15175048 as cited in SEQ ID NO 59975
  misc_feature (1)..(1356): Ortholog of  Ceres SEQ ID NO 13597333 as cited in SEQ ID NO 63974
  misc_feature (1)..(1356): Ortholog of  Ceres SEQ ID NO 12407937 as cited in SEQ ID NO 0
  misc_feature (1)..(1356): Ortholog of  Ceres SEQ ID NO 13599307 as cited in SEQ ID NO 0
gtcttaccgcagcctcgtcctatccgtttgacgctcatccctggtatcccactcccctccctccccagccaacgacctccgccgccggccaccgcctgcctcagatcccccgccccgcccttccgttactcccagcgcgacgcggctgcgtccatgacgccctcctccgctctagccctcgcgctccaggccgcggcgtccccgctcccggcctccacgccgcggtcctcgcccaggtccagctcgctgagcctgggccgggggaccgccgggaacggcccgcgccgtcttgccgcagcagcgcccccacgggcgttcttctcatcgtccccctaccagccgccccaaccggaggggttctcgccacacccgggagtacggcctggtccccatggtgatcgaaaccacctcccgcggggagcgcgcctacgacatcttctcgcgcctgctgaaggagcgcatcgtctgcatcaacgggcccatcgccgacgacacggcctcgcttgtcgtcgcacagctgctcttcctcgagtccgagaacccactcaagcccgtccacctctatatcaactcccccgggggtgtcgtcaccgcggggctcgccatctacgacaccatgcagtacatccgctgccccgtcaccacgctctgcatcggccaggcggcctccatgggctcgctcctcctcgcggctggggcgccgggtgagaggcgcgcgctgcccaacgccagggtcatgatccaccagccctcgggcggcgcgcaggggcaggccactgacatcgccatccaggccaaggagatcctcaagctgcgcgaccgcctcaacaagatctaccagaagcacacgcgccagcccatcgacaagatcgagcagtgcatggagagggacctcttcatggatcccgacgaggcgcgcgactggggcctcatcgacgaggtcatcgagaaccgacctgcctcgctcatgcccgacggaatcgttggaggcctcgatgtgcccagcctcggtggcggtgggggcgggggcggacggggaagcgacgtcgaggagccttcggcggtgtgagaattggcctcaaaggtgaaatcccgttcgcatccggtggctttgttgtttgttgttagatctgaaggttcgattcttaccgtacaaggttaaccttgttattctggttacggaggcatccggctccccattctccttgttgcttcaattgcctgaattgagctattggtgatataattattacaactccaaggaaattctgttctgctggtactgataaattgacaaagtattgtgtatgttgtactatactactatattagtatcaattccatgccagggcattg

SEQ ID NO: 4715 - protein, 235 aa, Zea mays subsp. mays
  peptide (1)..(235): Ceres Seq. ID no. 12373717
VLPQPRPIRLTLIPGIPLPSLPSQRPPPPATACLRSPAPPFRYSQRDAAASMTPSSALALALQAAASPLPASTPRSSPRSSSLSLGRGTAGNGPRRLAAAAPPRAFFSSSPYQPPQPEGFSPHPGVRPGPHGDRNHLPRGARLRHLLAPAEGAHRLHQRAHRRRHGLACRRTAALPRVREPTQARPPLYQLPRGCRHRGARHLRHHAVHPLPRHHALHRPGGLHGLAPPRGWGAG

SEQ ID NO: 4716 - protein, 225 aa, Zea mays subsp. mays
  peptide (1)..(225): Ceres Seq. ID no. 12373718
MVIETTSRGERAYDIFSRLLKERIVCINGPIADDTASLVVAQLLFLESENPLKPVHLYINSPGGVVTAGLAIYDTMQYIRCPVTTLCIGQAASMGSLLLAAGAPGERRALPNARVMIHQPSGGAQGQATDIAIQAKEILKLRDRLNKIYQKHTRQPIDKIEQCMERDLFMDPDEARDWGLIDEVIENRPASLMPDGIVGGLDVPSLGGGGGGGGRGSDVEEPSAV

SEQ ID NO: 4717 - protein, 184 aa, Zea mays subsp. mays
  peptide (1)..(184): Ceres Seq. ID no. 12373719
MTPSSALALALQAAASPLPASTPRSSPRSSSLSLGRGTAGNGPRRLAAAAPPRAFFSSSPYQPPQPEGFSPHPGVRPGPHGDRNHLPRGARLRHLLAPAEGAHRLHQRAHRRRHGLACRRTAALPRVREPTQARPPLYQLPRGCRHRGARHLRHHAVHPLPRHHALHRPGGLHGLAPPRGWGAG

SEQ ID NO: 4718 - DNA, 848 bp, Zea mays subsp. mays
  misc_feature (1)..(848): Ceres Seq. ID no. 12344457
  misc_feature (1)..(848): Ortholog of  Ceres SEQ ID NO 13594762 as cited in SEQ ID NO 51909
agactgctcgaccggaccgacgagcgacgaagcgcgcagaaagagaagaacctcggagctgagatggcacaagccatggcgtcgatgaccggcctctcgcagggcgtcctgcccagcaggcgcgccgacagcagaaccaggacggccgtcgtcatcgtcagggcgtccgcggagggcgacgccgttgcgcaggcgggccgccgcgccgtgatcgggctggtggccactggcatcgtcggcggcgccttgtcgcaggcggcgcgcgccgagaccgtcaagaccatcaagattggagccccgccgccgccctccggtggactccccgggactctcaactctgaccaggcgagggacttcgacctccccttgaaggagcggttctacctgcagccgctgccgccggcggaggcggcggcgagggtgaagacgtcggcgcaggacatcatcaacctcaagccgctcatcgacaagaaggcgtggccgtacgtccagaacgacctccgcctccgggcctcctacctgcgctacgacctcaagaccgtcatcgcttccaagcccaaggaggagaagaagagcctcaaggagctcaccggcaagctcttcagcaccatcgacgatcttgaccatgccgcgaagatcaagagcaccccagaggccgagaaatacttcgcagcaaccaaagatgctcttggcgatgttctcgccaagctaggctagacgcaagggctaataatggccatgtaatttcggacttgtgtttgttcatatggacccggcaaggcaatgtaccattttctgttgatattgtatcaggaagcacttaactacaatgctatcttgagtccttg

SEQ ID NO: 4719 - protein, 238 aa, Zea mays subsp. mays
  peptide (1)..(238): Ceres Seq. ID no. 12344458
RLLDRTDERRSAQKEKNLGAEMAQAMASMTGLSQGVLPSRRADSRTRTAVVIVRASAEGDAVAQAGRRAVIGLVATGIVGGALSQAARAETVKTIKIGAPPPPSGGLPGTLNSDQARDFDLPLKERFYLQPLPPAEAAARVKTSAQDIINLKPLIDKKAWPYVQNDLRLRASYLRYDLKTVIASKPKEEKKSLKELTGKLFSTIDDLDHAAKIKSTPEAEKYFAATKDALGDVLAKLG

SEQ ID NO: 4720 - protein, 217 aa, Zea mays subsp. mays
  peptide (1)..(217): Ceres Seq. ID no. 12344459
MAQAMASMTGLSQGVLPSRRADSRTRTAVVIVRASAEGDAVAQAGRRAVIGLVATGIVGGALSQAARAETVKTIKIGAPPPPSGGLPGTLNSDQARDFDLPLKERFYLQPLPPAEAAARVKTSAQDIINLKPLIDKKAWPYVQNDLRLRASYLRYDLKTVIASKPKEEKKSLKELTGKLFSTIDDLDHAAKIKSTPEAEKYFAATKDALGDVLAKLG

SEQ ID NO: 4721 - protein, 213 aa, Zea mays subsp. mays
  peptide (1)..(213): Ceres Seq. ID no. 12344460
MASMTGLSQGVLPSRRADSRTRTAVVIVRASAEGDAVAQAGRRAVIGLVATGIVGGALSQAARAETVKTIKIGAPPPPSGGLPGTLNSDQARDFDLPLKERFYLQPLPPAEAAARVKTSAQDIINLKPLIDKKAWPYVQNDLRLRASYLRYDLKTVIASKPKEEKKSLKELTGKLFSTIDDLDHAAKIKSTPEAEKYFAATKDALGDVLAKLG

SEQ ID NO: 4722 - DNA, 1767 bp, Zea mays subsp. mays
  misc_feature (1)..(1767): Ceres Seq. ID no. 13498593
  misc_feature (1)..(1767): Ortholog of  Ceres SEQ ID NO 15178310 as cited in SEQ ID NO 1089
  misc_feature (1)..(1767): Ortholog of  Ceres SEQ ID NO 14309934 as cited in SEQ ID NO 20583
  misc_feature (1)..(1767): Ortholog of  Ceres SEQ ID NO 14304565 as cited in SEQ ID NO 53297
  misc_feature (1)..(1767): Ortholog of  Ceres SEQ ID NO 15172170 as cited in SEQ ID NO 58957
  misc_feature (1)..(1767): Ortholog of  Ceres SEQ ID NO 13654989 as cited in SEQ ID NO 63117
  misc_feature (1)..(1767): Ortholog of  Ceres SEQ ID NO 13656662 as cited in SEQ ID NO 65594
  misc_feature (1)..(1767): Ortholog of  Ceres SEQ ID NO 14303173 as cited in SEQ ID NO 66550
  misc_feature (1)..(1767): Ortholog of  Ceres SEQ ID NO 13584744 as cited in SEQ ID NO 69137
acaagcacagcagcagcagcagcagcagcaggcaagaagaatccaaagcggaagggtctctccccccatctctgttccaccaggtgcggcgggcggcgatgggggcgcggaggcggctgcaggcagacgcgccgccggggcatcgccacaggcagggcgcgccggcgccggactcggagcgccgggtacctcaacgggtggctgtcgcagccgacgcccgtcttcggcctccgcctctgggtgctcatcggcatcgccgtcggcgccgccatcgtgctcgtgctcctcctcatcttcgtctgcctctcccgccgccgccgccgccgccgcctcgccgccaacccctactaccccgccgacaccaagctgctcaagaagcacctgcagcagcaggccacgcccacgcccacgcccaccaaggacatccaggagatcgtccgccgccagcaggagcccgcggtgcagctcgccaaggccgtgccgcagccgcagccgcagccgcagactcctccgccgccgccgcctccgcagcacaggccaccggcgcggaagacgcccggcagcggcgtgtcggccacgactagcggcgggagcgagcgggacggcgccacgcctaggagcaccggcagcggcgcggggctgccggaggtctcgcacctcgggtggggccactggttcacgctccgcgagctggaggaggccaccggcgggctcgccgaggagaatgtgatcggcgagggcgggtacgggatcgtgtacaagggcaccttgcacgactccactttggtcgccgtcaagaacctgctcaataatagggggcaggccgagaaggagttcaaggtggaggtggaagcaatcggtcgtgttcggcacaaaaatctcgtcaggttgctcggctactgcgtagagggtgcttacaggatgctcgtgtatgagtatgtggacaatggtaatcttgaccagtggcttcatggtgatgttggcgaagtgagccccactgacatgggacatcaggatgaacattatgcttgccacagctaaagggctggcctacctccacgaggggctggaaccgaaggtggtccaccgcgacatcaaggctagcaacatccttcttgaccagcagtggaacgccaaagtatcggatttcgggctcgcaaagctgttgtgctcggagagaagctacgttacgacccgtgtcatgggaaccttcggttacgtggcgcctgagtacgccagcaccggcatgctgaacgagaggagcgatgtgtatagcttcggcgtgctgataatggagatcatcaccggcagatgtcctgtggattacacaagggcggctggagaggtgcagctggtggagtggctcaagaacatggtggccgagaggaaagcggaggaggtagtggacagtaagatggccgagaggcctcctcccaagacgctgaagcgggcgctcctggtggcgctccgctgcgtggaccctgacgcgaacaagcggcctaagatggggcatgtgatccacatgctcgaaatggacgatctccagttccgagacgataagaggcccggggccgggagagatggtcgtcgtccccagggtccggataggtacagctccaagctaggtggaggaagggagcctcagcaagcgcgagcaccagcgtcggtacagatgagatgattgtcattagagagtagcgatattaaccatgttatttttttcccgtcagtaaatacattctttcccaactcgttccatcgattctc

SEQ ID NO: 4723 - protein, 346 aa, Zea mays subsp. mays
  peptide (1)..(346): Ceres Seq. ID no. 13498594
TSTAAAAAAAGKKNPKRKGLSPHLCSTRCGGRRWGRGGGCRQTRRRGIATGRARRRRTRSAGYLNGWLSQPTPVFGLRLWVLIGIAVGAAIVLVLLLIFVCLSRRRRRRRLAANPYYPADTKLLKKHLQQQATPTPTPTKDIQEIVRRQQEPAVQLAKAVPQPQPQPQTPPPPPPPQHRPPARKTPGSGVSATTSGGSERDGATPRSTGSGAGLPEVSHLGWGHWFTLRELEEATGGLAEENVIGEGGYGIVYKGTLHDSTLVAVKNLLNNRGQAEKEFKVEVEAIGRVRHKNLVRLLGYCVEGAYRMLVYEYVDNGNLDQWLHGDVGEVSPTDMGHQDEHYACHS

SEQ ID NO: 4724 - protein, 242 aa, Zea mays subsp. mays
  peptide (1)..(242): Ceres Seq. ID no. 13498595
QAQQQQQQQQARRIQSGRVSPPISVPPGAAGGDGGAEAAAGRRAAGASPQAGRAGAGLGAPGTSTGGCRSRRPSSASASGCSSASPSAPPSCSCSSSSSSASPAAAAAAASPPTPTTPPTPSCSRSTCSSRPRPRPRPPRTSRRSSAASRSPRCSSPRPCRSRSRSRRLLRRRRLRSTGHRRGRRPAAACRPRLAAGASGTAPRLGAPAAARGCRRSRTSGGATGSRSASWRRPPAGSPRRM

SEQ ID NO: 4725 - protein, 221 aa, Zea mays subsp. mays
  peptide (1)..(221): Ceres Seq. ID no. 13498596
MNIMLATAKGLAYLHEGLEPKVVHRDIKASNILLDQQWNAKVSDFGLAKLLCSERSYVTTRVMGTFGYVAPEYASTGMLNERSDVYSFGVLIMEIITGRCPVDYTRAAGEVQLVEWLKNMVAERKAEEVVDSKMAERPPPKTLKRALLVALRCVDPDANKRPKMGHVIHMLEMDDLQFRDDKRPGAGRDGRRPQGPDRYSSKLGGGREPQQARAPASVQMR

SEQ ID NO: 4726 - DNA, 1493 bp, Zea mays subsp. mays
  misc_feature (1)..(1493): Ceres Seq. ID no. 12352289
  misc_feature (1)..(1493): Ortholog of  Ceres SEQ ID NO 14302757 as cited in SEQ ID NO 56631
  misc_feature (1)..(1493): Ortholog of  Ceres SEQ ID NO 13662567 as cited in SEQ ID NO 62884
atagtcactcccccaactctgctgcttcccgtggccgtggttcaaaattcgaatccagaaagacttccccaagcattttccgtttctttaaaccgtcatcgtcctccctcgtgctagcctcgctcgttgcgcgttcaaatttcgaaccacctccgccttcgacgccccaaaccctagcccgacccctcctcctccacctgcgccaccgcccaccatgagctccgccgccgcgccagctgccgtcggcagcggcaaggagcttgccaacccgcccgccgacggaatcaccaacctccgcttctccaaccacagcaacaacctcctcgtctcctcatgggacaagacggtgcggctctacgacgccgacgccaacgtgctcaagggggagttcatgcaccccggggccgtcctcgactgctgcttccacgacgactcctcgggctttagcgccggtgccgaccacaccgtgcggaggttggtatttagctcgtccaaggaagatgttttggggcggcatgatggtccggttcgttgcgtggaatactcttatgctgcaggtcaagtcatcaccggcagctgggataaaactgtaaaatgctgggatccaagaggagttagtggaccagagcgcacccttgttgggacatatgctcaacctgaacgtgtatattctctttcgttagtaggaaataggttggttgttgcaacagctggaagacatgtaaatatttatgatctgcgcaatatgtctcaacctgagcaaaaaagagactcttctttgaaatatcaaacacgatgtgttcgatgttttcccaacggaacaggatatgctcttagttctgttgaagggcgagtttctatggaattctttgatctatctgagtctgctcaatctaaaaagtatgctttcaagtgtcatcggaagtctgaggccggcagggacaccgtttatcctgtcaatgcaattgctttccatcccatatatggaacatttgccaccggagggtgtgatggatttgtgaatgtgtgggatggcattaacaagaaaagactatatcagtactcgaagtacgcatcaagcatcgctgctctatcattcagtaaggatgggcatctgcttgctgtggcatccagctacacttatgaagagggagaaaaaacgcatgaacctgacgctatatttatccggacagtgaatgaagtcgaggtgaagccgaagcccaaggcattggcagccccccagtagtgctgtgacctgttctggaggctagatgacccgtacttctctgcgttgatgtcaattacattagttgacggagtgcttgtttgtgttgaaagagctgaaacgcctgtgtttcttaatctggaaccctcttctcccgttttacttgtccgtggaaacatttcatgttccagctggttgtatattccgaaacagaccatgttttagttcactcggttcttcgttgacttaagttatttatcaaatattt

SEQ ID NO: 4727 - protein, 343 aa, Zea mays subsp. mays
  peptide (1)..(343): Ceres Seq. ID no. 12352290
MSSAAAPAAVGSGKELANPPADGITNLRFSNHSNNLLVSSWDKTVRLYDADANVLKGEFMHPGAVLDCCFHDDSSGFSAGADHTVRRLVFSSSKEDVLGRHDGPVRCVEYSYAAGQVITGSWDKTVKCWDPRGVSGPERTLVGTYAQPERVYSLSLVGNRLVVATAGRHVNIYDLRNMSQPEQKRDSSLKYQTRCVRCFPNGTGYALSSVEGRVSMEFFDLSESAQSKKYAFKCHRKSEAGRDTVYPVNAIAFHPIYGTFATGGCDGFVNVWDGINKKRLYQYSKYASSIAALSFSKDGHLLAVASSYTYEEGEKTHEPDAIFIRTVNEVEVKPKPKALAAPQ

SEQ ID NO: 4728 - protein, 284 aa, Zea mays subsp. mays
  peptide (1)..(284): Ceres Seq. ID no. 12352291
MHPGAVLDCCFHDDSSGFSAGADHTVRRLVFSSSKEDVLGRHDGPVRCVEYSYAAGQVITGSWDKTVKCWDPRGVSGPERTLVGTYAQPERVYSLSLVGNRLVVATAGRHVNIYDLRNMSQPEQKRDSSLKYQTRCVRCFPNGTGYALSSVEGRVSMEFFDLSESAQSKKYAFKCHRKSEAGRDTVYPVNAIAFHPIYGTFATGGCDGFVNVWDGINKKRLYQYSKYASSIAALSFSKDGHLLAVASSYTYEEGEKTHEPDAIFIRTVNEVEVKPKPKALAAPQ

SEQ ID NO: 4729 - DNA, 1522 bp, Zea mays subsp. mays
  misc_feature (1)..(1522): Ceres Seq. ID no. 12409851
  misc_feature (1)..(1522): Ortholog of  Ceres SEQ ID NO 15168502 as cited in SEQ ID NO 60095
  misc_feature (1)..(1522): Ortholog of  Ceres SEQ ID NO 14314084 as cited in SEQ ID NO 63256
attattagagagagctacaacaagcatgaagctaagactggtagcgctagtgctggcggtagcgtccggtgtacgcttgctcgtcggcggcatcagcgttcgcgggggacgacgtcgtccgtgtcgcgctaaagcatgtcgacgctgggaagcagctgtccaggcccgagctgatccggcgcgccatgcggaggagcaaggcgagggcggccgcgctctccgcggtgaggaaccgcgcccgcttctctggcaagaacgagcagcaaacgcccgccggcgtgctgccggtgcgcccgtcgggggacctcgagtacgtcatcgacctcgccatcggcacgccgccgcagcccgtctcggcgctgctcgacaccggcagcgacctcatctggacgcagtgcgcgccgtgcgccagctgcctctcgcagccggacccgctgttcgcgccggggcagtcggcgtcgtacgagcccatgcggtgcgccgggacgctctgctctgacatcctgcaccacagctgcgagaggcccgacacgtgcacctaccgctacaactacggcgacggcacgatgaccgtgggcgtgtacgccacggagcgcttcaccttcgcgtcgtcgggcggcggcgggctcacgactaccgtcccgctcggcttcgggtgcggctccgtgaacgtcggcagcctcaacaacggctccggcatcgtgggcttcggccggaacccgctctcgctcgtgtcccagctctccatccgccgcttctcctactgcctcacgtcctacgccagccgcaggcagagcaccctcctgtttggctccctgtccgacggagtctacggtgacgccacgggccgcgtgcagaccacaccgctcctccagagcccccagaacccgaccttctactacgtacacttcacgggcctgaccgtcggcgccaggcggctgcggataccggagtcagcgttcgcgctccggcccgacggctcgggcggcgtgatcgtcgactccggcacggcgctcacgctcctcccagccgcggtgctcgcgggaggtggtgcgggcgttccgccagcagctgaggctgccgttcgcaaacggcggcaaccccgaggacggcgtgtgcttcctggtgcccgcggcctggcggcgctcgtcgtcgacgtcacagatgccggtcccgaggatggtgctccacttccagggcgcggacctcgacctgccgcgccgaaactacgtcctggacgaccacaggaggggccgcctgtgcctcctcctggcagactccggcgacgatggctccacgattggcaacctggtgcagcaggacatgcgcgtgctctacgatttggaggcagagaccttgtcgatcgctccggcacgatgctgacacgcgcgcaactagtagaaaggccgccgactactcgactactctcactgtatgcaagttagtgttaaccatgcaaatgcatgccaaccataccgggtcgcactttgcacgcaggcaaacaaattttttttgtcggtcg

SEQ ID NO: 4730 - protein, 419 aa, Zea mays subsp. mays
  peptide (1)..(419): Ceres Seq. ID no. 12409852
MRRSKARAAALSAVRNRARFSGKNEQQTPAGVLPVRPSGDLEYVIDLAIGTPPQPVSALLDTGSDLIWTQCAPCASCLSQPDPLFAPGQSASYEPMRCAGTLCSDILHHSCERPDTCTYRYNYGDGTMTVGVYATERFTFASSGGGGLTTTVPLGFGCGSVNVGSLNNGSGIVGFGRNPLSLVSQLSIRRFSYCLTSYASRRQSTLLFGSLSDGVYGDATGRVQTTPLLQSPQNPTFYYVHFTGLTVGARRLRIPESAFALRPDGSGGVIVDSGTALTLLPAAVLAGGGAGVPPAAEAAVRKRRQPRGRRVLPGARGLAALVVDVTDAGPEDGAPLPGRGPRPAAPKLRPGRPQEGPPVPPPGRLRRRWLHDWQPGAAGHARALRFGGRDLVDRSGTMLTRAQLVERPPTTRLLSLYAS

SEQ ID NO: 4731 - protein, 324 aa, Zea mays subsp. mays
  peptide (1)..(324): Ceres Seq. ID no. 12409853
MRCAGTLCSDILHHSCERPDTCTYRYNYGDGTMTVGVYATERFTFASSGGGGLTTTVPLGFGCGSVNVGSLNNGSGIVGFGRNPLSLVSQLSIRRFSYCLTSYASRRQSTLLFGSLSDGVYGDATGRVQTTPLLQSPQNPTFYYVHFTGLTVGARRLRIPESAFALRPDGSGGVIVDSGTALTLLPAAVLAGGGAGVPPAAEAAVRKRRQPRGRRVLPGARGLAALVVDVTDAGPEDGAPLPGRGPRPAAPKLRPGRPQEGPPVPPPGRLRRRWLHDWQPGAAGHARALRFGGRDLVDRSGTMLTRAQLVERPPTTRLLSLYAS

SEQ ID NO: 4732 - protein, 292 aa, Zea mays subsp. mays
  peptide (1)..(292): Ceres Seq. ID no. 12409854
MTVGVYATERFTFASSGGGGLTTTVPLGFGCGSVNVGSLNNGSGIVGFGRNPLSLVSQLSIRRFSYCLTSYASRRQSTLLFGSLSDGVYGDATGRVQTTPLLQSPQNPTFYYVHFTGLTVGARRLRIPESAFALRPDGSGGVIVDSGTALTLLPAAVLAGGGAGVPPAAEAAVRKRRQPRGRRVLPGARGLAALVVDVTDAGPEDGAPLPGRGPRPAAPKLRPGRPQEGPPVPPPGRLRRRWLHDWQPGAAGHARALRFGGRDLVDRSGTMLTRAQLVERPPTTRLLSLYAS

SEQ ID NO: 4733 - DNA, 1536 bp, Zea mays subsp. mays
  misc_feature (1)..(1536): Ceres Seq. ID no. 12387081
  misc_feature (1)..(1536): Ortholog of  Ceres SEQ ID NO 15224520 as cited in SEQ ID NO 58188
  misc_feature (1)..(1536): Ortholog of  Ceres SEQ ID NO 12777206 as cited in SEQ ID NO 60246
  misc_feature (1)..(1536): Ortholog of  Ceres SEQ ID NO 12625306 as cited in SEQ ID NO 62387
  misc_feature (1)..(1536): Ortholog of  Ceres SEQ ID NO 13656138 as cited in SEQ ID NO 65492
aaagcaaagtctcctgcttccttccgtcttgctcctcgacccttcttccttccccaccaccgcgttccaatcaatcccaatcgcgacccagccagaggcgagcgcgagaaaatccccattccccaatccccacgccacagcctcccttccctccccgtctcctccaaattcaatcgtctccaagcgccaatccgccccgtctccaaatcccaggcaggcaggcagccaaccagccatggagtgcgagccggaggagctgcagttcctgggcgtcgtcggcatctaccgcttctccgcggagatcctccgaggcccgcaccgcccgctcttcgcgcgcatcgcggccgccttcgcgctgcccctctccgcgcttttcctcctgcacgtcgccatctcgcacgcgctcttcacccacatcgactccgacgacacggccctggacgcatcctccccgggcaccgacacgcagcgccgcctgctgtcccgcctcgcctccgactggctcgccctgctcctcttcaagtccgcctacctcctcgcgctcctcctgctctcgctcctctccgtcgccgcctccgtgttctccgtcgcctccgtctactccgccaagcgcgacgcgctcaccttcccgcgcgtgctctccgtcgtgccccgcgtctggcggaggctcgccgccacgttcctcgccgccttcgcgctcctcttcgcctaccacgccgtcgccgtgctcgtcttcgtcggcctcctcgtcgccgcggacaacggctccggcctcgcgggcctgctcgccttcctcgtcgccgtcgcctacctgctcggcctcgtctacctcggcgtcgtctggcacctcgccagcgtcgtctccgtgctcgaggaccacaagggcttcgccgccatgcgcaagagcaaggacctcatcagggggaagctcgtcaccgcgggtgctatcttcttcacgctcaacgtcgtcttcgccgccgtcgagctcggcttccgcgcctgggtcgtcaggggatccggcgccgcgtcgtcaaggctcttgctcggcctcatcatgctcgccgcgctctgctgcgtcgtcatgctcgcgctcgtcacgcagaccgtcgtctacctcgtgtgcaagagctaccaccacgagagcctcgacaaggccaacatctccgaccacctcgaggtctacctcggcgactacgtccccgctaaaggcgtccgacgtgcagatggagcagttccaggtctgactgtgaatcccatagcttctctgtctttatcactgctcgccaatccatcctctgatgccggaattctcctgttaccaccggcagccaggtaatctgtaattgtgtacgtacagcaggcagcaggtgatgaacatacttgcgttaagtaggaagaattgggaatttttgtcttgggggtacaagaataatggggatctgtacttcccttagtctcttcctcaaggacatggttccttcccttgtttacatgatttataaacaggagatgaatggaattgggcatgccgaattt

SEQ ID NO: 4734 - protein, 444 aa, Zea mays subsp. mays
  peptide (1)..(444): Ceres Seq. ID no. 12387082
KQSLLLPSVLLLDPSSFPTTAFQSIPIATQPEASARKSPFPNPHATASLPSPSPPNSIVSKRQSAPSPNPRQAGSQPAMECEPEELQFLGVVGIYRFSAEILRGPHRPLFARIAAAFALPLSALFLLHVAISHALFTHIDSDDTALDASSPGTDTQRRLLSRLASDWLALLLFKSAYLLALLLLSLLSVAASVFSVASVYSAKRDALTFPRVLSVVPRVWRRLAATFLAAFALLFAYHAVAVLVFVGLLVAADNGSGLAGLLAFLVAVAYLLGLVYLGVVWHLASVVSVLEDHKGFAAMRKSKDLIRGKLVTAGAIFFTLNVVFAAVELGFRAWVVRGSGAASSRLLLGLIMLAALCCVVMLALVTQTVVYLVCKSYHHESLDKANISDHLEVYLGDYVPAKGVRRADGAVPGLTVNPIASLSLSLLANPSSDAGILLLPPAAR

SEQ ID NO: 4735 - protein, 413 aa, Zea mays subsp. mays
  peptide (1)..(413): Ceres Seq. ID no. 12387083
SKVSCFLPSCSSTLLPSPPPRSNQSQSRPSQRRARENPHSPIPTPQPPFPPRLLQIQSSPSANPPRLQIPGRQAANQPWSASRRSCSSWASSASTASPRRSSEARTARSSRASRPPSRCPSPRFSSCTSPSRTRSSPTSTPTTRPWTHPPRAPTRSAACCPASPPTGSPCSSSSPPTSSRSSCSRSSPSPPPCSPSPPSTPPSATRSPSRACSPSCPASGGGSPPRSSPPSRSSSPTTPSPCSSSSASSSPRTTAPASRACSPSSSPSPTCSASSTSASSGTSPASSPCSRTTRASPPCARARTSSGGSSSPRVLSSSRSTSSSPPSSSASAPGSSGDPAPRRQGSCSASSCSPRSAASSCSRSSRRPSSTSCARATTTRASTRPTSPTTSRSTSATTSPLKASDVQMEQFQV

SEQ ID NO: 4736 - protein, 401 aa, Zea mays subsp. mays
  peptide (1)..(401): Ceres Seq. ID no. 12387084
KAKSPASFRLAPRPFFLPHHRVPINPNRDPARGEREKIPIPQSPRHSLPSLPVSSKFNRLQAPIRPVSKSQAGRQPTSHGVRAGGAAVPGRRRHLPLLRGDPPRPAPPALRAHRGRLRAAPLRAFPPARRHLARALHPHRLRRHGPGRILPGHRHAAPPAVPPRLRLARPAPLQVRLPPRAPPALAPLRRRLRVLRRLRLLRQARRAHLPARALRRAPRLAEARRHVPRRLRAPLRLPRRRRARLRRPPRRRGQRLRPRGPARLPRRRRLPARPRLPRRRLAPRQRRLRARGPQGLRRHAQEQGPHQGEARHRGCYLLHAQRRLRRRRARLPRLGRQGIRRRVVKALARPHHARRALLRRHARARHADRRLPRVQELPPREPRQGQHLRPPRGLPRRLRPR

SEQ ID NO: 4737 - protein, 366 aa, Zea mays subsp. mays
  peptide (1)..(366): Ceres Seq. ID no. 12387085
MECEPEELQFLGVVGIYRFSAEILRGPHRPLFARIAAAFALPLSALFLLHVAISHALFTHIDSDDTALDASSPGTDTQRRLLSRLASDWLALLLFKSAYLLALLLLSLLSVAASVFSVASVYSAKRDALTFPRVLSVVPRVWRRLAATFLAAFALLFAYHAVAVLVFVGLLVAADNGSGLAGLLAFLVAVAYLLGLVYLGVVWHLASVVSVLEDHKGFAAMRKSKDLIRGKLVTAGAIFFTLNVVFAAVELGFRAWVVRGSGAASSRLLLGLIMLAALCCVVMLALVTQTVVYLVCKSYHHESLDKANISDHLEVYLGDYVPAKGVRRADGAVPGLTVNPIASLSLSLLANPSSDAGILLLPPAAR

SEQ ID NO: 4738 - DNA, 1314 bp, Zea mays subsp. mays
  misc_feature (1)..(1314): Ceres Seq. ID no. 12344048
  misc_feature (1)..(1314): Ortholog of  Ceres SEQ ID NO 13599444 as cited in SEQ ID NO 517
  misc_feature (1)..(1314): Ortholog of  Ceres SEQ ID NO 13595655 as cited in SEQ ID NO 56768
  misc_feature (1)..(1314): Ortholog of  Ceres SEQ ID NO 12615444 as cited in SEQ ID NO 62593
gtacaagcctttggagacatcgtgtccgtcagttatttctcttcctcctccaaaccaccgatgtcgctaccggttctatccctgcgctgccattgctcgtccgcatcctccttggatttccctcccaggaaggttagggttttctgatgcgctcatacatggggcagcaagaagatgggatgtctgatggcttgtacacttacaagcatcaccgcgagcgaggagctgatatccacaccatctttgtgaagaagagcaaattcaggattctgctgtcatttatcggcacaacgttccttcttgtgtctgtttgctgcgccctgttatcgaaggatggtttatgtctttgttccctttggagcatttcatttgccagtgtaattgcgaaatgcctgcgatgtgaccctgtgaagaaagagtcattggtgatcatgccgacttttggaattcaattagagcaacacttttggagtggaagagttcatcgcaaatttgtgcccattggcaagattctaagaccagtgctgaatgagcatgtgacccctgtctcatgctactggagcttggccttgcttgtacgcgaagaatatgagctcatgcttgttttcaagagcttgaatccaccagtcaagatgttggttccaatctggaaagcgttatgtgcattcgtagactccaaaagtgttgctcaatataatgctagtcagctgatcacacagagagagactgtgagtagggagattaggaagatactgactgagagggctagattcttcaacattgctcttgatgacgtctccatcacaagcctgagctttgggaaggagtttactcatgccattgaagcgaagcaggttgctgcacaggaagctgagcgtgctaagttcattgtcgagaaagctgaacaagataagagaagtgcaattatcagggctcagggagaggctaagagtgcggagctgattggtcaagccatagcgaacaaccctgccttccttgccctgaggcagattgaagctgcaagggagatctcccacaccatttcggcctcagccaacaaggtgttcctggactccaacgacctgctgctcaacctccagcagctgaatgtatcgagcaagcagaagaaatgatgtcacaacgttatcccatttcttctgagtttgcagtcagtagtggatgcctttgtaccagacattgtgaggaacgctcggttttggatgtagtttcgccaatcttcctgttatgtggaacttgcgagtatttgctcaaaggcaagcaagctgacaggttttgtttaaacgtaactacagg

SEQ ID NO: 4739 - protein, 328 aa, Zea mays subsp. mays
  peptide (1)..(328): Ceres Seq. ID no. 12344049
MRSYMGQQEDGMSDGLYTYKHHRERGADIHTIFVKKSKFRILLSFIGTTFLLVSVCCALLSKDGLCLCSLWSISFASVIAKCLRCDPVKKESLVIMPTFGIQLEQHFWSGRVHRKFVPIGKILRPVLNEHVTPVSCYWSLALLVREEYELMLVFKSLNPPVKMLVPIWKALCAFVDSKSVAQYNASQLITQRETVSREIRKILTERARFFNIALDDVSITSLSFGKEFTHAIEAKQVAAQEAERAKFIVEKAEQDKRSAIIRAQGEAKSAELIGQAIANNPAFLALRQIEAAREISHTISASANKVFLDSNDLLLNLQQLNVSSKQKK

SEQ ID NO: 4740 - protein, 324 aa, Zea mays subsp. mays
  peptide (1)..(324): Ceres Seq. ID no. 12344050
MGQQEDGMSDGLYTYKHHRERGADIHTIFVKKSKFRILLSFIGTTFLLVSVCCALLSKDGLCLCSLWSISFASVIAKCLRCDPVKKESLVIMPTFGIQLEQHFWSGRVHRKFVPIGKILRPVLNEHVTPVSCYWSLALLVREEYELMLVFKSLNPPVKMLVPIWKALCAFVDSKSVAQYNASQLITQRETVSREIRKILTERARFFNIALDDVSITSLSFGKEFTHAIEAKQVAAQEAERAKFIVEKAEQDKRSAIIRAQGEAKSAELIGQAIANNPAFLALRQIEAAREISHTISASANKVFLDSNDLLLNLQQLNVSSKQKK

SEQ ID NO: 4741 - protein, 317 aa, Zea mays subsp. mays
  peptide (1)..(317): Ceres Seq. ID no. 12344051
MSDGLYTYKHHRERGADIHTIFVKKSKFRILLSFIGTTFLLVSVCCALLSKDGLCLCSLWSISFASVIAKCLRCDPVKKESLVIMPTFGIQLEQHFWSGRVHRKFVPIGKILRPVLNEHVTPVSCYWSLALLVREEYELMLVFKSLNPPVKMLVPIWKALCAFVDSKSVAQYNASQLITQRETVSREIRKILTERARFFNIALDDVSITSLSFGKEFTHAIEAKQVAAQEAERAKFIVEKAEQDKRSAIIRAQGEAKSAELIGQAIANNPAFLALRQIEAAREISHTISASANKVFLDSNDLLLNLQQLNVSSKQKK

SEQ ID NO: 4742 - DNA, 1660 bp, Zea mays subsp. mays
  misc_feature (1)..(1660): Ceres Seq. ID no. 12373712
  misc_feature (1)..(1660): Ortholog of  Ceres SEQ ID NO 13592803 as cited in SEQ ID NO 20481
ctgatttctgaatttgttcctcgtttcgttgccagcccaatcggttcagtttcggcggtaacaagatcaaccgcggtcgccagtcgattctgtgagcctgccagccatggagttgtccagttccgtctcgtccacggcggcggcggcggcgcaggcgcggctgctccggccgccgtcgtttcgccagccggggccggcgggtaagatgaccttcgaccacttccctcgcgcctggattaaccccgcgctcgcgtttgcctctgccttcttcgactccatccaatccaaggaaagttgcaagtgtggcgtgccggctggaactgagcagattggacttcccggcatgctgaatcctgctgcacttggacctgcaactttgccaggatttgtgtaaccaaggcttgtagtacctcttagtgttccatgcaaatttcttgctggcagcaaaccttcagccttgcctgctagtgctaactggatgtcttctccttttgttctccaattccaaactcctgtgcttccgttgcagtttcgaggggtagcttaaaagttaaaactatgattctcctgccgctgcaggattcgtgtcctgtaggagttacgctataaggagcaaactggtgagggcgatgcctccgatccttgctagcttccagcctgcatctcctcagtacccaagctttcaagacgcaaatggcaaaagacgaaatgttccttgttatcagagacaacaaaccccgcaggtagaagtcaggtcgatggaggaggtatatgacactttggctgaacaccttctttctgtcttgaagaatattgaacatcttgattcaaaatacattgttggtctagctggcccacctggtgctggcaagtccacagttgcctctgaagttgttcgacgtgttaatacattttggtcccagaagcacacaaagggtagcgcagcactgcttcctaccaaggaaattgctgcaatgcttccaatggatggtttccacctttatcgtgcccagcttgatgcaatggaggatccaaaagaagcacatgcaagaagaggagcaccttggacattcaatccatcactgtttctgaaatgtctacatacactaagaacagagggttcagtttatgctccatcatttgatcatggtgttggcgacccagttgagaatgacatatttgtaaagccacagcacaaaatagtgatagttgaagggaactatctgttactggaagaagatgtttggaccgaaattagagacttgtttgatgagaaatggttcattgacattgacattgatatctccatgcaaagagtgctcaagagacatattgcaaccggaaaagagccagatgtagcagcatggaggatctcctacaacgaccgaccgaatgcagagcttatcctggaatcaaggaagaatgctgaccttgtgatcagatcagtagacttctcaagctagtgttcaattctttcaataggaaatagcattgtggttctagagttggaggttgttgtgggctgtttccgtggagattcctgtacatataataagctgaatgcctgtttcaaattttcatggtgattgtgttgcatgtaataagatattccttcactatgtaccgtggaggattgttaagtaatttattgacatttttt

SEQ ID NO: 4743 - protein, 277 aa, Zea mays subsp. mays
  peptide (1)..(277): Ceres Seq. ID no. 12373713
MPPILASFQPASPQYPSFQDANGKRRNVPCYQRQQTPQVEVRSMEEVYDTLAEHLLSVLKNIEHLDSKYIVGLAGPPGAGKSTVASEVVRRVNTFWSQKHTKGSAALLPTKEIAAMLPMDGFHLYRAQLDAMEDPKEAHARRGAPWTFNPSLFLKCLHTLRTEGSVYAPSFDHGVGDPVENDIFVKPQHKIVIVEGNYLLLEEDVWTEIRDLFDEKWFIDIDIDISMQRVLKRHIATGKEPDVAAWRISYNDRPNAELILESRKNADLVIRSVDFSS

SEQ ID NO: 4744 - protein, 234 aa, Zea mays subsp. mays
  peptide (1)..(234): Ceres Seq. ID no. 12373714
MEEVYDTLAEHLLSVLKNIEHLDSKYIVGLAGPPGAGKSTVASEVVRRVNTFWSQKHTKGSAALLPTKEIAAMLPMDGFHLYRAQLDAMEDPKEAHARRGAPWTFNPSLFLKCLHTLRTEGSVYAPSFDHGVGDPVENDIFVKPQHKIVIVEGNYLLLEEDVWTEIRDLFDEKWFIDIDIDISMQRVLKRHIATGKEPDVAAWRISYNDRPNAELILESRKNADLVIRSVDFSS

SEQ ID NO: 4745 - protein, 162 aa, Zea mays subsp. mays
  peptide (1)..(162): Ceres Seq. ID no. 12373715
MLPMDGFHLYRAQLDAMEDPKEAHARRGAPWTFNPSLFLKCLHTLRTEGSVYAPSFDHGVGDPVENDIFVKPQHKIVIVEGNYLLLEEDVWTEIRDLFDEKWFIDIDIDISMQRVLKRHIATGKEPDVAAWRISYNDRPNAELILESRKNADLVIRSVDFSS

SEQ ID NO: 4746 - DNA, 1825 bp, Zea mays subsp. mays
  misc_feature (1)..(1825): Ceres Seq. ID no. 12406786
  misc_feature (1)..(1825): Ortholog of  Ceres SEQ ID NO 13596090 as cited in SEQ ID NO 68377
  misc_feature (1)..(1825): Ortholog of  Ceres SEQ ID NO 14303557 as cited in SEQ ID NO 68595
agtgctgtgctgtgctgtgctgtgcagcggttgctcctcctggtcctgctactgctccgctctcctcgtcgcttgctcgtcttttttccacactgggcggatttctttctcgcaaggagcaggaggaggaggagggggaaaggtttgtccgtttcttgcgagagcccgttgcagagatccagccaggcagcaggattcaagaacctgacctttttgtgctctactccccgagagattttcacccaaagtttggtccttggagccgattcgatccctggaaacaaccaagtgaaggtgccgcaaatccgttgtgactgcacaaaatcccaaaacgcctctgccacctatctatttgatcgttgggaacctagctccatccatctgagccaagaaagcagcagccgcagggcggaggggaggggagaggataggagagggcgtcctcttccgagcagcccgcattgccgcctgtcgatgagtgagcgctgcctccgatgccgtcggggtgctcggtgtccagtctcgcggcgcggttcgccttcttcccgccggagccggcgacgtacgccgtccggaaggacgaggccacgggccgcctcgtcgcctccggcgtgccgcgggacaacgccatggacgtcctgctcgtcgacaccagcagggggaacaaggtggtggccttctacttccggaacccctgcgcgcgcctcaccctgctctactcgcacggcaacgctgccgacctcggccagctgtacgacctctttgtgcagctcaaggtcaatctcaagatcaacctgatgggatatgactattctggctatggtgcatctactggcaagccaagtgaagagaatacatatgcagacattgaagcagtgtaccaatgcttagaaactgagtatgggatcagccagggaagacattatcttgtacggacaatctgtcggcagtggaccaacattacatttagcctctcgtttgcctagattgcgtggggtggttctccacagcgctatactgtcaggcctccgtgtggtttgccatgtgaactttactttctgctttgacatttacaaaaatgtcaagaaaataaaaaaggtcaaatgcccagtgctcgttattcatgggacggacgacgacgtggtggactggtcgcacgggaaggagctgtggaggctggcgagggagcctcacgacccgctctggatcaagggcggcgggcactgcaacctggagctgtacccggacttcatccgccacctgtcgcggttcgtccgcgagatggagaccgtgacgacgaaggcccggctgaggaagatccggccggccctccaccagctccgcaagaaggcggcgcaccgggcaagcacggcggcgacgacgaccaccaccaccaccttcaccgccaactgctgctgccgcgtccgcgtccgcaagccgacctgccccagctgcggctccttcggctgtggctgctgcgggccgcttaggagctgcctcgcgctccggtttcccaggtgctgccggcctcctgctgcctgcttcacctgcggcggctgctgttggtcatgcaggtgcaggagctgcttcaagtgctgctgctgctgatgatgatgttgagacgtgcgtcaatgagtgccgcccgccgatcgatccctgcgcgcgcgcgcgcgcgtatggtataatgaagaggaatgacagtggtcatgggatccctgctaacaaaccctttaaacgccgtagactataaaaaaaacctagatttgagctggtggctgctgaacgttgtattaacagatcccaggactccccgccgtttgtggtc

SEQ ID NO: 4747 - protein, 265 aa, Zea mays subsp. mays
  peptide (1)..(265): Ceres Seq. ID no. 12406787
SAVLCCAVQRLLLLVLLLLRSPRRLLVFFPHWADFFLARSRRRRRGKGLSVSCESPLQRSSQAAGFKNLTFLCSTPREIFTQSLVLGADSIPGNNQVKVPQIRCDCTKSQNASATYLFDRWEPSSIHLSQESSSRRAEGRGEDRRGRPLPSSPHCRLSMSERCLRCRRGARCPVSRRGSPSSRRSRRRTPSGRTRPRAASSPPACRGTTPWTSCSSTPAGGTRWWPSTSGTPARASPCSTRTATLPTSASCTTSLCSSRSISRST

SEQ ID NO: 4748 - protein, 235 aa, Zea mays subsp. mays
  peptide (1)..(235): Ceres Seq. ID no. 12406788
MGSAREDIILYGQSVGSGPTLHLASRLPRLRGVVLHSAILSGLRVVCHVNFTFCFDIYKNVKKIKKVKCPVLVIHGTDDDVVDWSHGKELWRLAREPHDPLWIKGGGHCNLELYPDFIRHLSRFVREMETVTTKARLRKIRPALHQLRKKAAHRASTAATTTTTTTFTANCCCRVRVRKPTCPSCGSFGCGCCGPLRSCLALRFPRCCRPPAACFTCGGCCWSCRCRSCFKCCCC

SEQ ID NO: 4749 - protein, 163 aa, Zea mays subsp. mays
  peptide (1)..(163): Ceres Seq. ID no. 12406789
MPSGCSVSSLAARFAFFPPEPATYAVRKDEATGRLVASGVPRDNAMDVLLVDTSRGNKVVAFYFRNPCARLTLLYSHGNAADLGQLYDLFVQLKVNLKINLMGYDYSGYGASTGKPSEENTYADIEAVYQCLETEYGISQGRHYLVRTICRQWTNITFSLSFA

SEQ ID NO: 4750 - DNA, 498 bp, Zea mays subsp. mays
  misc_feature (1)..(498): Ceres Seq. ID no. 13572049
  misc_feature (1)..(498): Ortholog of  Ceres SEQ ID NO 15177091 as cited in SEQ ID NO 52140
  misc_feature (1)..(498): Ortholog of  Ceres SEQ ID NO 15172539 as cited in SEQ ID NO 57333
  misc_feature (1)..(498): Ortholog of  Ceres SEQ ID NO 14315951 as cited in SEQ ID NO 57634
  misc_feature (1)..(498): Ortholog of  Ceres SEQ ID NO 13597324 as cited in SEQ ID NO 64842
  misc_feature (1)..(498): Ortholog of  Ceres SEQ ID NO 13658672 as cited in SEQ ID NO 66627
aggttccagtattccaccacgcggcgtcgctgcycgaaccccgaaccttctcgaggtcgaggcccctcccctttcgccaggagaaaacaatgagcaggcgcaacagccgtaccatctatgtaggcaatctccctggggacatccgtgagagggaggttgaggatctcttctacaagtatggccgtattttggatattgacttgaaaatacctccgagacctcctggatacgcattcgttgagtttgaggatccacgtgatgctgatgatgcaatttatggccgtgatgggtataactttgatggctacaggttgagggttgaattagctcatggtggcagaggccagtcttattcttatgatcgttcaagcagctatagcagtgcatgccgtggaggtgtttctaggcgctctgatttccgtgttatggtcactggtttacctcatcggcatcgtggcaagatctgaaggaccacatgcggcgcgctggtgatgtctg

SEQ ID NO: 4751 - protein, 154 aa, Zea mays subsp. mays
  peptide (1)..(154): Ceres Seq. ID no. 13572050
  misc_feature (11)..(11): Xaa is any aa, unknown or other
VPVFHHAASLXEPRTFSRSRPLPFRQEKTMSRRNSRTIYVGNLPGDIREREVEDLFYKYGRILDIDLKIPPRPPGYAFVEFEDPRDADDAIYGRDGYNFDGYRLRVELAHGGRGQSYSYDRSSSYSSACRGGVSRRSDFRVMVTGLPHRHRGKI

SEQ ID NO: 4752 - protein, 125 aa, Zea mays subsp. mays
  peptide (1)..(125): Ceres Seq. ID no. 13572051
MSRRNSRTIYVGNLPGDIREREVEDLFYKYGRILDIDLKIPPRPPGYAFVEFEDPRDADDAIYGRDGYNFDGYRLRVELAHGGRGQSYSYDRSSSYSSACRGGVSRRSDFRVMVTGLPHRHRGKI

SEQ ID NO: 4753 - DNA, 2103 bp, Zea mays subsp. mays
  misc_feature (1)..(2103): Ceres Seq. ID no. 12344495
  misc_feature (1)..(2103): Ortholog of  Ceres SEQ ID NO 15170764 as cited in SEQ ID NO 52602
gtcgcattccgcaacacctgctcctcgcccccttctctcagaggcgacgcctcgggcgctcctaccctgccccgtctccggtccccccgcgccgtcggcgaggcagccggccgtcacagaagcccgatccggaccccgcgagaaatccttgttatacctgatggctatgattgatgagcctctttatccaattgctgtactgattgacgagctcaagaatgaagacatccagttgcgtctaaactccattagaagactttcaacaattgcacggctcttggagaagaaagaaccaggaaggagctgattccttttcttagtgaaaacaacgatgatgaagacgaggtgcttcttgcaatggctgaggaattgggtgtgttcattccgtatgttggtggtgtagaacatgctcatgttttgctcccacctttggagacattgtgtacagtggaggaaacttgtgtccgtgataaagcagttgaatctctgtgccgtattggtgcacaaatgaaggaaactgacattgtcgactggttcattccagtagtaaagaggctagcagctggagagtggtttacagctcgcgtatcgtcctgtggtcttttccacatagcctatccaagtgcgtcggaccaattgaaaacagaattgaggactatctatggtcagctatgtcaggatgacatgcctatggtcagaagagcagcagcatcaaatcttggaaagtttgcagctacagttgaacagaatcatttgaagacagaaataatgtcaatatttgatgatttaacccaagatgatcaagattcagtgcgtctgttggctgttgaaggctgtgctgcccttggtaaattgttggaaccacaagattgcgtagcacacattcttccagtcattgtcaatttctcccaggataaatcatggcgtgttcgttatatggtcgccaatcaattatatgagctctgtgaggctgttggccctgagcctacaagagctgatttggtgcctgcctatgttcgcctccttcgtgataatgaggctgaagtgcggatagcagctgctggaaaagtaactaagttttgccgcatattaaatcctcagctctcagtccaacatattcttccatgcgttaaggaattgtcatcagattcatcccagcatgttcgttcagctttagcctcagtgattatgggaatggctcctgtactgggaaaggatgctaccattgaacagcttgttccaattttcctctctttgttgaaagacgaatttcctgatgttcgacttaacataatcagcaaacttgatcaagttaatcaggttattggaattgacttgctatctcaatcactgctaccagcaattgtagaacttgcagaggataggcactggagagtccggcttgcaataattgagtacatcccattgttggcgagtcaattaggtgttgggtttttcgatgacaagctgggggcgctctgcatgcaatggttggaagacaaggtcttttcaatcagagatgctgccgctaacaacttgaagcgccttgcagaagagtttggtccagagtgggcaatgcagcatataatccctcaggtgctggagaagatcaacaacccacactatttataccgcatgacgattctgcaggcaatctccttgctagctcctgtcatgggtgcagagatcacctgtcaaaagctgcttccagtcgtcattaattcttcgaaggacagggttcccaacatcaagttcaatgttgcgaaagtactacagtcacttgtaccgatcctcgaccaatctgtggtggagaagaccgtgaaaccgtgcctcgttgagctcagcgaggaccctgacgtcgacgtaaggtactacgcaaaccaggcactgcaggcgtgcgaccagatgatggtgtcaagctaactagcctttgtgtcaagtatttagagagttcgatcgatgctccatagtccaattttggattacctgtaatttggcctttagatttgaagagttgtttgtgtccagcctcggtaacagataaaaacggacggtcctgatccccttgttcgtttgtgttaattaatgttgtaattgagcagg

SEQ ID NO: 4754 - protein, 521 aa, Zea mays subsp. mays
  peptide (1)..(521): Ceres Seq. ID no. 12344496
MAEELGVFIPYVGGVEHAHVLLPPLETLCTVEETCVRDKAVESLCRIGAQMKETDIVDWFIPVVKRLAAGEWFTARVSSCGLFHIAYPSASDQLKTELRTIYGQLCQDDMPMVRRAAASNLGKFAATVEQNHLKTEIMSIFDDLTQDDQDSVRLLAVEGCAALGKLLEPQDCVAHILPVIVNFSQDKSWRVRYMVANQLYELCEAVGPEPTRADLVPAYVRLLRDNEAEVRIAAAGKVTKFCRILNPQLSVQHILPCVKELSSDSSQHVRSALASVIMGMAPVLGKDATIEQLVPIFLSLLKDEFPDVRLNIISKLDQVNQVIGIDLLSQSLLPAIVELAEDRHWRVRLAIIEYIPLLASQLGVGFFDDKLGALCMQWLEDKVFSIRDAAANNLKRLAEEFGPEWAMQHIIPQVLEKINNPHYLYRMTILQAISLLAPVMGAEITCQKLLPVVINSSKDRVPNIKFNVAKVLQSLVPILDQSVVEKTVKPCLVELSEDPDVDVRYYANQALQACDQMMVSS

SEQ ID NO: 4755 - protein, 471 aa, Zea mays subsp. mays
  peptide (1)..(471): Ceres Seq. ID no. 12344497
MKETDIVDWFIPVVKRLAAGEWFTARVSSCGLFHIAYPSASDQLKTELRTIYGQLCQDDMPMVRRAAASNLGKFAATVEQNHLKTEIMSIFDDLTQDDQDSVRLLAVEGCAALGKLLEPQDCVAHILPVIVNFSQDKSWRVRYMVANQLYELCEAVGPEPTRADLVPAYVRLLRDNEAEVRIAAAGKVTKFCRILNPQLSVQHILPCVKELSSDSSQHVRSALASVIMGMAPVLGKDATIEQLVPIFLSLLKDEFPDVRLNIISKLDQVNQVIGIDLLSQSLLPAIVELAEDRHWRVRLAIIEYIPLLASQLGVGFFDDKLGALCMQWLEDKVFSIRDAAANNLKRLAEEFGPEWAMQHIIPQVLEKINNPHYLYRMTILQAISLLAPVMGAEITCQKLLPVVINSSKDRVPNIKFNVAKVLQSLVPILDQSVVEKTVKPCLVELSEDPDVDVRYYANQALQACDQMMVSS

SEQ ID NO: 4756 - protein, 412 aa, Zea mays subsp. mays
  peptide (1)..(412): Ceres Seq. ID no. 12344498
MPMVRRAAASNLGKFAATVEQNHLKTEIMSIFDDLTQDDQDSVRLLAVEGCAALGKLLEPQDCVAHILPVIVNFSQDKSWRVRYMVANQLYELCEAVGPEPTRADLVPAYVRLLRDNEAEVRIAAAGKVTKFCRILNPQLSVQHILPCVKELSSDSSQHVRSALASVIMGMAPVLGKDATIEQLVPIFLSLLKDEFPDVRLNIISKLDQVNQVIGIDLLSQSLLPAIVELAEDRHWRVRLAIIEYIPLLASQLGVGFFDDKLGALCMQWLEDKVFSIRDAAANNLKRLAEEFGPEWAMQHIIPQVLEKINNPHYLYRMTILQAISLLAPVMGAEITCQKLLPVVINSSKDRVPNIKFNVAKVLQSLVPILDQSVVEKTVKPCLVELSEDPDVDVRYYANQALQACDQMMVSS

SEQ ID NO: 4757 - DNA, 1638 bp, Zea mays subsp. mays
  misc_feature (1)..(1638): Ceres Seq. ID no. 12344499
  misc_feature (1)..(1638): Ortholog of  Ceres SEQ ID NO 13662164 as cited in SEQ ID NO 67158
tgatttctctctgcctgcccagaatcccgccagttgccttccacttccgccagactccgcgttcctcctgagcagctgccgccggcccgagagtggagggggaggcaggcgcccaggcggccaatggggacggggagcgcgacggcggcgcaggccctggcgctcgccgccttgctcctcgcctgctctggcgtcgcagtcgtcacggcgcaggacatcgagcggatccaaggaagtgccggcgacgtgctggaggacgaccccgtcgggcggctcaaggtgtacgtgtacgagctgccccccaagtacaacaagaacgtggtggcgaaggactcgcggtgcctgagccacatgttcgccacggagatcttcatgcaccgcttcctgctggcgagcgcggtccggaccctgaacccggacgaggcggactggttctacaccccggtctacaccacgtgcgacctcacgccgtggggccatcccctcaccgtcaagtccccgcggatgatgaggagcgccatccagtacgtctccaagcgctggccctactggaacaggacggagggggccgaccatttcttcgtcactccacatgactttggagcgtgcttctacttccaggaagagaaggccatccagcgaggtgtcctcccggtgctgcgccgcgctacgctggtccagacgtttgggcagaagaaccatgtctgcctcagggaaggctccatcaccatcccgccatacgctccgcctcacaagataagagctcatatcgtcccgccagagacgcctcggtcgatcttcgtctacttccgcggcctgttctacgacaccgcgaacgaccccgagggtggttactatgcaaggggcgcccgtgcgtcggtgtgggagaacttcaagaacaacgcgctgttcgacatctcgacggagcacccgccgacgtactacgaggacatgcagcgcgccatcttctgcctgtgcccgctgggctgggcgccgtggagcccgcgcctggtggaggccgtggtgttcggctgcatccccgtcatcatcgccgacgacatcgtgctgcccttcgcggacgccatcccgtgggaggagatcgccgtgttcgtgcccgaggacgacgtcctgaggctggacaccatcctcacgtccatccccatggacgagatcctccgcaagcagaggctgctggccaacccgtccatgaagcaggcgatgctgttcccgcagcccgcggagccgagggacgccttccaccaggtcctcaacgggctggcgcgcaagctgccccacgccaaggacgtcttcctcaagcccggccagaaggtgctcaactggacagagggcaccccaggatgacctcaagccgtggtaggccgtggctgctgctcttttggaaacgacacaaccagatcgatgatggtgaggctgatgaatgaacgacacaacaaccattggttaaatgtaaagctcttaatcctcttgctcctccaacctttcttctttttgaggcaatgtgcatgtcttgcctgtatatattacatgacaatcagggtggccggccggggcaagacaagttgaggtgccaacatactaatagtattagtattatattctagcatgtatgttttgacg

SEQ ID NO: 4758 - protein, 412 aa, Zea mays subsp. mays
  peptide (1)..(412): Ceres Seq. ID no. 12344500
MGTGSATAAQALALAALLLACSGVAVVTAQDIERIQGSAGDVLEDDPVGRLKVYVYELPPKYNKNVVAKDSRCLSHMFATEIFMHRFLLASAVRTLNPDEADWFYTPVYTTCDLTPWGHPLTVKSPRMMRSAIQYVSKRWPYWNRTEGADHFFVTPHDFGACFYFQEEKAIQRGVLPVLRRATLVQTFGQKNHVCLREGSITIPPYAPPHKIRAHIVPPETPRSIFVYFRGLFYDTANDPEGGYYARGARASVWENFKNNALFDISTEHPPTYYEDMQRAIFCLCPLGWAPWSPRLVEAVVFGCIPVIIADDIVLPFADAIPWEEIAVFVPEDDVLRLDTILTSIPMDEILRKQRLLANPSMKQAMLFPQPAEPRDAFHQVLNGLARKLPHAKDVFLKPGQKVLNWTEGTPG

SEQ ID NO: 4759 - protein, 336 aa, Zea mays subsp. mays
  peptide (1)..(336): Ceres Seq. ID no. 12344501
MFATEIFMHRFLLASAVRTLNPDEADWFYTPVYTTCDLTPWGHPLTVKSPRMMRSAIQYVSKRWPYWNRTEGADHFFVTPHDFGACFYFQEEKAIQRGVLPVLRRATLVQTFGQKNHVCLREGSITIPPYAPPHKIRAHIVPPETPRSIFVYFRGLFYDTANDPEGGYYARGARASVWENFKNNALFDISTEHPPTYYEDMQRAIFCLCPLGWAPWSPRLVEAVVFGCIPVIIADDIVLPFADAIPWEEIAVFVPEDDVLRLDTILTSIPMDEILRKQRLLANPSMKQAMLFPQPAEPRDAFHQVLNGLARKLPHAKDVFLKPGQKVLNWTEGTPG

SEQ ID NO: 4760 - protein, 329 aa, Zea mays subsp. mays
  peptide (1)..(329): Ceres Seq. ID no. 12344502
MHRFLLASAVRTLNPDEADWFYTPVYTTCDLTPWGHPLTVKSPRMMRSAIQYVSKRWPYWNRTEGADHFFVTPHDFGACFYFQEEKAIQRGVLPVLRRATLVQTFGQKNHVCLREGSITIPPYAPPHKIRAHIVPPETPRSIFVYFRGLFYDTANDPEGGYYARGARASVWENFKNNALFDISTEHPPTYYEDMQRAIFCLCPLGWAPWSPRLVEAVVFGCIPVIIADDIVLPFADAIPWEEIAVFVPEDDVLRLDTILTSIPMDEILRKQRLLANPSMKQAMLFPQPAEPRDAFHQVLNGLARKLPHAKDVFLKPGQKVLNWTEGTPG

SEQ ID NO: 4761 - DNA, 1417 bp, Zea mays subsp. mays
  misc_feature (1)..(1417): Ceres Seq. ID no. 12352296
  misc_feature (1)..(1417): Ortholog of  Ceres SEQ ID NO 14313893 as cited in SEQ ID NO 54646
  misc_feature (1)..(1417): Ortholog of  Ceres SEQ ID NO 13656797 as cited in SEQ ID NO 65756
  misc_feature (1)..(1417): Ortholog of  Ceres SEQ ID NO 13658498 as cited in SEQ ID NO 66557
  misc_feature (1)..(1417): Ortholog of  Ceres SEQ ID NO 15227053 as cited in SEQ ID NO 0
accgcgcgtgtaggcattctacgagcagctcggtcttgtcgttggagagatgaagaagaacaccatgagggatttcttgggtttcttgttcggagtagctgccgcggcggcctgcttcggcctgctcctgctgcatgttccatgcccccgtggcctcttgcccgcacagcaaggcctcatcatcttgggtaggagtactactaacggaacaaactctgatcccactcccagcaccaagaaacctggcatcgtatgtgcacagatttcactccaaaaatgattccgatcctatgttaccatacgcgcgttgatctccaattggtcaccctgcactggttctggtttcatatattgcatattcactggtttaatcagtcaccttcttctattttctcttaataaacaggcccctgctccagctccaggtgacgacaagctggaggcgctgctgaggcgagcgtccatggccgaccttgacaagaccgtcatactaaccttcgcgagccaagcgtggacggctccgggctcactccaggacctcttgctccagagcttccgcctgggcgtggggacggagccccttctcaagcacttggtcatcgtcgccgacggcgccaaggcgtacgaacagtgccagctcgtgcacccgctctgctaccacctcgaagccggcggcgtcgactacgccgcacagcaatcgtacatggccaagggctacctcgagatcgtgtggcgcaagttcctgtcccaggcccgggtcctcaacctcggctacagcttcgtcttcaccgacatggacatcatctggctgcggaacccgctgctgcgcatccccatcggcgccgacctggccatgtcgtgcgacaagtactacggcgacaacccctacgacctcgacaagctggccaacaccgggttcatgtacgtgaaggcgagccccaggatggtggccttctacgagagctggtacaaggcgcggctgtcctaccggtacacgcacgagcagtatgtgttccagcaggtgaaggacaagctgccggcgcagcacggcatacgggtgcagttcgtggacacggcgtacttcaccggcttctgtcagctacgcaaggattttaacaaggtatgcacggtgcatgcgaactgcctcgtcgggctcaagtccaagcaggagaagctcactcaagtcttagacgagtggaaggagttcaagaagaaggctgctttgctaggcagcaataccactactgccctaactcactgaacaattaacatcttcactgggggcggatctatctaggaaaagtgtagttgtttaaagccattctacgtttttaaacatatatagatgaataattcaaaatacagcataagatgcaatttttcaatacaaataaactaatagttcttctgtggcgct

SEQ ID NO: 4762 - protein, 265 aa, Zea mays subsp. mays
  peptide (1)..(265): Ceres Seq. ID no. 12352297
MADLDKTVILTFASQAWTAPGSLQDLLLQSFRLGVGTEPLLKHLVIVADGAKAYEQCQLVHPLCYHLEAGGVDYAAQQSYMAKGYLEIVWRKFLSQARVLNLGYSFVFTDMDIIWLRNPLLRIPIGADLAMSCDKYYGDNPYDLDKLANTGFMYVKASPRMVAFYESWYKARLSYRYTHEQYVFQQVKDKLPAQHGIRVQFVDTAYFTGFCQLRKDFNKVCTVHANCLVGLKSKQEKLTQVLDEWKEFKKKAALLGSNTTTALTH

SEQ ID NO: 4763 - protein, 185 aa, Zea mays subsp. mays
  peptide (1)..(185): Ceres Seq. ID no. 12352298
MAKGYLEIVWRKFLSQARVLNLGYSFVFTDMDIIWLRNPLLRIPIGADLAMSCDKYYGDNPYDLDKLANTGFMYVKASPRMVAFYESWYKARLSYRYTHEQYVFQQVKDKLPAQHGIRVQFVDTAYFTGFCQLRKDFNKVCTVHANCLVGLKSKQEKLTQVLDEWKEFKKKAALLGSNTTTALTH

SEQ ID NO: 4764 - protein, 155 aa, Zea mays subsp. mays
  peptide (1)..(155): Ceres Seq. ID no. 12352299
MDIIWLRNPLLRIPIGADLAMSCDKYYGDNPYDLDKLANTGFMYVKASPRMVAFYESWYKARLSYRYTHEQYVFQQVKDKLPAQHGIRVQFVDTAYFTGFCQLRKDFNKVCTVHANCLVGLKSKQEKLTQVLDEWKEFKKKAALLGSNTTTALTH

SEQ ID NO: 4765 - DNA, 1500 bp, Zea mays subsp. mays
  misc_feature (1)..(1500): Ceres Seq. ID no. 12405643
  misc_feature (1)..(1500): Ortholog of  Ceres SEQ ID NO 14307148 as cited in SEQ ID NO 54216
taagagagaaaaggaagagagatggagatgacgatgccatggatgtttcagaaaatggccatggcgattcttcattctgcaagaagccgaaggaaggtgatgttcatgtctcttccagttcaactgaagtggtaggaaccattccagagatgaatggaggcgatcatcatatacctggaagctccttttcatgtctagtgaagatctatgacatgcctgatagtcaagtgaaattaaatgatgttattgagtttattggcgtatatacatttgacccagaacttgctgctcctagtgacaacccagatgatataatgttagacctcatcgaagatgtaacagttcagttgcctccgagcaaggtgccacgtcttcactgtttggtatggagaaaattatcattccatgattttatttcaaggcctgttgttgagccttcacccagcctgttaagaggcattcggcaatctttgctctcacacctcacccttgtattaggcaatgacgagcttgcagcccagtgcttgctgttgcatcttctatccagacttcgtaatagggtggatgtggtcaccgttggcagactctccttgaatttcactggcttcaacagggaaagtgcttccatatttgggaatcagctgtattctttgatccagaaattggtgccgtattcacaagccatacctctgtcaattgagtatctcaacacagctacacttcaacctagaaaggacaacaagtcaggaaggttggtcacaggagttctgcagctacctcaaggcactcatctgatctttgatgagactcttctgcagacaggatcattgacatccaaaggtgtggagaataccatgctgctcaagaacctgatggagtcgcagaaggttgactacgattttgagtactacaagctggaaatggcagctgatgtgcagctactcactctctctgaggggaaatcaaacatccttccttcagatttggtagtgcctttccggccatcctctgttcccacaattaatgcaggtgctgaggaaactgagagctggaggtggtttttgaccacagtaaggtctcttcctcagtccactgaacctgaaacttaccagatgattcaggatgaaatggtcagtgccatgcgtgatgataggagcttgggttgttctgaacttagcagatggctaacaatggcacaaataatggcctccagctttggcgagaagagtctttctttggagcactggcagatggtgaaggagcttgagaggcttagaaagcagaggatgcaatgagatgacttaccattagcatgtgtttttgcactctaattgtttatgttggtatgctgttatgtgtatagtactagacgtttgaatcaagacatggatccaagtcatttctgtaacaactgacaacttctatgatcgtatgcatgtgtatctgctgcgcattttctttgctcaaatttgagatttactctgggagctatggaatgcc

SEQ ID NO: 4766 - protein, 430 aa, Zea mays subsp. mays
  peptide (1)..(430): Ceres Seq. ID no. 12405644
REKRKRDGDDDAMDVSENGHGDSSFCKKPKEGDVHVSSSSTEVVGTIPEMNGGDHHIPGSSFSCLVKIYDMPDSQVKLNDVIEFIGVYTFDPELAAPSDNPDDIMLDLIEDVTVQLPPSKVPRLHCLVWRKLSFHDFISRPVVEPSPSLLRGIRQSLLSHLTLVLGNDELAAQCLLLHLLSRLRNRVDVVTVGRLSLNFTGFNRESASIFGNQLYSLIQKLVPYSQAIPLSIEYLNTATLQPRKDNKSGRLVTGVLQLPQGTHLIFDETLLQTGSLTSKGVENTMLLKNLMESQKVDYDFEYYKLEMAADVQLLTLSEGKSNILPSDLVVPFRPSSVPTINAGAEETESWRWFLTTVRSLPQSTEPETYQMIQDEMVSAMRDDRSLGCSELSRWLTMAQIMASSFGEKSLSLEHWQMVKELERLRKQRMQ

SEQ ID NO: 4767 - protein, 418 aa, Zea mays subsp. mays
  peptide (1)..(418): Ceres Seq. ID no. 12405645
MDVSENGHGDSSFCKKPKEGDVHVSSSSTEVVGTIPEMNGGDHHIPGSSFSCLVKIYDMPDSQVKLNDVIEFIGVYTFDPELAAPSDNPDDIMLDLIEDVTVQLPPSKVPRLHCLVWRKLSFHDFISRPVVEPSPSLLRGIRQSLLSHLTLVLGNDELAAQCLLLHLLSRLRNRVDVVTVGRLSLNFTGFNRESASIFGNQLYSLIQKLVPYSQAIPLSIEYLNTATLQPRKDNKSGRLVTGVLQLPQGTHLIFDETLLQTGSLTSKGVENTMLLKNLMESQKVDYDFEYYKLEMAADVQLLTLSEGKSNILPSDLVVPFRPSSVPTINAGAEETESWRWFLTTVRSLPQSTEPETYQMIQDEMVSAMRDDRSLGCSELSRWLTMAQIMASSFGEKSLSLEHWQMVKELERLRKQRMQ

SEQ ID NO: 4768 - protein, 381 aa, Zea mays subsp. mays
  peptide (1)..(381): Ceres Seq. ID no. 12405646
MNGGDHHIPGSSFSCLVKIYDMPDSQVKLNDVIEFIGVYTFDPELAAPSDNPDDIMLDLIEDVTVQLPPSKVPRLHCLVWRKLSFHDFISRPVVEPSPSLLRGIRQSLLSHLTLVLGNDELAAQCLLLHLLSRLRNRVDVVTVGRLSLNFTGFNRESASIFGNQLYSLIQKLVPYSQAIPLSIEYLNTATLQPRKDNKSGRLVTGVLQLPQGTHLIFDETLLQTGSLTSKGVENTMLLKNLMESQKVDYDFEYYKLEMAADVQLLTLSEGKSNILPSDLVVPFRPSSVPTINAGAEETESWRWFLTTVRSLPQSTEPETYQMIQDEMVSAMRDDRSLGCSELSRWLTMAQIMASSFGEKSLSLEHWQMVKELERLRKQRMQ

SEQ ID NO: 4769 - DNA, 908 bp, Zea mays subsp. mays
  misc_feature (1)..(908): Ceres Seq. ID no. 12366814
  misc_feature (1)..(908): Ortholog of  Ceres SEQ ID NO 13594296 as cited in SEQ ID NO 57764
gtgtggatgattccagtcctcctcctgttctttgtttcccgtcccatcgtgtgtgagcgcgtctgctggtctgccaagaggaggaaaggaaggagagagatggcttgccctgcgcagtccatgctctccgccagcggctgcatcttcctgaggagcaagcctcaggcggcatcccaagtgcgagggggcatcatcggcggtggccgcagcagcaggccgttcctgctcacctgcaacgcttcctcttctccgtccccttcctcgccggcgccggcgcaggaagaccccgactgcaacgaggaggagtgcgccccggagaaggaggtcgggagcctgagcgctgagtggctggccgaggagaggacccaggtcgtcggcactttccctcccaagaagagagggtggaaccggcttagtggagaaggacaccgccggccagaccaacatctactccgtcgagccgatggtgtacgtggccgagagcgccatcagctccggcacggcgggtacgtcggcggagggcgccgagaacacggccgccatcgccgcggggctcgtcctcatcaccgtagccgcggcctcgtccatcctcatccaggtgaacaagagccaggtgccgcaggtgccggaagccgcctacagcggcccgccgctcagctactacgtcaccaagttccagccggcggtggctgcgccggcgcagaccctcgaggcccccgcccccgccgaggcacaagacggcgccgccgccaccgtcgaggctccggaggtaccggcaccgcagctgtcgtcgtgagctgattcggttttgtggcatgcagctttatactacggatgagccagtagcgcatgatgatggaagatatgtatccatgatacaagcatttcggaattgtattaaagtttgt

SEQ ID NO: 4770 - protein, 266 aa, Zea mays subsp. mays
  peptide (1)..(266): Ceres Seq. ID no. 12366815
VWMIPVLLLFFVSRPIVCERVCWSAKRRKGRREMACPAQSMLSASGCIFLRSKPQAASQVRGGIIGGGRSSRPFLLTCNASSSPSPSSPAPAQEDPDCNEEECAPEKEVGSLSAEWLAEERTQVVGTFPPKKRGWNRLSGEGHRRPDQHLLRRADGVRGRERHQLRHGGYVGGGRREHGRHRRGARPHHRSRGLVHPHPGEQEPGAAGAGSRLQRPAAQLLRHQVPAGGGCAGADPRGPRPRRGTRRRRRHRRGSGGTGTAAVVVS

SEQ ID NO: 4771 - protein, 264 aa, Zea mays subsp. mays
  peptide (1)..(264): Ceres Seq. ID no. 12366816
MIPVLLLFFVSRPIVCERVCWSAKRRKGRREMACPAQSMLSASGCIFLRSKPQAASQVRGGIIGGGRSSRPFLLTCNASSSPSPSSPAPAQEDPDCNEEECAPEKEVGSLSAEWLAEERTQVVGTFPPKKRGWNRLSGEGHRRPDQHLLRRADGVRGRERHQLRHGGYVGGGRREHGRHRRGARPHHRSRGLVHPHPGEQEPGAAGAGSRLQRPAAQLLRHQVPAGGGCAGADPRGPRPRRGTRRRRRHRRGSGGTGTAAVVVS

SEQ ID NO: 4772 - protein, 233 aa, Zea mays subsp. mays
  peptide (1)..(233): Ceres Seq. ID no. 12366817
MACPAQSMLSASGCIFLRSKPQAASQVRGGIIGGGRSSRPFLLTCNASSSPSPSSPAPAQEDPDCNEEECAPEKEVGSLSAEWLAEERTQVVGTFPPKKRGWNRLSGEGHRRPDQHLLRRADGVRGRERHQLRHGGYVGGGRREHGRHRRGARPHHRSRGLVHPHPGEQEPGAAGAGSRLQRPAAQLLRHQVPAGGGCAGADPRGPRPRRGTRRRRRHRRGSGGTGTAAVVVS

SEQ ID NO: 4773 - DNA, 1488 bp, Zea mays subsp. mays
  misc_feature (1)..(1488): Ceres Seq. ID no. 12365496
  misc_feature (1)..(1488): Ortholog of  Ceres SEQ ID NO 13654928 as cited in SEQ ID NO 62546
agcataccgtctgtacttccagcagcagcatcatcagccgccgccgccgccgccgcgcttccactttgtcttgagccctgccctcaacgacgactcgcgggccggcagcacagcacgtatagctatggaaggaaacggtggcgcgggcggcggtagcggaagcgcggcaccgccctgggatctcgccatgcactggccacccgccgtgtcgtcctacccgccgcagcccttggagctgcagcagcagggagcttacctgcctcaagctggggaagcggcccgcctgctgctgggcaggggcgccggggccgggcaaccaagcggcgcaggtccacggcaatggcggcgctggtggcgcagctgctgagggtaagaggaaggagaaggcgcctgccgcggcggccgtgccgaggtgccaggtggaggggtgccacctgtcgctggcggacgccaaggagtaccaccggcggcacaaggtgtgcgaggcgcactccaaggcgcctcgggtcgtcgtcctcggcgccgagcagcgcttctgccagcagtgcagccggttccacgcgatctcggagttcgacgacgcgaagcggagctgccggcggcgtctggccgggcacaacgagcggcggcggaagagcaacgccagcgaggccatggccagaggcgttgcgcacccacacggggtgacggctttcggcccacggcggcttcctgccctcgcgcggcctccccgcgccgcccgcagggtccccggcggcggctggtgctctctctcttctgtcatcggccagaggcagcgtggcgggcgccagcgggccctggctggtcacggcggcgcgggaggacatccccgcgcgctccagcgcggcgctcgacgaccttatcgccgagaaccgcgccgccgcgctcctcgcgcggcagtacttcgtctccgaccgctcgccggcgcccagacgggatttcgtcgcctcttcgacggcgggttgcgccctccagcagcagcagcacccgcccgatcacacagccggctggcacccgcacccccacccctacagtggcgttggcgttggcgttggcagcggtggtggccggtaccagtaccaccacgtggcgccgccgagcgcgtggcacacgacgaccctggatcttatgcagccgacagcaagcaccgccgccgctccctccaccgccggcgcagcgttgtggccagcagtgtcgccggagagggcgggcgcgaggtcgtctcgctctcgcagcaagaccaaggatggcgacgcgtcgggatgtagcggcttggacgcgtgggcgcccactggtggagctcgtgtgctgtgatcgccatgcaatcgacgagcgtgacggccattatatatgttgcgcctgtactggtcgggtgttgcgtggtgcctgatctgtcccaaaagggatgtgtaatccaatgtacttcgggatgtgcttttttttttagtaatgaatcgtgtttttctc

SEQ ID NO: 4774 - protein, 211 aa, Zea mays subsp. mays
  peptide (1)..(211): Ceres Seq. ID no. 12365497
MARGVAHPHGVTAFGPRRLPALARPPRAARRVPGGGWCSLSSVIGQRQRGGRQRALAGHGGAGGHPRALQRGARRPYRREPRRRAPRAAVLRLRPLAGAQTGFRRLFDGGLRPPAAAAPARSHSRLAPAPPPLQWRWRWRWQRWWPVPVPPRGAAERVAHDDPGSYAADSKHRRRSLHRRRSVVASSVAGEGGREVVSLSQQDQGWRRVGM

SEQ ID NO: 4775 - protein, 121 aa, Zea mays subsp. mays
  peptide (1)..(121): Ceres Seq. ID no. 12365498
AYRLYFQQQHHQPPPPPPRFHFVLSPALNDDSRAGSTARIAMEGNGGAGGGSGSAAPPWDLAMHWPPAVSSYPPQPLELQQQGAYLPQAGEAARLLLGRGAGAGQPSGAGPRQWRRWWRSC

SEQ ID NO: 4776 - protein, 115 aa, Zea mays subsp. mays
  peptide (1)..(115): Ceres Seq. ID no. 12365499
MAALVAQLLRVRGRRRRLPRRPCRGARWRGATCRWRTPRSTTGGTRCARRTPRRLGSSSSAPSSASASSAAGSTRSRSSTTRSGAAGGVWPGTTSGGGRATPARPWPEALRTHTG

SEQ ID NO: 4777 - DNA, 1667 bp, Zea mays subsp. mays
  misc_feature (1)..(1667): Ceres Seq. ID no. 12409847
  misc_feature (1)..(1667): Ortholog of  Ceres SEQ ID NO 14311882 as cited in SEQ ID NO 51638
  misc_feature (1)..(1667): Ortholog of  Ceres SEQ ID NO 14314567 as cited in SEQ ID NO 52335
  misc_feature (1)..(1667): Ortholog of  Ceres SEQ ID NO 14308803 as cited in SEQ ID NO 55038
  misc_feature (1)..(1667): Ortholog of  Ceres SEQ ID NO 13595437 as cited in SEQ ID NO 56562
  misc_feature (1)..(1667): Ortholog of  Ceres SEQ ID NO 14315985 as cited in SEQ ID NO 57720
atccctgactattttcctgccttctgtctccattttcctagtgctatactaatttctgaagacctcctggaggaattctctgcttcatttctcgagcgggagancggccgccttcagtcaaggaaaatcgctgaagacagccgcagattcccagattcgtagttccgcttctgcttcggcgcacctgttcggtgtggaatgatggaggtgagcccgtctccggagcaaggagtgatggcgggaagggagccgttcgggctgccgaagaccccggcaacgccgccgtcctccgggggcacgcagggcctgcgcatggcgtacacgacggacggcaccgccatcttcaccccggtgagctccgtgccgcccgcgacggcgacataccagcccgtgggcggcagcgcnngtnctgcttcaagcttggctggngtaggangcaatggtggcgcgcccgtncactcgggtggcgcgggtgagccggggaccaagaaaaagcgtggccggccaagaaagtacggccccgacggctccatgtcgctggcattggtgcccgcatccatggctggggagccggcgccggcggctcttggagcttccggtcctttctcgcctaacggcccgaaggcgccgaacactgcgccgtcagcgtcgccggacggcgcgaagaagcggggccggccgaagggctccaccaacaagaagcacgtggctgcgctcgggccagcgggggcaggttttacgcctcatcttatttttgtaaaagccggagaggacgtatcggcaaagatcatgtcgttctcgcagcacgggacacgcgcggtctgcatcctttcagcaaacggcgccatatcaaatgtgacgcttcggcaatctgccacttcgggtggaacggtgacatacgagggtcgtttcgagatactgtctctgtccgggtcgtttcttctgtcagagaacggtggccagcgcagtcgaactggtgggctcagcgtttcgctagcaggccccgacggncgtgtcctgggtggctgtgttgccggactcctgacggctgcttcaccggtacagatcgtagtggggagcttcgacgccggtggaaagaagcagccgaagcagcagcagcagcagcagcttgctccgtcaccggcgccactaaatctcgcgccgacgggcgtggcggcagggccgagcagcccgccgtccagaggcacattgagcctaagcgagtcgtccagtggcgccccgccgagcccgccgcacgcaggggccagcggtggccatgggcagcagcagcagcagccacagccaggtggcttctccggtctgttctggaaatgacgagacccccggacaccgtctgaccgtggtagaactggcagaaaggactaaaggcgcgtgaggcactcgtcgaggccgaagctcactcggtgagaagcagcggtagcttgtaggtggtgtcaagactgtgtagctcttgctgttgctgtaggtgtaaatcgtgcgttgtgattgtgaggtggttgcttattgtctgtcgtctggaatggatgccgtgtactgaacctgtgcccccaatgcagcatgtcggaagttcttggtttcttctgcttgggtgcatcggcttgccgcacgatatgcatccatgcccataataatacgtgtatagattc

SEQ ID NO: 4778 - protein, 378 aa, Zea mays subsp. mays
  peptide (1)..(378): Ceres Seq. ID no. 12409848
  misc_feature (69)..(69): Xaa is any aa, unknown or other
  misc_feature (70)..(70): Xaa is any aa, unknown or other
  misc_feature (71)..(71): Xaa is any aa, unknown or other
  misc_feature (77)..(77): Xaa is any aa, unknown or other
  misc_feature (80)..(80): Xaa is any aa, unknown or other
  misc_feature (86)..(86): Xaa is any aa, unknown or other
  misc_feature (271)..(271): Xaa is any aa, unknown or other
MMEVSPSPEQGVMAGREPFGLPKTPATPPSSGGTQGLRMAYTTDGTAIFTPVSSVPPATATYQPVGGSXXXASSLAXVGXNGGAPXHSGGAGEPGTKKKRGRPRKYGPDGSMSLALVPASMAGEPAPAALGASGPFSPNGPKAPNTAPSASPDGAKKRGRPKGSTNKKHVAALGPAGAGFTPHLIFVKAGEDVSAKIMSFSQHGTRAVCILSANGAISNVTLRQSATSGGTVTYEGRFEILSLSGSFLLSENGGQRSRTGGLSVSLAGPDXRVLGGCVAGLLTAASPVQIVVGSFDAGGKKQPKQQQQQQLAPSPAPLNLAPTGVAAGPSSPPSRGTLSLSESSSGAPPSPPHAGASGGHGQQQQQPQPGGFSGLFWK

SEQ ID NO: 4779 - protein, 377 aa, Zea mays subsp. mays
  peptide (1)..(377): Ceres Seq. ID no. 12409849
  misc_feature (68)..(68): Xaa is any aa, unknown or other
  misc_feature (69)..(69): Xaa is any aa, unknown or other
  misc_feature (70)..(70): Xaa is any aa, unknown or other
  misc_feature (76)..(76): Xaa is any aa, unknown or other
  misc_feature (79)..(79): Xaa is any aa, unknown or other
  misc_feature (85)..(85): Xaa is any aa, unknown or other
  misc_feature (270)..(270): Xaa is any aa, unknown or other
MEVSPSPEQGVMAGREPFGLPKTPATPPSSGGTQGLRMAYTTDGTAIFTPVSSVPPATATYQPVGGSXXXASSLAXVGXNGGAPXHSGGAGEPGTKKKRGRPRKYGPDGSMSLALVPASMAGEPAPAALGASGPFSPNGPKAPNTAPSASPDGAKKRGRPKGSTNKKHVAALGPAGAGFTPHLIFVKAGEDVSAKIMSFSQHGTRAVCILSANGAISNVTLRQSATSGGTVTYEGRFEILSLSGSFLLSENGGQRSRTGGLSVSLAGPDXRVLGGCVAGLLTAASPVQIVVGSFDAGGKKQPKQQQQQQLAPSPAPLNLAPTGVAAGPSSPPSRGTLSLSESSSGAPPSPPHAGASGGHGQQQQQPQPGGFSGLFWK

SEQ ID NO: 4780 - protein, 366 aa, Zea mays subsp. mays
  peptide (1)..(366): Ceres Seq. ID no. 12409850
  misc_feature (57)..(57): Xaa is any aa, unknown or other
  misc_feature (58)..(58): Xaa is any aa, unknown or other
  misc_feature (59)..(59): Xaa is any aa, unknown or other
  misc_feature (65)..(65): Xaa is any aa, unknown or other
  misc_feature (68)..(68): Xaa is any aa, unknown or other
  misc_feature (74)..(74): Xaa is any aa, unknown or other
  misc_feature (259)..(259): Xaa is any aa, unknown or other
MAGREPFGLPKTPATPPSSGGTQGLRMAYTTDGTAIFTPVSSVPPATATYQPVGGSXXXASSLAXVGXNGGAPXHSGGAGEPGTKKKRGRPRKYGPDGSMSLALVPASMAGEPAPAALGASGPFSPNGPKAPNTAPSASPDGAKKRGRPKGSTNKKHVAALGPAGAGFTPHLIFVKAGEDVSAKIMSFSQHGTRAVCILSANGAISNVTLRQSATSGGTVTYEGRFEILSLSGSFLLSENGGQRSRTGGLSVSLAGPDXRVLGGCVAGLLTAASPVQIVVGSFDAGGKKQPKQQQQQQLAPSPAPLNLAPTGVAAGPSSPPSRGTLSLSESSSGAPPSPPHAGASGGHGQQQQQPQPGGFSGLFWK

SEQ ID NO: 4781 - DNA, 1517 bp, Zea mays subsp. mays
  misc_feature (1)..(1517): Ceres Seq. ID no. 12365500
  misc_feature (1)..(1517): Ortholog of  Ceres SEQ ID NO 14308389 as cited in SEQ ID NO 55226
  misc_feature (1)..(1517): Ortholog of  Ceres SEQ ID NO 13597162 as cited in SEQ ID NO 63955
  misc_feature (1)..(1517): Ortholog of  Ceres SEQ ID NO 14313292 as cited in SEQ ID NO 67393
  misc_feature (1)..(1517): Ortholog of  Ceres SEQ ID NO 14313567 as cited in SEQ ID NO 68074
gcacgagaccattacctagaacatcctaacgaaaaagagcttgttacgaggcaatggcgccgacagtggaggtgctgacgtcggagatggtcgtcccagctgaagaggccccggcgggcaccatttggctgtccaacctggacctcgccgcacgccgcgggtacacgcccacggtctacttcttccggcccaacggtgacccggggttcttcgccccggacgtcgtcaagggcagcctcgccaggacgctagtcacgttctacccgctcgcggggcggcctcgcgctcgacggcgccgggcgccgtccaggtcgactgcaccggcgagggtgcggtgttcgtgaccgcgcggtcggactacgcgctcgacgacctgatgcgcgagttcgtgccgtgccgcgagatgcgggacctgctggtgcccccggcgcccgcgccggacccgccgtgcgcgctgctgttcgtgcaggtcacgcgcctgcgctgcggcggcgccgtgctcgccctgtccatgcaccactccgtgtgcgacgcgcggagcgccgcgcacttcttcgatacgtgggcgagcatcgcgcgcggggacgccgccgccgccgccgcgaacgctcctgtgccaccgtgcttcgactacgcgctgctcgccgcgcgcccggcgctcgcggtgctgtacgaccaccccgagtacaagcccgagccggagcctgtggacgccgcgtccgactacgcgagcgccatcgtcgtcatgaccaaagcgcaggtgggcgcgctcaaggcgcggtgttccggggcgtccacgttccgcgccgtggtggcgctggtgtggcagtgcgtgtgccgcgcgcgggcgctgccccccgaggcggagacgcggctctactccatgatcgacatgcgctcgcgcctggatccgccgctccctacgggatacttcggcaacgcggttgtccgcacctcggtctccgccacggtcggcgaggtgacgtccaaccccgtaggccacgccgcgcgccgcgcgctcgcggtaacgagccagggcgacgactacgcgcggtcgctggtggactacctagagggcgtggacgccatgaacctgcccagaagcggcatctcgcgtgcgcacctccgcgccatcagctggatgggcatgtcgctgtacaaggccgacttcgggtggggcgcgccggtgttcatggggccggcgatcatgtactacagtggcttcgtgtacgtcatgaacgcggcggggaaggagggtgccctcgcgctcgtgctgtcgctggagccggagagcatgccggagttcaggaaggtgttcgccgaggagctcgccagcctggacgtgatctagtgcatacatatagctcgaagtatgtaccggccggctaagccgccaggcgccagtggacagttgcatgcgtggaacgtactacgtgttaggctatccacactcatatcaccctatttctctaaatatctaccatataactgtgggttatgataattagagataccca

SEQ ID NO: 4782 - protein, 324 aa, Zea mays subsp. mays
  peptide (1)..(324): Ceres Seq. ID no. 12365501
MREFVPCREMRDLLVPPAPAPDPPCALLFVQVTRLRCGGAVLALSMHHSVCDARSAAHFFDTWASIARGDAAAAAANAPVPPCFDYALLAARPALAVLYDHPEYKPEPEPVDAASDYASAIVVMTKAQVGALKARCSGASTFRAVVALVWQCVCRARALPPEAETRLYSMIDMRSRLDPPLPTGYFGNAVVRTSVSATVGEVTSNPVGHAARRALAVTSQGDDYARSLVDYLEGVDAMNLPRSGISRAHLRAISWMGMSLYKADFGWGAPVFMGPAIMYYSGFVYVMNAAGKEGALALVLSLEPESMPEFRKVFAEELASLDVI

SEQ ID NO: 4783 - protein, 315 aa, Zea mays subsp. mays
  peptide (1)..(315): Ceres Seq. ID no. 12365502
MRDLLVPPAPAPDPPCALLFVQVTRLRCGGAVLALSMHHSVCDARSAAHFFDTWASIARGDAAAAAANAPVPPCFDYALLAARPALAVLYDHPEYKPEPEPVDAASDYASAIVVMTKAQVGALKARCSGASTFRAVVALVWQCVCRARALPPEAETRLYSMIDMRSRLDPPLPTGYFGNAVVRTSVSATVGEVTSNPVGHAARRALAVTSQGDDYARSLVDYLEGVDAMNLPRSGISRAHLRAISWMGMSLYKADFGWGAPVFMGPAIMYYSGFVYVMNAAGKEGALALVLSLEPESMPEFRKVFAEELASLDVI

SEQ ID NO: 4784 - protein, 279 aa, Zea mays subsp. mays
  peptide (1)..(279): Ceres Seq. ID no. 12365503
MHHSVCDARSAAHFFDTWASIARGDAAAAAANAPVPPCFDYALLAARPALAVLYDHPEYKPEPEPVDAASDYASAIVVMTKAQVGALKARCSGASTFRAVVALVWQCVCRARALPPEAETRLYSMIDMRSRLDPPLPTGYFGNAVVRTSVSATVGEVTSNPVGHAARRALAVTSQGDDYARSLVDYLEGVDAMNLPRSGISRAHLRAISWMGMSLYKADFGWGAPVFMGPAIMYYSGFVYVMNAAGKEGALALVLSLEPESMPEFRKVFAEELASLDVI

SEQ ID NO: 4785 - DNA, 866 bp, Zea mays subsp. mays; identical to SEQ ID NO: 2090
  misc_feature (1)..(866): Ceres Seq. ID no. 12351502
  misc_feature (1)..(866): Ortholog of  Ceres SEQ ID NO 14304202 as cited in SEQ ID NO 56346
  misc_feature (1)..(866): Ortholog of  Ceres SEQ ID NO 14304159 as cited in SEQ ID NO 56494
  misc_feature (1)..(866): Ortholog of  Ceres SEQ ID NO 12613472 as cited in SEQ ID NO 60611
  misc_feature (1)..(866): Ortholog of  Ceres SEQ ID NO 12623915 as cited in SEQ ID NO 61013
  misc_feature (1)..(866): Ortholog of  Ceres SEQ ID NO 15173393 as cited in SEQ ID NO 63704
  misc_feature (1)..(866): Ortholog of  Ceres SEQ ID NO 15175545 as cited in SEQ ID NO 0

SEQ ID NO: 4786 - protein, 196 aa, Zea mays subsp. mays; identical to SEQ ID NO: 2091
  peptide (1)..(196): Ceres Seq. ID no. 12351503

SEQ ID NO: 4787 - protein, 155 aa, Zea mays subsp. mays; identical to SEQ ID NO: 2092
  peptide (1)..(155): Ceres Seq. ID no. 12351504

SEQ ID NO: 4788 - protein, 148 aa, Zea mays subsp. mays; identical to SEQ ID NO: 2093
  peptide (1)..(148): Ceres Seq. ID no. 12351505

SEQ ID NO: 4789 - DNA, 1382 bp, Zea mays subsp. mays
  misc_feature (1)..(1382): Ceres Seq. ID no. 12407780
  misc_feature (1)..(1382): Ortholog of  Ceres SEQ ID NO 13599496 as cited in SEQ ID NO 0
tccctcccagtcccaggagcgtggcctcactctcctcgtcgcatcccctctcctcatcttcaaagcgcgggcggcggcaatggcgatggcctccacctacgcgccgggcggaggcgcgggggcgctcgcgcagggaagatgcagggtccgcggtcccgcggggctgggcttcctcggcccctccaaggccgccggcctcccccgccccctcgccctcgccaggcggacgagcagccccgtcgcggtgggcgccaggctgcgatgcgcggcgtcgtcgtcccccgcggnaggcgcggcccgccacggcgccgcgcttcatccagcacaagaaggaggccttctggttctaccgcttcctctccatcgtgtacgaccacgtcatcaacccgggccactggaccgaggacatgcgcgacgacgcgctggaacccgccgacctcttcagccgccacctcacggtcgtcgacgtcggcggcggcacggggttcaccacgctcggcatcgtcaagcacgtcaacccggagaacgtcacgctgctcgaccagtccccgcaccagctcgacaaggcccggcagaaggaggccctcaagggggtcaccatcatggagggcgacgccgaggacctcccgttccccaccgactccttcgaccgatacatctccgccggcagcatcgagtactggccagacccacagcgggggatcaaggaagcctacagggtcctgagatttggtgggctagcttgtgtgatcggcccggtctacccgaccttctggctgtcccgcttcttcgccgacatgtggatgctcttccccaaggaggaagagtacatcgagtggttcaagaaggctgggtttagggatgtcaagctgaagaggattggaccgaagtggtaccgcggtgtccgaaggcatggcctcatcatgggctgctccgtcaccggcgtcaagagagagcgcggtgactctcccttggagcttggtcccaaggcggaggatgtcagcaagccagtgaatccgatcaccttcctcttccgcttcctcgtaggaacgatttgtgctgcgtactatgttctggtgcctatttacatgtggataaaggaccagatcgtgccaaaaggcatgccaatctgagtgaagggaatgagctgcatggaagagaggatagccaacgtctgaattttagtcttctctatattagacgcttcctgcctgttttgtattaatacctcttgttttccttctgctatttacttcttgcactgctgttcctgtttgtggtaattaataatactaagacatcgatgttctcctgtttcttgagcatgactggttgcagtggaacctggaaactaagttatatgatgtgtaatttagttggtc

SEQ ID NO: 4790 - protein, 376 aa, Zea mays subsp. mays
  peptide (1)..(376): Ceres Seq. ID no. 12407781
  misc_feature (96)..(96): Xaa is any aa, unknown or other
PPSPRSVASLSSSHPLSSSSKRGRRQWRWPPPTRRAEARGRSRREDAGSAVPRGWASSAPPRPPASPAPSPSPGGRAAPSRWAPGCDARRRRPPRXARPATAPRFIQHKKEAFWFYRFLSIVYDHVINPGHWTEDMRDDALEPADLFSRHLTVVDVGGGTGFTTLGIVKHVNPENVTLLDQSPHQLDKARQKEALKGVTIMEGDAEDLPFPTDSFDRYISAGSIEYWPDPQRGIKEAYRVLRFGGLACVIGPVYPTFWLSRFFADMWMLFPKEEEYIEWFKKAGFRDVKLKRIGPKWYRGVRRHGLIMGCSVTGVKRERGDSPLELGPKAEDVSKPVNPITFLFRFLVGTICAAYYVLVPIYMWIKDQIVPKGMPI

SEQ ID NO: 4791 - protein, 285 aa, Zea mays subsp. mays
  peptide (1)..(285): Ceres Seq. ID no. 12407782
  misc_feature (96)..(96): Xaa is any aa, unknown or other
PSQSQERGLTLLVASPLLIFKARAAAMAMASTYAPGGGAGALAQGRCRVRGPAGLGFLGPSKAAGLPRPLALARRTSSPVAVGARLRCAASSSPAXGAARHGAALHPAQEGGLLVLPLPLHRVRPRHQPGPLDRGHARRRAGTRRPLQPPPHGRRRRRRHGVHHARHRQARQPGERHAARPVPAPARQGPAEGGPQGGHHHGGRRRGPPVPHRLLRPIHLRRQHRVLARPTAGDQGSLQGPEIWWASLCDRPGLPDLLAVPLLRRHVDALPQGGRVHRVVQEGWV

SEQ ID NO: 4792 - protein, 259 aa, Zea mays subsp. mays
  peptide (1)..(259): Ceres Seq. ID no. 12407783
  misc_feature (70)..(70): Xaa is any aa, unknown or other
MAMASTYAPGGGAGALAQGRCRVRGPAGLGFLGPSKAAGLPRPLALARRTSSPVAVGARLRCAASSSPAXGAARHGAALHPAQEGGLLVLPLPLHRVRPRHQPGPLDRGHARRRAGTRRPLQPPPHGRRRRRRHGVHHARHRQARQPGERHAARPVPAPARQGPAEGGPQGGHHHGGRRRGPPVPHRLLRPIHLRRQHRVLARPTAGDQGSLQGPEIWWASLCDRPGLPDLLAVPLLRRHVDALPQGGRVHRVVQEGWV

SEQ ID NO: 4793 - DNA, 1393 bp, Zea mays subsp. mays
  misc_feature (1)..(1393): Ceres Seq. ID no. 12409839
  misc_feature (1)..(1393): Ortholog of  Ceres SEQ ID NO 15176333 as cited in SEQ ID NO 52787
  misc_feature (1)..(1393): Ortholog of  Ceres SEQ ID NO 15170403 as cited in SEQ ID NO 53457
  misc_feature (1)..(1393): Ortholog of  Ceres SEQ ID NO 14303479 as cited in SEQ ID NO 54254
  misc_feature (1)..(1393): Ortholog of  Ceres SEQ ID NO 14312047 as cited in SEQ ID NO 55656
  misc_feature (1)..(1393): Ortholog of  Ceres SEQ ID NO 12611392 as cited in SEQ ID NO 56826
  misc_feature (1)..(1393): Ortholog of  Ceres SEQ ID NO 13660872 as cited in SEQ ID NO 60830
  misc_feature (1)..(1393): Ortholog of  Ceres SEQ ID NO 12616221 as cited in SEQ ID NO 63291
  misc_feature (1)..(1393): Ortholog of  Ceres SEQ ID NO 14302355 as cited in SEQ ID NO 65830
ctcctcccctcttcctaccattagcagtagccacagccagaacaccagcagacagcagcatcagcagggaggaacacgatgagcggcgccggtccggatctgcagctgccaccggggttccggtttccacccgacggacgaggagctggtgatgcactacctctgccgccgctgcgccggcctgcccatcgccgtccccatcatcgccgagatcgacctctacaagttcgacccatggcagctcccaaggatggcgctgtacggcgagaaggagtggtacttcttctccccgcgggaccgcaagtacccgaacgggtccaggcccaaccgcgccgccggggctgggtactggaaggccaccggcgctgacaagcccgtgggcacgcccaagccgctggccatcaagaaggcgctcgtcttctacgccggcaaggcgcccaagggcgagaagaccaactggatcatgcacgagtaccgcctcgccgacgtcgaccgctcggcgcgcaagaagaacagcctcaggttggatgactgggtcctgtgccgcatctacaacaagaagggcggcgggctggagaaggcgccggcggctggcggcgaccacaagcctatgttcgccacgccggcggtgagctccccgccggagcagaagccgttcgtggcggcggcgggcgggctgcccccggcgttcccggagctggcggcgtactacgaccggccgtcggactcgatgccgcggctgcacgcggactactccagctgctcggagcaggtgctgtccccggagcagctggcgtgcgaccgggaggtgcagagccagcccaagatcagcgagtgggagcggaccttcgcctccgaccccgtgaaccccgcgggctccatgctcgaccccgtcgtcggccacgccggcggcgacccgctgctgcaggacatcctcatgtactggggcaagccgttctagacgacgccgcccatcatgtcctgagggcgaggggaggtgggggtggcgaagcatgcatgcaaacacccatcctcggctgcggttggttggttgattgatctgtcttgggcagcgcaatgcaatgcaaccgcacggtgtgggctttgactcaggcgagccgccattgttgacttgcaaggaggatataatatgaaactatagctggattacatggagaggcggcaatgagaccgtctggccccgccggaagggagacggagacggagacggagacggatggcgcagtgcatcgggtgtggtggatcgtgcgcggcatgtgtgtgtgtgtctgtaatcgactccatcagcttgccgcctttcctgtcctattctgattgttttcatccattgatgccgtcgtcgcagtaataaacttggaacgaacgattccac

SEQ ID NO: 4794 - protein, 269 aa, Zea mays subsp. mays
  peptide (1)..(269): Ceres Seq. ID no. 12409840
MHYLCRRCAGLPIAVPIIAEIDLYKFDPWQLPRMALYGEKEWYFFSPRDRKYPNGSRPNRAAGAGYWKATGADKPVGTPKPLAIKKALVFYAGKAPKGEKTNWIMHEYRLADVDRSARKKNSLRLDDWVLCRIYNKKGGGLEKAPAAGGDHKPMFATPAVSSPPEQKPFVAAAGGLPPAFPELAAYYDRPSDSMPRLHADYSSCSEQVLSPEQLACDREVQSQPKISEWERTFASDPVNPAGSMLDPVVGHAGGDPLLQDILMYWGKPF

SEQ ID NO: 4795 - protein, 236 aa, Zea mays subsp. mays
  peptide (1)..(236): Ceres Seq. ID no. 12409841
MALYGEKEWYFFSPRDRKYPNGSRPNRAAGAGYWKATGADKPVGTPKPLAIKKALVFYAGKAPKGEKTNWIMHEYRLADVDRSARKKNSLRLDDWVLCRIYNKKGGGLEKAPAAGGDHKPMFATPAVSSPPEQKPFVAAAGGLPPAFPELAAYYDRPSDSMPRLHADYSSCSEQVLSPEQLACDREVQSQPKISEWERTFASDPVNPAGSMLDPVVGHAGGDPLLQDILMYWGKPF

SEQ ID NO: 4796 - protein, 165 aa, Zea mays subsp. mays
  peptide (1)..(165): Ceres Seq. ID no. 12409842
MHEYRLADVDRSARKKNSLRLDDWVLCRIYNKKGGGLEKAPAAGGDHKPMFATPAVSSPPEQKPFVAAAGGLPPAFPELAAYYDRPSDSMPRLHADYSSCSEQVLSPEQLACDREVQSQPKISEWERTFASDPVNPAGSMLDPVVGHAGGDPLLQDILMYWGKPF

SEQ ID NO: 4797 - DNA, 1140 bp, Zea mays subsp. mays
  misc_feature (1)..(1140): Ceres Seq. ID no. 12386869
  misc_feature (1)..(1140): Ortholog of  Ceres SEQ ID NO 14301423 as cited in SEQ ID NO 52204
  misc_feature (1)..(1140): Ortholog of  Ceres SEQ ID NO 12621037 as cited in SEQ ID NO 66448
  misc_feature (1)..(1140): Ortholog of  Ceres SEQ ID NO 12635639 as cited in SEQ ID NO 0
  misc_feature (1)..(1140): Ortholog of  Ceres SEQ ID NO 14305144 as cited in SEQ ID NO 0
ccaccaacccaacctctgacgatcaccatcgccgctagcctccaccaccaacttcccatcgcctccccctcatctccccacactcctgacctcacctctccgaactgcagcacctcccctcccgccacccacacgtgctcccatggccgccaccgcgatctcagtccgcctccacccaaccgccgcgcgccatgtggcctccgcccgccgcgcccgcctcggggccgtccgcgcgcagtccgcgccggcggcggcggcggcggcgctgacgcaggacgacctcaagcggctggcggcggtgcgcgccgtcgagcaggtgaagagcgggatggtgctcgggctcgggacgggctccacggccgccttcgccgtcgccgagatcggcgcgctcctggccgcgggcaagctcgagaagatcgtcggcgtgcccacatccaagcgcaccttcgagcaggcgcagtcgctcggcatcccgctctccacgctcgacgacaacccgctcatcgacctcgccatcgacggtgccgacgaggttgaccctgacctcaaccttgtgaaagggcggggtggtgctcttcttcgtgagaagatggttgaggcagcatcggacaagtttattgttattgttgacgagacaaaactagttgatgggttaggaggtagtggtctagccatgccagtggaagttgtgcagttctgctggaagtacaaccttgtaagattgcaggaactgtttaaggaggaaggagtcgaggcaaagctaaggtttgaaggcgacaagccctatgttactgacaactcaaactacatcgtcgatttatacttcaagacgccaatcaaggatgcgttggcagcaggacaggaaattgcagctctggaaggagttgttgaccatgggttgttcttgaacatggcgagttcagtgatcattgctggaacggacggtgtcagtgtcaaaacgaagtgagtttttgagttgctttgttgtttgtgttgagttttacaatttaatgtacaagctattggtgtaaaagcagctgataagatgcttcaataaaggtgttcccccaatgtggggattgactatcacttattgtgggataaaaagccattttaataggttgaaacttctgttgattc

SEQ ID NO: 4798 - protein, 274 aa, Zea mays subsp. mays
  peptide (1)..(274): Ceres Seq. ID no. 12386870
MAATAISVRLHPTAARHVASARRARLGAVRAQSAPAAAAAALTQDDLKRLAAVRAVEQVKSGMVLGLGTGSTAAFAVAEIGALLAAGKLEKIVGVPTSKRTFEQAQSLGIPLSTLDDNPLIDLAIDGADEVDPDLNLVKGRGGALLREKMVEAASDKFIVIVDETKLVDGLGGSGLAMPVEVVQFCWKYNLVRLQELFKEEGVEAKLRFEGDKPYVTDNSNYIVDLYFKTPIKDALAAGQEIAALEGVVDHGLFLNMASSVIIAGTDGVSVKTK

SEQ ID NO: 4799 - protein, 212 aa, Zea mays subsp. mays
  peptide (1)..(212): Ceres Seq. ID no. 12386871
MVLGLGTGSTAAFAVAEIGALLAAGKLEKIVGVPTSKRTFEQAQSLGIPLSTLDDNPLIDLAIDGADEVDPDLNLVKGRGGALLREKMVEAASDKFIVIVDETKLVDGLGGSGLAMPVEVVQFCWKYNLVRLQELFKEEGVEAKLRFEGDKPYVTDNSNYIVDLYFKTPIKDALAAGQEIAALEGVVDHGLFLNMASSVIIAGTDGVSVKTK

SEQ ID NO: 4800 - protein, 178 aa, Zea mays subsp. mays
  peptide (1)..(178): Ceres Seq. ID no. 12386872
PPTQPLTITIAASLHHQLPIASPSSPHTPDLTSPNCSTSPPATHTCSHGRHRDLSPPPPNRRAPCGLRPPRPPRGRPRAVRAGGGGGGADAGRPQAAGGGARRRAGEERDGARARDGLHGRLRRRRDRRAPGRGQAREDRRRAHIQAHLRAGAVARHPALHARRQPAHRPRHRRCRRG

SEQ ID NO: 4801 - DNA, 1650 bp, Zea mays subsp. mays
  misc_feature (1)..(1650): Ceres Seq. ID no. 12409835
  misc_feature (1)..(1650): Ortholog of  Ceres SEQ ID NO 12625388 as cited in SEQ ID NO 63299
  misc_feature (1)..(1650): Ortholog of  Ceres SEQ ID NO 15179860 as cited in SEQ ID NO 66716
agcttcttctccctactcctccagtcctccgtcatccgtttcgctctctgccgccgccaccgcacaagaagctagctcctgcctgtaccgccccgtcatggcgatgctatcccgcgcagcctcctccgcggcccggcgcccgctgctgccgccgcctaggcttctggcggtgagggcgatggcgtcgtcgctcttcggccacgtcgagccggcgcccaaggaccccatcctcggcgtcaccgaggctttcctcgccgacccctcgtccgacaaagtgaacgtcggcgtcggcgcctaccgggacgacaacggccagcccgtcgtgctcagctgcgtgcgcgaggccgagcgccggatcgcgggcaacctcaacatggagtaccttccgatgggaggcagcgtcaagatgattgaagagtcactgaagctggcgtacggagaagattctgacttcatcaaagataagaggatagcagcggtgcaggcgctttcaggcactggtgcctgccggctctttgctgatttccaaaagcgttttttgccggattcgcagatctacataccaacaccaacgtggtccaaccatcacaatatttggagggatgctcaagtgccacagaagacattcacatactaccatccagagtcaagagggcttgatttctcaggattgatgaatgaaatcaagaatgctccagatggttcattctttttgcttcatgcatgtgctcataatcccaccggtgtagatcctacggaggaacaatggagagaaatatcccatcagttcaaggtgaaaaaaacattttccattctttgacatggcataccaagggtttgccagtggtgatccagagagagatgccaaggcaatccgaattttccttgaagatggacaccaaattggatgtgctcagtcatacgcaaagaacatgggactttatggacaaagagcaggatgcctgagtattttgtgtgaggatgagatgcaagcagttgctgtcaagagccaactgcaacagatcgcaagaccaatgtacagcaacccacctgttcatggtgcactggttgtttctataatcctcagtgatccagaattgaagagtttgtggttaaaagaagtcaagggtatggctgatcgtatcattggaatgcggaaggcacttaaggaaaatcttgaaaagctaggttcacctttgtcatgggatcatatcactaatcagattggaatgttctgctacagtgggatgacacctgaacaagttgaccgtttaacaaatgaataccacatttacatgacccgcaatgggaggataagcatggctggtgttacgacaggaaatgttggttacctagcaaatgcaattcatgaggttaccaaaccaaattgagttagggtcctaccttctttggtcgatggaagctgatggaatgagactgtgaagcggcgtttccccccctctgttcctgacagaaataagtttagcctgctgctaccatatacatggacacagactcagatgtagacactcaagttttgagagctgtgatcctgtttcatttaatcaaaaacaattttgtttttttttcatcttgtcatggcaaatgttacaccagctgcaaaataattacaataattgatcttgatcc

SEQ ID NO: 4802 - protein, 272 aa, Zea mays subsp. mays
  peptide (1)..(272): Ceres Seq. ID no. 12409836
ASSPYSSSPPSSVSLSAAATAQEASSCLYRPVMAMLSRAASSAARRPLLPPPRLLAVRAMASSLFGHVEPAPKDPILGVTEAFLADPSSDKVNVGVGAYRDDNGQPVVLSCVREAERRIAGNLNMEYLPMGGSVKMIEESLKLAYGEDSDFIKDKRIAAVQALSGTGACRLFADFQKRFLPDSQIYIPTPTWSNHHNIWRDAQVPQKTFTYYHPESRGLDFSGLMNEIKNAPDGSFFLLHACAHNPTGVDPTEEQWREISHQFKVKKTFSIL

SEQ ID NO: 4803 - protein, 240 aa, Zea mays subsp. mays
  peptide (1)..(240): Ceres Seq. ID no. 12409837
MAMLSRAASSAARRPLLPPPRLLAVRAMASSLFGHVEPAPKDPILGVTEAFLADPSSDKVNVGVGAYRDDNGQPVVLSCVREAERRIAGNLNMEYLPMGGSVKMIEESLKLAYGEDSDFIKDKRIAAVQALSGTGACRLFADFQKRFLPDSQIYIPTPTWSNHHNIWRDAQVPQKTFTYYHPESRGLDFSGLMNEIKNAPDGSFFLLHACAHNPTGVDPTEEQWREISHQFKVKKTFSIL

SEQ ID NO: 4804 - protein, 238 aa, Zea mays subsp. mays
  peptide (1)..(238): Ceres Seq. ID no. 12409838
MLSRAASSAARRPLLPPPRLLAVRAMASSLFGHVEPAPKDPILGVTEAFLADPSSDKVNVGVGAYRDDNGQPVVLSCVREAERRIAGNLNMEYLPMGGSVKMIEESLKLAYGEDSDFIKDKRIAAVQALSGTGACRLFADFQKRFLPDSQIYIPTPTWSNHHNIWRDAQVPQKTFTYYHPESRGLDFSGLMNEIKNAPDGSFFLLHACAHNPTGVDPTEEQWREISHQFKVKKTFSIL

SEQ ID NO: 4805 - DNA, 1415 bp, Zea mays subsp. mays
  misc_feature (1)..(1415): Ceres Seq. ID no. 12363295
  misc_feature (1)..(1415): Ortholog of  Ceres SEQ ID NO 14308776 as cited in SEQ ID NO 55124
gtgaatcgtgatcccctgtggttccttccgagcaagggagaaagaatgcagtcgtctcctccgcgtcgccctcctccagtgtagaaaactgcagcccgtatagtgtcatcggcgcaaagggacgaggtcgcagctgccgatgcaggagacggcagcaggcgcctatccctcctacatggagccggagccggagcagacgggtgcatcggcgactgtgggtgtgatgggctgccgctcgcccacgtgcccgccttggctccaagcggccattgcagacatcgatcagcgggtgcgcgcgctggcggtggacgatgccgcgccgcccacggagcactccttcgcggagcgcgccgaggagtactaccagaagcggccgcagctgctggccctcctcgccgacctccaccgccgctacctctgcctggccgaccgctactgccaccaccagcacaagcgagagcagccctcgctgccggcgtctgcctccgactgcggctcgtccgacgtcgacgaccgctgctccgacgccggcagctcgctctccttccaggcccagcacccgccgccggtggccggggtccccgccgaggaaggggaggagctgctggtggcggagctggtggccgcgtgggtggagcgcgacgtgctggcggacgaggcggcgcggcgcgcggcggagtcggcgcgcaggatccagctgcaggggagcctggtggaggtgctggagtcggagcgcctggtgctgctgggcgagaacgcgcgcctggggttccgcgcgacggcggccgaggacgaggccgcggcggcggcgnccgacctgggctacgcgcgccgccgcgccgccgagatggcccgcctcgtgctcaggctccgcgaggaccaccgcgcctgcgtgctggggcgcagggccgaggcgctgcaggcgcgggtgtacgcgctggagctccgcaaccgcgagtgctgcgaggccacggcggcgtgggaggccgaggtccagcggctcagcgcagagaaccgacgcctcgcggaccaagccatgatggcgaggaggaagcgcaagggcggtggtggtgggtggtgggcgagggtcaggatggcagcggccgggtggacgccgtgtgcgcccgcggtcacggtcgccgagcagaccaaggggaaggaggacggcaagtaccaccactacggcggcggatgcttctgtgtctagactaggagatgagacggcggcggcgatctagccctcctttttgttagtagtaattactattataattcaggacttggcaggtgaatgtgaatgctgctgggtcggatgcataattctggagaagacgatgattgtgctccgcaggcactagtaaaacaacatgcaattcgtatgatctgttcaatacattataccatggtgttcccgc

SEQ ID NO: 4806 - protein, 355 aa, Zea mays subsp. mays
  peptide (1)..(355): Ceres Seq. ID no. 12363296
  misc_feature (225)..(225): Xaa is any aa, unknown or other
MQETAAGAYPSYMEPEPEQTGASATVGVMGCRSPTCPPWLQAAIADIDQRVRALAVDDAAPPTEHSFAERAEEYYQKRPQLLALLADLHRRYLCLADRYCHHQHKREQPSLPASASDCGSSDVDDRCSDAGSSLSFQAQHPPPVAGVPAEEGEELLVAELVAAWVERDVLADEAARRAAESARRIQLQGSLVEVLESERLVLLGENARLGFRATAAEDEAAAAAXDLGYARRRAAEMARLVLRLREDHRACVLGRRAEALQARVYALELRNRECCEATAAWEAEVQRLSAENRRLADQAMMARRKRKGGGGGWWARVRMAAAGWTPCAPAVTVAEQTKGKEDGKYHHYGGGCFCV

SEQ ID NO: 4807 - protein, 343 aa, Zea mays subsp. mays
  peptide (1)..(343): Ceres Seq. ID no. 12363297
  misc_feature (213)..(213): Xaa is any aa, unknown or other
MEPEPEQTGASATVGVMGCRSPTCPPWLQAAIADIDQRVRALAVDDAAPPTEHSFAERAEEYYQKRPQLLALLADLHRRYLCLADRYCHHQHKREQPSLPASASDCGSSDVDDRCSDAGSSLSFQAQHPPPVAGVPAEEGEELLVAELVAAWVERDVLADEAARRAAESARRIQLQGSLVEVLESERLVLLGENARLGFRATAAEDEAAAAAXDLGYARRRAAEMARLVLRLREDHRACVLGRRAEALQARVYALELRNRECCEATAAWEAEVQRLSAENRRLADQAMMARRKRKGGGGGWWARVRMAAAGWTPCAPAVTVAEQTKGKEDGKYHHYGGGCFCV

SEQ ID NO: 4808 - protein, 327 aa, Zea mays subsp. mays
  peptide (1)..(327): Ceres Seq. ID no. 12363298
  misc_feature (197)..(197): Xaa is any aa, unknown or other
MGCRSPTCPPWLQAAIADIDQRVRALAVDDAAPPTEHSFAERAEEYYQKRPQLLALLADLHRRYLCLADRYCHHQHKREQPSLPASASDCGSSDVDDRCSDAGSSLSFQAQHPPPVAGVPAEEGEELLVAELVAAWVERDVLADEAARRAAESARRIQLQGSLVEVLESERLVLLGENARLGFRATAAEDEAAAAAXDLGYARRRAAEMARLVLRLREDHRACVLGRRAEALQARVYALELRNRECCEATAAWEAEVQRLSAENRRLADQAMMARRKRKGGGGGWWARVRMAAAGWTPCAPAVTVAEQTKGKEDGKYHHYGGGCFCV

SEQ ID NO: 4809 - DNA, 1826 bp, Zea mays subsp. mays
  misc_feature (1)..(1826): Ceres Seq. ID no. 12367546
  misc_feature (1)..(1826): Ortholog of  Ceres SEQ ID NO 15178767 as cited in SEQ ID NO 55317
  misc_feature (1)..(1826): Ortholog of  Ceres SEQ ID NO 13657647 as cited in SEQ ID NO 66399
aaaagagtaattgcggtcgtggttccggattccccccgccgccgccgcaagaccggagccctaattccaagcggtaaacgatgaggccgcacgcgttgggtatgggtggcggtggcgtggggaggcggaaggcggtggccgccgccgccgcggctagccgggagtggatggtggtgccggcgtcgggcccggcgcgggtggaggaagcagggaagcacgcggtgatggcgcgtacggggcttcccgcgcgcgatctcagggtgctcgacccgttactctcgtacccgtccacgatcctgggccgcgagcgcgccatcgtggtcaacttggagcgcgtcaaagctctgatcacagccgcggaggtgctgcttcctaacaccaaggatcccgccttcgcgcgcttcgttcgcgacctccagacccgcgtcctcgcatcttcgtctgaccagctgaactcactgacatggaaggtgaatcacctattgttgcttcaccatttcctgtaccaagttcatccaaagggcatgaaatggagatgactaagaagactgctgctgttgtgcctgaaatgactagcagcagcagtatgcccaatttagctgttgcaaaagatggaaataccaaggttttgcctttcgaatttcgagctcttgaagtgtgccttgaatcagcctgcagatctttggaagaggaaacttctactctggagctagaggcatatccagcattagatgagctgacatcaaagatcagcacattaaaccttgaacgagttaggcaaatcaagagtcgtctggttgcgatatctggtcgagtacagaaggtgagggatgagcttgagcatttactggatgatgaaatggatatggctgaaatgtacttgacagagaagcttactcaacaagaaatcagtgaggcttcatctagagctgaggttgatgatgcatctcttacagaagacgatagggatgaagattatagaagtgaaccagatggaagcaatggtagtgttataggttataagcccaatattgaagagctagagatgcttctagaggcttactttgtgcaaattgatggcacacttaacaagctatcacatctgagggagtacgtcgatgacacagaagattatatcaatataatgttggacgacaagcagaatcagctgctgcagatgggagttatgctgtcaactgctactgtcgtcatcactgctggagtggctgtagttggtctttttggtatgaatattggcatatcactttacgcagacccaacaaccgaggaggaaactcgagcagcaaataggaaattttgggaaactactttcgggaccgttgctggctgcgtgattttgtacatcatagccatgggttggggaaagagaagtggattactgcaatgatgcggaagcatgactgcatgagtgttctgtacccagtgaatactgggttcacaaaaatctccaaaatgagagattattgtattggctaacatctcctgagtgagcggcgcctaactagacaaagaattagctaacattttctacaatactagtattgtcttgactatttaacttggagaactcaagaacatgatgcttaagagggaatggtgcaaggccatacgtcttaaggtagggcttggaataatcagttgagttttcttttggtgttatgccaaaattatctcataggatttcagtgagtttgtccatggttaatgtagtcttagtttcttcaagttttgacttgtacatattgttccactctatgtcttccagttctatctcatttgcccttctagcactaaagggttgttct

SEQ ID NO: 4810 - protein, 314 aa, Zea mays subsp. mays
  peptide (1)..(314): Ceres Seq. ID no. 12367547
MEGESPIVASPFPVPSSSKGHEMEMTKKTAAVVPEMTSSSSMPNLAVAKDGNTKVLPFEFRALEVCLESACRSLEEETSTLELEAYPALDELTSKISTLNLERVRQIKSRLVAISGRVQKVRDELEHLLDDEMDMAEMYLTEKLTQQEISEASSRAEVDDASLTEDDRDEDYRSEPDGSNGSVIGYKPNIEELEMLLEAYFVQIDGTLNKLSHLREYVDDTEDYINIMLDDKQNQLLQMGVMLSTATVVITAGVAVVGLFGMNIGISLYADPTTEEETRAANRKFWETTFGTVAGCVILYIIAMGWGKRSGLLQ

SEQ ID NO: 4811 - protein, 292 aa, Zea mays subsp. mays
  peptide (1)..(292): Ceres Seq. ID no. 12367548
MEMTKKTAAVVPEMTSSSSMPNLAVAKDGNTKVLPFEFRALEVCLESACRSLEEETSTLELEAYPALDELTSKISTLNLERVRQIKSRLVAISGRVQKVRDELEHLLDDEMDMAEMYLTEKLTQQEISEASSRAEVDDASLTEDDRDEDYRSEPDGSNGSVIGYKPNIEELEMLLEAYFVQIDGTLNKLSHLREYVDDTEDYINIMLDDKQNQLLQMGVMLSTATVVITAGVAVVGLFGMNIGISLYADPTTEEETRAANRKFWETTFGTVAGCVILYIIAMGWGKRSGLLQ

SEQ ID NO: 4812 - protein, 290 aa, Zea mays subsp. mays
  peptide (1)..(290): Ceres Seq. ID no. 12367549
MTKKTAAVVPEMTSSSSMPNLAVAKDGNTKVLPFEFRALEVCLESACRSLEEETSTLELEAYPALDELTSKISTLNLERVRQIKSRLVAISGRVQKVRDELEHLLDDEMDMAEMYLTEKLTQQEISEASSRAEVDDASLTEDDRDEDYRSEPDGSNGSVIGYKPNIEELEMLLEAYFVQIDGTLNKLSHLREYVDDTEDYINIMLDDKQNQLLQMGVMLSTATVVITAGVAVVGLFGMNIGISLYADPTTEEETRAANRKFWETTFGTVAGCVILYIIAMGWGKRSGLLQ

SEQ ID NO: 4813 - DNA, 1248 bp, Zea mays subsp. mays
  misc_feature (1)..(1248): Ceres Seq. ID no. 12344056
  misc_feature (1)..(1248): Ortholog of  Ceres SEQ ID NO 14303866 as cited in SEQ ID NO 53689
  misc_feature (1)..(1248): Ortholog of  Ceres SEQ ID NO 15171755 as cited in SEQ ID NO 57047
  misc_feature (1)..(1248): Ortholog of  Ceres SEQ ID NO 13597613 as cited in SEQ ID NO 65334
  misc_feature (1)..(1248): Ortholog of  Ceres SEQ ID NO 13655958 as cited in SEQ ID NO 65456
  misc_feature (1)..(1248): Ortholog of  Ceres SEQ ID NO 14303664 as cited in SEQ ID NO 65892
  misc_feature (1)..(1248): Ortholog of  Ceres SEQ ID NO 14309641 as cited in SEQ ID NO 0
gtgctttcatcattccgctccccacacccctgttcgtggcggcctccgcccctccctctcaggctctcaccaccgtctgctggtggttgccgcggcgccgctcctccctcgtggtggcggtggaggactacggtcggggatcgacggcttcttcgtccgttggttggcaggcgaggcgatacatcaaccaaccaaaagaaatgtcagctggcaggcaagcatactggtgttaccagtgccgacagagggtgaggccacggggccgggagatggtttgtccctactgcgattctgggtttgtggctgaaatggatgatgtagatgctctcatgagccacttcgttgggacggatcctgatttccatcgcgacccacggttcgggatcatggaggcgatctccgccgtgatgcggcatggtatggcagggatgaaccgggaggttgatgtcagagggaggccgaacttcttttcagacctggagatggagttcggttcagggccatggctgctcttccgtggccagctccccggccacctcaccgaggacaacggtttcgatgttttcgtcaatggacgacgtggcggcggcggcggcggcggcggcatgaggagggccaacatcgcggactacttcgttggccctggactggatgatcttatcgagcagttgacccagaatgatcgccgaggaccaccacctgctgcacagtcctcgatcgacgctatgcccacagtgaagatcacccagaggcatctcagtggggactcgcactgccctatctgcaaggagaagttcgagatgggatccgaagaagcaagagagatgccatgcaagcacctgtaccactccgactgcatagttccttggttagagcagcacaattcctgccccgtttgccgttacgagctcccgccacagggctctgccaccggtgctagctgctcgcgcgcgagatcaaccgaccagagccagagctcaagtagttcaagcagcagcgggagaaccagtgggcgtcaaaggagaaggaacccgttctcgttcctgtggcctttccgctcatcaagtagttctcgctagattagcctctggtaatctttgctcaggttcgaaatactgtttgtttttttgggtcaaatacgctggtctaatgggctttaatgtggtgggatctcaatctgtactgtatggtttgttaatgatcgccacacgatgcttctccttgcaagtatattattattaccacggt

SEQ ID NO: 4814 - protein, 358 aa, Zea mays subsp. mays
  peptide (1)..(358): Ceres Seq. ID no. 12344057
AFIIPLPTPLFVAASAPPSQALTTVCWWLPRRRSSLVVAVEDYGRGSTASSSVGWQARRYINQPKEMSAGRQAYWCYQCRQRVRPRGREMVCPYCDSGFVAEMDDVDALMSHFVGTDPDFHRDPRFGIMEAISAVMRHGMAGMNREVDVRGRPNFFSDLEMEFGSGPWLLFRGQLPGHLTEDNGFDVFVNGRRGGGGGGGGMRRANIADYFVGPGLDDLIEQLTQNDRRGPPPAAQSSIDAMPTVKITQRHLSGDSHCPICKEKFEMGSEEAREMPCKHLYHSDCIVPWLEQHNSCPVCRYELPPQGSATGASCSRARSTDQSQSSSSSSSSGRTSGRQRRRNPFSFLWPFRSSSSSR

SEQ ID NO: 4815 - protein, 292 aa, Zea mays subsp. mays
  peptide (1)..(292): Ceres Seq. ID no. 12344058
MSAGRQAYWCYQCRQRVRPRGREMVCPYCDSGFVAEMDDVDALMSHFVGTDPDFHRDPRFGIMEAISAVMRHGMAGMNREVDVRGRPNFFSDLEMEFGSGPWLLFRGQLPGHLTEDNGFDVFVNGRRGGGGGGGGMRRANIADYFVGPGLDDLIEQLTQNDRRGPPPAAQSSIDAMPTVKITQRHLSGDSHCPICKEKFEMGSEEAREMPCKHLYHSDCIVPWLEQHNSCPVCRYELPPQGSATGASCSRARSTDQSQSSSSSSSSGRTSGRQRRRNPFSFLWPFRSSSSSR

SEQ ID NO: 4816 - protein, 269 aa, Zea mays subsp. mays
  peptide (1)..(269): Ceres Seq. ID no. 12344059
MVCPYCDSGFVAEMDDVDALMSHFVGTDPDFHRDPRFGIMEAISAVMRHGMAGMNREVDVRGRPNFFSDLEMEFGSGPWLLFRGQLPGHLTEDNGFDVFVNGRRGGGGGGGGMRRANIADYFVGPGLDDLIEQLTQNDRRGPPPAAQSSIDAMPTVKITQRHLSGDSHCPICKEKFEMGSEEAREMPCKHLYHSDCIVPWLEQHNSCPVCRYELPPQGSATGASCSRARSTDQSQSSSSSSSSGRTSGRQRRRNPFSFLWPFRSSSSSR

SEQ ID NO: 4817 - DNA, 921 bp, Zea mays subsp. mays
  misc_feature (1)..(921): Ceres Seq. ID no. 12365504
  misc_feature (1)..(921): Ortholog of  Ceres SEQ ID NO 14306110 as cited in SEQ ID NO 1363
gcacgagaccattacctagaacatcctaatcgaaaaaaacagccttgtgcattcatcactttcctgactcacctcactcgatcatcctccagtcttgtcgtcgcctgctagcttgaatattacgccagcatctcgccaggaaaatggcgggcactactccgcgccgcttgctcctggtcatcgtccccctcgtcgccgtcgtgccggcgtccgcaaaagactacatggtcggcgactcgtccgggtggaagtccggagtggactacgctgcctgggccaagggcaagccgttcgccatcggcgacacgctctcgttccagtacagctcggcgcactcggtgctggaggtgagcgaggcggaccacggcgcgtgctcggcgagcaacccgctgcggtcgcaccagggccagagcaccaccatcccgctcaccaaggccggcacccgctacttcatctgcggcgcccccggccactgcgcctcgggcatgaaggtcgccatcaccgtctccggcggcggcggcggcggcagcagcagcgccgacaacaccgcgactccgtcgggtccctccgtgcgggcgatgaacacgaagccggcgtccggtctccggtccggtggcgcgacgacgacggacgagtcggactccagcgcggctggcagcggcgcccgcctcgcgatgggcctgctgttcggggccgcgggcctcgctgcaataatgggctgaattgaggacccgctagggaaaaggcagtgcggtttcacgaatttcctatttagtttcctgcgttctctgcttgcgtccccgagtcgcgaggctgagtgttcggccgtgcatatttttcgtatacttttgctgtgtttttttggggctattcgttgttcaatactgttgtttcagaataaaatttcatccttgaccatcc

SEQ ID NO: 4818 - protein, 192 aa, Zea mays subsp. mays
  peptide (1)..(192): Ceres Seq. ID no. 12365505
MAGTTPRRLLLVIVPLVAVVPASAKDYMVGDSSGWKSGVDYAAWAKGKPFAIGDTLSFQYSSAHSVLEVSEADHGACSASNPLRSHQGQSTTIPLTKAGTRYFICGAPGHCASGMKVAITVSGGGGGGSSSADNTATPSGPSVRAMNTKPASGLRSGGATTTDESDSSAAGSGARLAMGLLFGAAGLAAIMG

SEQ ID NO: 4819 - protein, 165 aa, Zea mays subsp. mays
  peptide (1)..(165): Ceres Seq. ID no. 12365506
MVGDSSGWKSGVDYAAWAKGKPFAIGDTLSFQYSSAHSVLEVSEADHGACSASNPLRSHQGQSTTIPLTKAGTRYFICGAPGHCASGMKVAITVSGGGGGGSSSADNTATPSGPSVRAMNTKPASGLRSGGATTTDESDSSAAGSGARLAMGLLFGAAGLAAIMG

SEQ ID NO: 4820 - DNA, 1215 bp, Zea mays subsp. mays
  misc_feature (1)..(1215): Ceres Seq. ID no. 12407776
  misc_feature (1)..(1215): Ortholog of  Ceres SEQ ID NO 14307839 as cited in SEQ ID NO 54379
  misc_feature (1)..(1215): Ortholog of  Ceres SEQ ID NO 13596109 as cited in SEQ ID NO 68619
acccacccgttttatccacgcacggcgtcgaacaccccgcggtcgctcacgtgaggcgccaccccgcgcacccagtcagcgcccgcctccaccacccacccacacgacaaaaatccgccatggccttcgcgctcaaggccgccgccgcggggtcggcgtcgttctccgccgcggggccgaggcggcgcgccgcggcgactggtagggtctcgttccggagcgccgcgcccgtggtcgccgtcagggccgcggcggcggcggccgccgctgtggcggaggacaagcgcagcatctccggcaccttcgccgagctcaggcagcaggggaagactgccttgattcccttcatcactgctggagaccctgacttggccaccacagcaaaagcactcaggatccttgatgcgtgtggttcagacgtgatcgaactgggtgtgccttactccgatccattggctgacggccctgttattcaggcctccgcgacgcgcgctctggcaaagggcaccacatttgaggatgtcatctccatggtaaagggggtgatacctgatctgtcctgccctgtagcgcttttcacatattacaacccgatcctgaagcgtggtgtccccaacttcatgagtattgttaaagaagctggggtacacggtcttgtggtaccagatgttcctttggaagagacagatgtcttgaggagtgaggctgccaaaaacaacctagagctggtgctattgacaacaccgactacaccaaatgaaagaatggagaaaattgcacaggcttcagaaggatttatttatcttgtaagcactgttggagttactggtacacgtgcaaatgtaagcggcaaggtgcaatctcttcttcaggatatcaagaaggtgacagaaaaacccgtggctgttggctttggtgtgtcgactccagagcatgtccggcagattgcaggatggggcgcagatggtgtgattatcggtagcgcagtgatgaagacgttggaggaagctgcttctccagaagaaggattgaagaagctagaagagttcgccaagaacctgaaggccgcattgccgtgaaccaaccattttcgttagcaaagaaattaagattttttttttcctttcaatcttggctttcagggttgttggttgttgtgtagtgaaaataattgtgtccctatgttgaatgctcaaatgaataaatcaagatccc

SEQ ID NO: 4821 - protein, 358 aa, Zea mays subsp. mays
  peptide (1)..(358): Ceres Seq. ID no. 12407777
PPVLSTHGVEHPAVAHVRRHPAHPVSARLHHPPTRQKSAMAFALKAAAAGSASFSAAGPRRRAAATGRVSFRSAAPVVAVRAAAAAAAAVAEDKRSISGTFAELRQQGKTALIPFITAGDPDLATTAKALRILDACGSDVIELGVPYSDPLADGPVIQASATRALAKGTTFEDVISMVKGVIPDLSCPVALFTYYNPILKRGVPNFMSIVKEAGVHGLVVPDVPLEETDVLRSEAAKNNLELVLLTTPTTPNERMEKIAQASEGFIYLVSTVGVTGTRANVSGKVQSLLQDIKKVTEKPVAVGFGVSTPEHVRQIAGWGADGVIIGSAVMKTLEEAASPEEGLKKLEEFAKNLKAALP

SEQ ID NO: 4822 - protein, 319 aa, Zea mays subsp. mays
  peptide (1)..(319): Ceres Seq. ID no. 12407778
MAFALKAAAAGSASFSAAGPRRRAAATGRVSFRSAAPVVAVRAAAAAAAAVAEDKRSISGTFAELRQQGKTALIPFITAGDPDLATTAKALRILDACGSDVIELGVPYSDPLADGPVIQASATRALAKGTTFEDVISMVKGVIPDLSCPVALFTYYNPILKRGVPNFMSIVKEAGVHGLVVPDVPLEETDVLRSEAAKNNLELVLLTTPTTPNERMEKIAQASEGFIYLVSTVGVTGTRANVSGKVQSLLQDIKKVTEKPVAVGFGVSTPEHVRQIAGWGADGVIIGSAVMKTLEEAASPEEGLKKLEEFAKNLKAALP

SEQ ID NO: 4823 - protein, 182 aa, Zea mays subsp. mays
  peptide (1)..(182): Ceres Seq. ID no. 12407779
MVKGVIPDLSCPVALFTYYNPILKRGVPNFMSIVKEAGVHGLVVPDVPLEETDVLRSEAAKNNLELVLLTTPTTPNERMEKIAQASEGFIYLVSTVGVTGTRANVSGKVQSLLQDIKKVTEKPVAVGFGVSTPEHVRQIAGWGADGVIIGSAVMKTLEEAASPEEGLKKLEEFAKNLKAALP

SEQ ID NO: 4824 - DNA, 1705 bp, Zea mays subsp. mays
  misc_feature (1)..(1705): Ceres Seq. ID no. 12409831
  misc_feature (1)..(1705): Ortholog of  Ceres SEQ ID NO 15175785 as cited in SEQ ID NO 56970
  misc_feature (1)..(1705): Ortholog of  Ceres SEQ ID NO 15178157 as cited in SEQ ID NO 57481
  misc_feature (1)..(1705): Ortholog of  Ceres SEQ ID NO 13597407 as cited in SEQ ID NO 64106
  misc_feature (1)..(1705): Ortholog of  Ceres SEQ ID NO 14303309 as cited in SEQ ID NO 67739
ggctatccaggctccagtcgtccccggattagttgtactgtacattgttcctgcgaagacactgggtcgtccgggtcaatcggcagcttgaacaagccatggcggcgcaccggccgaacgccgcggcgccgctgctcgccaagctcgacgccaccgccacgccgccggcgaagcgcaacaagtaccccttcttctgcgccgtgctcgcatccatgacctccgtgctcatgggctacaacgtcgcggtgacgagcggcgcgcagatcttcatggcggaggacctcgggatgagcgacgcgcagatcgaggtgctctcgggggtcatcaacatatactcgctcgtcggcgcgctgctggcaggctggacctccgaccgtctcggccggcgcctcaccatcgtcctcgccaacgccttcttcctcgtcggcccgctcgccatggcgcttgccggcgggtacaccttgctcatggtgggccgcttcatcgccggcgtcggcgtcgggtacgcgctcgtcatcgcgccagtctacgctgccgagatcgcgccggcgtcatcccgcgggctcctcagctcacttcctgagatttttatcaacactggggtgatgctgagttacgtgtcgaatctcgccttctcggggctgcccgtgcacctgtcgtggcgggtgatgttcgcggcgggcgtggtgcccaccgtgttcatggcggccggggtgttcaccatgccggagtcgccgcggtggctggttatgaagggccgggtcgccgaggccaaggccgtgctcgacaagacgtcggacacgcccgctgaggccgagcagcggctgctcgagatcgaggacgtcgtgatggacagcagcggcgacagcggcgcgtggaaggaggtggcgacnaaggctggcgtccagcgcgtgttggcaaccgtggtgacgctgcagttcttccagcaggcgtcaggcatcgactcggtggtgctgtacggcccgcgcgttctcgccatggctggtgtcacgtccaacagcttgctcctgagcctcaacatcctcttcggcgttgccaaggttggctccatcctcatcgccatggcgctagccgaccgcgtcgggcggcgcccactcctgctggtcagcactagcggcatgacggtggcgctgctcgtcctaggctccctgttcgcggtgtttgcgggagccaaggataacgctgcggtggctgcggtgagtgtggtggccgtcatggcgttcgtgatggccttctccgtcggcttgggccctctggcgtgggtgtacagctccgagatactgccgctccgacttcgcgggcagggtgccggggctcggcaccgccatgaaccggatcatgagcggcgtgatcaccatgaccttcatctcgctctaccagggcatcaccatggccggcgcgttctacctctacgccgccatcgccgccgcgtcgttcgtgttcgtgtacgcctgcctgccggagaccaggggccggagcctcgaggacatggaagagctcttccacaccaagtgatttcgtatgtgctgatccaaccaccatttggttcaattctcgattcagtggcaatgcagattttgccattgttggagctggttttgagcttggtcgttatcatcatgggcacatgcgtatacaattgcaagattatattgaaatcgattgattgagccggttggcgtcg

SEQ ID NO: 4825 - protein, 530 aa, Zea mays subsp. mays
  peptide (1)..(530): Ceres Seq. ID no. 12409832
  misc_feature (265)..(265): Xaa is any aa, unknown or other
MAAHRPNAAAPLLAKLDATATPPAKRNKYPFFCAVLASMTSVLMGYNVAVTSGAQIFMAEDLGMSDAQIEVLSGVINIYSLVGALLAGWTSDRLGRRLTIVLANAFFLVGPLAMALAGGYTLLMVGRFIAGVGVGYALVIAPVYAAEIAPASSRGLLSSLPEIFINTGVMLSYVSNLAFSGLPVHLSWRVMFAAGVVPTVFMAAGVFTMPESPRWLVMKGRVAEAKAVLDKTSDTPAEAEQRLLEIEDVVMDSSGDSGAWKEVAXKAGVQRVLATVVTLQFFQQASGIDSVVLYGPRVLAMAGVTSNSLLLSLNILFGVAKVGSILIAMALADRVGRRPLLLVSTSGMTVALLVLGSLFAVFAGAKDNAAVAAVSVVAVMAFVMAFSVGLGPLAWVYSSEILPLRLRGQGAGARHRHEPDHERRDHHDLHLALPGHHHGRRVLPLRRHRRRVVRVRVRLPAGDQGPEPRGHGRALPHQVISYVLIQPPFGSILDSVAMQILPLLELVLSLVVIIMGTCVYNCKIILKSID

SEQ ID NO: 4826 - protein, 492 aa, Zea mays subsp. mays
  peptide (1)..(492): Ceres Seq. ID no. 12409833
  misc_feature (227)..(227): Xaa is any aa, unknown or other
MTSVLMGYNVAVTSGAQIFMAEDLGMSDAQIEVLSGVINIYSLVGALLAGWTSDRLGRRLTIVLANAFFLVGPLAMALAGGYTLLMVGRFIAGVGVGYALVIAPVYAAEIAPASSRGLLSSLPEIFINTGVMLSYVSNLAFSGLPVHLSWRVMFAAGVVPTVFMAAGVFTMPESPRWLVMKGRVAEAKAVLDKTSDTPAEAEQRLLEIEDVVMDSSGDSGAWKEVAXKAGVQRVLATVVTLQFFQQASGIDSVVLYGPRVLAMAGVTSNSLLLSLNILFGVAKVGSILIAMALADRVGRRPLLLVSTSGMTVALLVLGSLFAVFAGAKDNAAVAAVSVVAVMAFVMAFSVGLGPLAWVYSSEILPLRLRGQGAGARHRHEPDHERRDHHDLHLALPGHHHGRRVLPLRRHRRRVVRVRVRLPAGDQGPEPRGHGRALPHQVISYVLIQPPFGSILDSVAMQILPLLELVLSLVVIIMGTCVYNCKIILKSID

SEQ ID NO: 4827 - protein, 487 aa, Zea mays subsp. mays
  peptide (1)..(487): Ceres Seq. ID no. 12409834
  misc_feature (222)..(222): Xaa is any aa, unknown or other
MGYNVAVTSGAQIFMAEDLGMSDAQIEVLSGVINIYSLVGALLAGWTSDRLGRRLTIVLANAFFLVGPLAMALAGGYTLLMVGRFIAGVGVGYALVIAPVYAAEIAPASSRGLLSSLPEIFINTGVMLSYVSNLAFSGLPVHLSWRVMFAAGVVPTVFMAAGVFTMPESPRWLVMKGRVAEAKAVLDKTSDTPAEAEQRLLEIEDVVMDSSGDSGAWKEVAXKAGVQRVLATVVTLQFFQQASGIDSVVLYGPRVLAMAGVTSNSLLLSLNILFGVAKVGSILIAMALADRVGRRPLLLVSTSGMTVALLVLGSLFAVFAGAKDNAAVAAVSVVAVMAFVMAFSVGLGPLAWVYSSEILPLRLRGQGAGARHRHEPDHERRDHHDLHLALPGHHHGRRVLPLRRHRRRVVRVRVRLPAGDQGPEPRGHGRALPHQVISYVLIQPPFGSILDSVAMQILPLLELVLSLVVIIMGTCVYNCKIILKSID

SEQ ID NO: 4828 - DNA, 752 bp, Zea mays subsp. mays
  misc_feature (1)..(752): Ceres Seq. ID no. 12414114
  misc_feature (1)..(752): Ortholog of  Ceres SEQ ID NO 13594289 as cited in SEQ ID NO 59987
aggatttcagccattcaggagggccaccgtacgcagcgagaccagccagcaggcggcgatgttcgcgacggcggtgcggtgggcggcgaagaaggggaagcccaagatggcgccgatcgagctgacggcgccgccggagcaggcgcagtccatcacgcgcgccatcttcgacgccgtccgggagcacggcccgctcaccgtctccgacgtctgggaccacgtcaaggatgtcgggcttcgaggtctggcaagcaagaggcagatgaagatcatgctgcggtggatgagggagcgccagaagctaaagctcatctgcgaccacgacggcccgcacaagcagttcctctacaccacctggtttaccaaccccaggaacgcgccgcagaggcccaatccgaagcccaatgtcaaagcggataagctccccaccttcccttccccttcgaagcaactgtgacgaggacttgtttctgtgctctctgcacttgtttctgctgcccccgacataatgttcagcatggaaacaaatgctagatttgttcaggcgaatttaggcttgttatggctatattgttctatgcaaacacctaattgttgtctatgcatatataaaccatattatttgagatgtataacctaaggttgttccctgaggattaaagccagctgtttggacggctacagctgcaattcatagaaacaaaaatattgtagaaacattataaacctgtacggattaaagtcaagcgaat

SEQ ID NO: 4829 - protein, 151 aa, Zea mays subsp. mays
  peptide (1)..(151): Ceres Seq. ID no. 12414115
GFQPFRRATVRSETSQQAAMFATAVRWAAKKGKPKMAPIELTAPPEQAQSITRAIFDAVREHGPLTVSDVWDHVKDVGLRGLASKRQMKIMLRWMRERQKLKLICDHDGPHKQFLYTTWFTNPRNAPQRPNPKPNVKADKLPTFPSPSKQL

SEQ ID NO: 4830 - protein, 139 aa, Zea mays subsp. mays
  peptide (1)..(139): Ceres Seq. ID no. 12414116
RISAIQEGHRTQRDQPAGGDVRDGGAVGGEEGEAQDGADRADGAAGAGAVHHARHLRRRPGARPAHRLRRLGPRQGCRASRSGKQEADEDHAAVDEGAPEAKAHLRPRRPAQAVPLHHLVYQPQERAAEAQSEAQCQSG

SEQ ID NO: 4831 - protein, 132 aa, Zea mays subsp. mays
  peptide (1)..(132): Ceres Seq. ID no. 12414117
MFATAVRWAAKKGKPKMAPIELTAPPEQAQSITRAIFDAVREHGPLTVSDVWDHVKDVGLRGLASKRQMKIMLRWMRERQKLKLICDHDGPHKQFLYTTWFTNPRNAPQRPNPKPNVKADKLPTFPSPSKQL

SEQ ID NO: 4832 - DNA, 1600 bp, Zea mays subsp. mays
  misc_feature (1)..(1600): Ceres Seq. ID no. 12362132
  misc_feature (1)..(1600): Ortholog of  Ceres SEQ ID NO 12623816 as cited in SEQ ID NO 61298
gaacctctccttccatctcctccccggccgattcctccagtctccagccaccttcaactgccggccgcaagtggccccgcgtctcacccctaaccccagtgaagaatctaggcgtcgtctatccagccccgtcatcatcaccatggaggagcatgggctgtggtccagcggggccagcgacaagaacaagtccatggttgagcagctgcagaggtacggggtcatcaggtcgaccaaagtcgcggaggtgatggaggccatcgacagggggttgttcgtgccacctgggggctcgccataccacgatagccccatgccgattgggtacaatgccaccatatcagcaccacacatgcatgcggcttgcctggagctactggagaagaatcttcagcctggaatgcgagctctcgatgttgggtcaggcactggatacctaactgcttgctttgcactgatggttggaccagaagggcgagcagttggtgtcgaacatatcccatagttggttgctacttctactgaaaacatcaagaaaagtgcagcagccccacatctaaatgatggatccctcagtatacacgtttctggtaaatattagcttgttttgtgctaccataaaactcagccatgctggagcagcaaatttccaacaggtccgatgttgacttaggtgtacatataacaacttagttgctgtgagctgagttatagttcagatgaatatatcattttaatagcacttatcctttttcttttattgactgaataaaggaacctgattcagctaatgaggttgtccatactgctctactagcagggttttgttatattgcttgtcataccatgtggatctcccccatttgtgaggttcttgtcctcgtatgatgaaatttgctgcagctttagagcctgtttggttcgtggctaactgtgcacactttgcttaagtttagtcgtttaaattgaagaactaaccttagacagaaaagttagacaaagtgtgacaatttatgcagagaaccaaacatacctttagtattccttagtctggcactctggccttatgtgcattcagcattgttggttgttctatatacccttaacacttgatgcaccaagagatgtttaaaatggatgcagatggcagggaaggttggccagaactggcaccctatgaagccatccatgttggagctgcagcaccgcagatcccggaggcgctgatcgagcagctgaagcccggcggcagaatggtgatccctgtcgggacagtcttccaggagctgaaggttgtggacaagaaattggatggcactgtcagcataagagacgaaacgtccgtgcgctatgtgccgctcactagcaaggacgcccagttgcacgcaagctgagtgatctatcatgtcaaaaaaaaaagttatcctcacctgacaaggtgaggcattcaatcgaatcgctacccttgtaaatgtattaatcctactgtctcagtaaatgcgctggcttggaaataatgtaaatgatggaacatcatggaacgtttgtttcccttcagctgccccggtgttcttacttactatgcaacttgtttcttcag

SEQ ID NO: 4833 - protein, 167 aa, Zea mays subsp. mays
  peptide (1)..(167): Ceres Seq. ID no. 12362133
NLSFHLLPGRFLQSPATFNCRPQVAPRLTPNPSEESRRRLSSPVIITMEEHGLWSSGASDKNKSMVEQLQRYGVIRSTKVAEVMEAIDRGLFVPPGGSPYHDSPMPIGYNATISAPHMHAACLELLEKNLQPGMRALDVGSGTGYLTACFALMVGPEGRAVGVEHIP

SEQ ID NO: 4834 - protein, 120 aa, Zea mays subsp. mays
  peptide (1)..(120): Ceres Seq. ID no. 12362134
MEEHGLWSSGASDKNKSMVEQLQRYGVIRSTKVAEVMEAIDRGLFVPPGGSPYHDSPMPIGYNATISAPHMHAACLELLEKNLQPGMRALDVGSGTGYLTACFALMVGPEGRAVGVEHIP

SEQ ID NO: 4835 - protein, 103 aa, Zea mays subsp. mays
  peptide (1)..(103): Ceres Seq. ID no. 12362135
MVEQLQRYGVIRSTKVAEVMEAIDRGLFVPPGGSPYHDSPMPIGYNATISAPHMHAACLELLEKNLQPGMRALDVGSGTGYLTACFALMVGPEGRAVGVEHIP

SEQ ID NO: 4836 - DNA, 1259 bp, Zea mays subsp. mays
  misc_feature (1)..(1259): Ceres Seq. ID no. 12358301
  misc_feature (1)..(1259): Ortholog of  Ceres SEQ ID NO 13639514 as cited in SEQ ID NO 55736
  misc_feature (1)..(1259): Ortholog of  Ceres SEQ ID NO 14312254 as cited in SEQ ID NO 59148
  misc_feature (1)..(1259): Ortholog of  Ceres SEQ ID NO 13662804 as cited in SEQ ID NO 65394
  misc_feature (1)..(1259): Ortholog of  Ceres SEQ ID NO 13656519 as cited in SEQ ID NO 69226
agtgtctcctcccttccctctagtattttacagtattttactcgctgcctgcgttccaaaacctttcgtcttttcccccgccgtctacaaagacttcacactcgcagtcgcagccgcaggctgctccggcagactccttcaccgcgaagacttctcctctcctctctcctctctcccttccactcgcgctctcctggataccgcgcgcggcgacgagatggcgatagatcacgggacccctctcgggctgaagcggagaggcgccatgggcggaggtggcgagtgctgcgacgacggcagcgagacccggcggttgccgccgtggctgaggccgctgctgtccgcgagcttcttcgtccaatgcagggtccacgccgacgcgcacaagagcgagtgcaacatgtactgcctcgactgcatgggcgacgctctctgcgcgctctgcctcgccgcgcgccaccgcgaccaccactccatccagatacggaggtcgtcgtaccacgacgtgatccgggtgtcggagatacagaaggtgctggacatcgccggcgtgcagacgtacatcatcaacagcgcgcgcgtggtgttcctgaacgagcggccgcagccccgcccgggcaagggcgtcaccaacacctacgaggtctgcgagcgcagcctcctcgactgcttccgcttctgctcccttgggtgcaagatagtgggcacggcccgtggctaccgtcctgggaagaagaagcacggcggcggcggcggtaacaagaagagggcggcgccggcgccggcgcttaaggacgtgcggtctgactcggaggactcgtgcaccagcaccagcggcgccagcagcgacaagagcagcgtcgtgcagagctcccctccgccgccgacctctgccagccaccgcccccccgggaacaagcgccggaagggcgtcccgcaccggtcgcccttgggcagcctcatcgtcgagctctaggactcttcgtcagcgccaaggcaaggcaaggcaacgcactctgtactgtacatgacataccccccgaagagaagggaataacaaacagtaagcctctggacgtggagggcgaagggcgacagcggtaagccgtaagatcggacaatccttagttttgcttcttctcaggttttgttttgcttttacagttactaccactctagcagtggtaccatcagtaagataaccgcgactaagttttgcagccttgtacattgtaatattattattactatagaccagg

SEQ ID NO: 4837 - protein, 324 aa, Zea mays subsp. mays
  peptide (1)..(324): Ceres Seq. ID no. 12358302
VSPPFPLVFYSILLAACVPKPFVFSPAVYKDFTLAVAAAGCSGRLLHREDFSSPLSSLPSTRALLDTARGDEMAIDHGTPLGLKRRGAMGGGGECCDDGSETRRLPPWLRPLLSASFFVQCRVHADAHKSECNMYCLDCMGDALCALCLAARHRDHHSIQIRRSSYHDVIRVSEIQKVLDIAGVQTYIINSARVVFLNERPQPRPGKGVTNTYEVCERSLLDCFRFCSLGCKIVGTARGYRPGKKKHGGGGGNKKRAAPAPALKDVRSDSEDSCTSTSGASSDKSSVVQSSPPPPTSASHRPPGNKRRKGVPHRSPLGSLIVEL

SEQ ID NO: 4838 - protein, 252 aa, Zea mays subsp. mays
  peptide (1)..(252): Ceres Seq. ID no. 12358303
SVSSLPSSILQYFTRCLRSKTFRLFPRRLQRLHTRSRSRRLLRQTPSPRRLLLSSLLSPFHSRSPGYRARRRDGDRSRDPSRAEAERRHGRRWRVLRRRQRDPAVAAVAEAAAVRELLRPMQGPRRRAQERVQHVLPRLHGRRSLRALPRRAPPRPPLHPDTEVVVPRRDPGVGDTEGAGHRRRADVHHQQRARGVPERAAAAPPGQGRHQHLRGLRAQPPRLLPLLLPWVQDSGHGPWLPSWEEEARRRRR

SEQ ID NO: 4839 - protein, 252 aa, Zea mays subsp. mays
  peptide (1)..(252): Ceres Seq. ID no. 12358304
MAIDHGTPLGLKRRGAMGGGGECCDDGSETRRLPPWLRPLLSASFFVQCRVHADAHKSECNMYCLDCMGDALCALCLAARHRDHHSIQIRRSSYHDVIRVSEIQKVLDIAGVQTYIINSARVVFLNERPQPRPGKGVTNTYEVCERSLLDCFRFCSLGCKIVGTARGYRPGKKKHGGGGGNKKRAAPAPALKDVRSDSEDSCTSTSGASSDKSSVVQSSPPPPTSASHRPPGNKRRKGVPHRSPLGSLIVEL

SEQ ID NO: 4840 - DNA, 1204 bp, Zea mays subsp. mays
  misc_feature (1)..(1204): Ceres Seq. ID no. 12409816
  misc_feature (1)..(1204): Ortholog of  Ceres SEQ ID NO 15172803 as cited in SEQ ID NO 52102
  misc_feature (1)..(1204): Ortholog of  Ceres SEQ ID NO 12593499 as cited in SEQ ID NO 68777
agtcgccccccagtccatcaccacttctccattcctctttcccagtgcccccagtccatcaccacatccgttcaaatgggccgcaaccgcaagggccgcaaggctagggtttcgcacgacgccgacgccgacgccgacgccgatggcagcgaggatgagagggccaccactgcgggcaggagcctctacgagattctaggagttgagaagaccgcttctcaacaagaaataaagaaggcgtatcacaaattggctctgcgcctccacccagataagaatcctggggatgaggaagccaaagagaagtttcagcagctgcagaaggttatatccattcttggagatgtagagaaaagagctttatatgatgagactggcatcactgatgatgatgcactggtgggagaagctgcaaacaatcttcaggagtacttcagaacaatgtacaagaaagtcacggaggctgacattgaagaatttgaagctaaatatagagggtcagattctgagaaaacggacttgaaggaactctacacaaaatataagggcaacatgaacaggctttctgcgcaatgatttgctcagaaccaaagcttgattctcaccgcttcaaggatataattgacgaggcgattggtgaaggtgagctgaagtcaactaaggtgtatgagaaatgggctaaaaagatctcagggatggagccaccaacaaatccgctagagaggagagtgaagaagaggaagaacagtgaggagaatgatctgatactggctatctcacagcgcagggctgagcggaaaaaaacagttcaactccatcctctcgaacatcatgtccaagtgtgactccaaggcgagcagctcggagcccacggaagaagagtttgagcaggcgcaacagaggctggagagcagaagggccaagaggcgcaagtgatgctgctgccagccttcttgccctatgctgaacattgtctgaagcttttggtgtgacctgattttaccagcatgcaagtgatgtttctaagacccagctcagtttgagcgtgtcagggtggggtgtgtgtcatatctcttgtcctctcacgatacactatgtcgtatggttatcggcttatcaccttgccgagagggaagctctatctgaacttttaattccgtagcatttggcaagtactagtagattgcaatgtaatgtttattcc

SEQ ID NO: 4841 - protein, 191 aa, Zea mays subsp. mays
  peptide (1)..(191): Ceres Seq. ID no. 12409817
SRPPVHHHFSIPLSQCPQSITTSVQMGRNRKGRKARVSHDADADADADGSEDERATTAGRSLYEILGVEKTASQQEIKKAYHKLALRLHPDKNPGDEEAKEKFQQLQKVISILGDVEKRALYDETGITDDDALVGEAANNLQEYFRTMYKKVTEADIEEFEAKYRGSDSEKTDLKELYTKYKGNMNRLSAQ

SEQ ID NO: 4842 - protein, 166 aa, Zea mays subsp. mays
  peptide (1)..(166): Ceres Seq. ID no. 12409818
MGRNRKGRKARVSHDADADADADGSEDERATTAGRSLYEILGVEKTASQQEIKKAYHKLALRLHPDKNPGDEEAKEKFQQLQKVISILGDVEKRALYDETGITDDDALVGEAANNLQEYFRTMYKKVTEADIEEFEAKYRGSDSEKTDLKELYTKYKGNMNRLSAQ

SEQ ID NO: 4843 - DNA, 1636 bp, Zea mays subsp. mays
  misc_feature (1)..(1636): Ceres Seq. ID no. 12376468
  misc_feature (1)..(1636): Ortholog of  Ceres SEQ ID NO 15169045 as cited in SEQ ID NO 58372
  misc_feature (1)..(1636): Ortholog of  Ceres SEQ ID NO 13597361 as cited in SEQ ID NO 63638
  misc_feature (1)..(1636): Ortholog of  Ceres SEQ ID NO 13595945 as cited in SEQ ID NO 68157
gctagctgctaccagccgacgacgacggccgcgcgcgtttgttgtgtgtgtgtgtgtgtgtgtgtgtgtgtgtgtgtgtgtgtgttataagcgcgagggtttctggcgaggttgctaaagcgttagcgggggcgcccatggagcttgacgaggagacgttcttggacgagctcatgtcgctgcggcgggaggcgncggcggcggcgtccgggcagtggcaagcagctgccgcctacacgggcggcggcggagacgaaggcatgatgatgggcgacctcctcttctacggcggggcgacggaggccgccgcgactgccaccagcggcggcggcatggaccagctctcgccgttccaccagcacgcgccgctgcaggtgcaggtgcaggcgcccgcggcggccccgcaccctcactcgcacgaggagttcaacttcgactgcctcagcgaggtttgcaacccgtacaggggggccggcgtcgccgtaataacgggggccgaggccgccgcggtgcctggaagggcgctcgccgctctccacgacgccatggtggaggacgagacgagcggtcacctgccgcaggggcagcaacatggagccggcgggtccccgacgttcgtgttcggcggtgccgccggcgagagctccgagcagatgcccgtcgtcgtcaggggtgccggcggcggcccccaccacaggagcaaggtccacggcggcgcgccgtccaagaatctcatggccgagaggcggcggcggaagcgcctcaacgaccgtctctccatgctccgctccattgttcccaagatcagcaagatggacaggacatccattctcggggacaccattgactacgtgaaggagctgacggagcggatcaaagtcctggaagaggagatcggcgcctctgcggaggacctggacctcctcaacaccttgaaagcttcttcgtccagcggcagcaacgagatgatggtgaggaactccacaaagttcgacgtcgagaggcggggcaacgggagcacgaggatcgagatctgctgcgccacaaaccccgaggtgctgctgtccacggtaagcgcgctggaggtgctgggcctggagatcgagcagtgcgtggtgagctgcttcagcgactttggcatgcaggcctcttgctcacaagaggaggaggacggtaataataagaggcaagttctaagcaccgacgagataaaacaggccttgtttcggagtgctggctacggagggaggtgcctctaatatagctagcttagctaccatgcaagcagctccgatccaaacccaggccatcgatcccggcaaatactgtataaagctagctagtaagttgcatgcatctatgattgttattgctgtgtgtttgatgctttagttttcatcaatatatatatcccgtacgttaattggttttctccatgagttcatagcgctaataagtgtgcgtagtagtagtagcagcaagaggtatgtatgtatatatatctgaatcccagcaccaaattgaagatttgttgctcaggtattgtaagttgatcatttcttacggtctgtatcattgggtcatggtatgtatgcggattgatatattccaataataagcagattgttcctttcgc

SEQ ID NO: 4844 - protein, 373 aa, Zea mays subsp. mays
  peptide (1)..(373): Ceres Seq. ID no. 12376469
  misc_feature (20)..(20): Xaa is any aa, unknown or other
MELDEETFLDELMSLRREAXAAASGQWQAAAAYTGGGGDEGMMMGDLLFYGGATEAAATATSGGGMDQLSPFHQHAPLQVQVQAPAAAPHPHSHEEFNFDCLSEVCNPYRGAGVAVITGAEAAAVPGRALAALHDAMVEDETSGHLPQGQQHGAGGSPTFVFGGAAGESSEQMPVVVRGAGGGPHHRSKVHGGAPSKNLMAERRRRKRLNDRLSMLRSIVPKISKMDRTSILGDTIDYVKELTERIKVLEEEIGASAEDLDLLNTLKASSSSGSNEMMVRNSTKFDVERRGNGSTRIEICCATNPEVLLSTVSALEVLGLEIEQCVVSCFSDFGMQASCSQEEEDGNNKRQVLSTDEIKQALFRSAGYGGRCL

SEQ ID NO: 4845 - protein, 361 aa, Zea mays subsp. mays
  peptide (1)..(361): Ceres Seq. ID no. 12376470
  misc_feature (8)..(8): Xaa is any aa, unknown or other
MSLRREAXAAASGQWQAAAAYTGGGGDEGMMMGDLLFYGGATEAAATATSGGGMDQLSPFHQHAPLQVQVQAPAAAPHPHSHEEFNFDCLSEVCNPYRGAGVAVITGAEAAAVPGRALAALHDAMVEDETSGHLPQGQQHGAGGSPTFVFGGAAGESSEQMPVVVRGAGGGPHHRSKVHGGAPSKNLMAERRRRKRLNDRLSMLRSIVPKISKMDRTSILGDTIDYVKELTERIKVLEEEIGASAEDLDLLNTLKASSSSGSNEMMVRNSTKFDVERRGNGSTRIEICCATNPEVLLSTVSALEVLGLEIEQCVVSCFSDFGMQASCSQEEEDGNNKRQVLSTDEIKQALFRSAGYGGRCL

SEQ ID NO: 4846 - protein, 332 aa, Zea mays subsp. mays
  peptide (1)..(332): Ceres Seq. ID no. 12376471
MMMGDLLFYGGATEAAATATSGGGMDQLSPFHQHAPLQVQVQAPAAAPHPHSHEEFNFDCLSEVCNPYRGAGVAVITGAEAAAVPGRALAALHDAMVEDETSGHLPQGQQHGAGGSPTFVFGGAAGESSEQMPVVVRGAGGGPHHRSKVHGGAPSKNLMAERRRRKRLNDRLSMLRSIVPKISKMDRTSILGDTIDYVKELTERIKVLEEEIGASAEDLDLLNTLKASSSSGSNEMMVRNSTKFDVERRGNGSTRIEICCATNPEVLLSTVSALEVLGLEIEQCVVSCFSDFGMQASCSQEEEDGNNKRQVLSTDEIKQALFRSAGYGGRCL

SEQ ID NO: 4847 - DNA, 1433 bp, Zea mays subsp. mays
  misc_feature (1)..(1433): Ceres Seq. ID no. 13492071
  misc_feature (1)..(1433): Ortholog of  Ceres SEQ ID NO 12578315 as cited in SEQ ID NO 62451
  misc_feature (1)..(1433): Ortholog of  Ceres SEQ ID NO 13597295 as cited in SEQ ID NO 63743
  misc_feature (1)..(1433): Ortholog of  Ceres SEQ ID NO 12617090 as cited in SEQ ID NO 64005
  misc_feature (1)..(1433): Ortholog of  Ceres SEQ ID NO 13584577 as cited in SEQ ID NO 65298
aagaaaaaaaaacgttttctttccttcgtttatgtatgcagggcctgcggttctatttaaagcttgttatcgcaggtagtagaggcacatcccagttggaagggcagccaataaggtaaggggtgacgaaaatggctccaacgaccgccaccaaggacgacagtggctacggcgacgagcgccggcgcgagctgcaggcgttcgacgacacgaagctgggggtgaaaggtctggtggactccggcgtcaagtccatcccgtccatcttccaccacccgccggaagccctgagcgacataatttctccggcgcctctgccgtcgtcgccaccctccggcgccgccatcccggtggtggacctctcggtgacgcggcgcgaggacctagtcgagcaggtgaggcacgcggccgggacggtgggcttcttctggctggtgaaccacggcgtggcggaggagctgatgggcggcatgctccgcggggtgcgccagttcaacgagggccccgtggaggcgaagcaggcgctctactccagggacctggctcgcaacctgcgcttcgcctccaacttcgacctcttcaaggccgctgcggccgactggcgcgacacgctcttctgcgaggtggctccgaacccgccgccgcgggaggagctgccggagccactgaggaacgtgatgctggagtacggcgcggcggtgacgaagctggcgcggttcgtgttcgagctgctgtccgagtccctcggcatgcccagcgaccacctgtacgagatggagtgcatgcagaacctgaacgtggtgtgccagtactacccgccgtgcccggagccgcaccgcaccgtgggcgtcaagaggcacacggaccctggcttcttcaccatcctcctgcaggacggcatgggcggcctgcaggtgcgcctcggcaacaacgggcagagcggcggctgctgggtggacatcgctccccggcctggggcgctcatggtcaacatcggtgatcttctgcagctcgtgaccaatgaccggttcaggagcgtggagcaccgggtgccagccaacaagagcagcgacacggcgagggtctccgtggcgtccttcttcaacacggacgtgaggaggtccgagaggatgtacggccccattccagaccccagcaagcccccgctgtacaggagcgtcagggcccgagacttcatcgcaaagttcaacaccataggactcgatggccgcgcgctcgaccacttcaggctctagctacctggctacgtttcagattcgtcctttcatttgctttggtctctaattaataattccaaataataagcccgcggatggacctctgtctgtctgtctgtaatttagtttccaagtttagtttgttgtggtaattcctgtatcaattatgtcataaataaaagctagggaaccttg

SEQ ID NO: 4848 - protein, 374 aa, Zea mays subsp. mays
  peptide (1)..(374): Ceres Seq. ID no. 13492072
MAPTTATKDDSGYGDERRRELQAFDDTKLGVKGLVDSGVKSIPSIFHHPPEALSDIISPAPLPSSPPSGAAIPVVDLSVTRREDLVEQVRHAAGTVGFFWLVNHGVAEELMGGMLRGVRQFNEGPVEAKQALYSRDLARNLRFASNFDLFKAAAADWRDTLFCEVAPNPPPREELPEPLRNVMLEYGAAVTKLARFVFELLSESLGMPSDHLYEMECMQNLNVVCQYYPPCPEPHRTVGVKRHTDPGFFTILLQDGMGGLQVRLGNNGQSGGCWVDIAPRPGALMVNIGDLLQLVTNDRFRSVEHRVPANKSSDTARVSVASFFNTDVRRSERMYGPIPDPSKPPLYRSVRARDFIAKFNTIGLDGRALDHFRL

SEQ ID NO: 4849 - protein, 264 aa, Zea mays subsp. mays
  peptide (1)..(264): Ceres Seq. ID no. 13492073
MGGMLRGVRQFNEGPVEAKQALYSRDLARNLRFASNFDLFKAAAADWRDTLFCEVAPNPPPREELPEPLRNVMLEYGAAVTKLARFVFELLSESLGMPSDHLYEMECMQNLNVVCQYYPPCPEPHRTVGVKRHTDPGFFTILLQDGMGGLQVRLGNNGQSGGCWVDIAPRPGALMVNIGDLLQLVTNDRFRSVEHRVPANKSSDTARVSVASFFNTDVRRSERMYGPIPDPSKPPLYRSVRARDFIAKFNTIGLDGRALDHFRL

SEQ ID NO: 4850 - protein, 261 aa, Zea mays subsp. mays
  peptide (1)..(261): Ceres Seq. ID no. 13492074
MLRGVRQFNEGPVEAKQALYSRDLARNLRFASNFDLFKAAAADWRDTLFCEVAPNPPPREELPEPLRNVMLEYGAAVTKLARFVFELLSESLGMPSDHLYEMECMQNLNVVCQYYPPCPEPHRTVGVKRHTDPGFFTILLQDGMGGLQVRLGNNGQSGGCWVDIAPRPGALMVNIGDLLQLVTNDRFRSVEHRVPANKSSDTARVSVASFFNTDVRRSERMYGPIPDPSKPPLYRSVRARDFIAKFNTIGLDGRALDHFRL

SEQ ID NO: 4851 - DNA, 1309 bp, Zea mays subsp. mays
  misc_feature (1)..(1309): Ceres Seq. ID no. 12352316
  misc_feature (1)..(1309): Ortholog of  Ceres SEQ ID NO 14303263 as cited in SEQ ID NO 1224
  misc_feature (1)..(1309): Ortholog of  Ceres SEQ ID NO 13593955 as cited in SEQ ID NO 54278
  misc_feature (1)..(1309): Ortholog of  Ceres SEQ ID NO 14314092 as cited in SEQ ID NO 62788
  misc_feature (1)..(1309): Ortholog of  Ceres SEQ ID NO 13597380 as cited in SEQ ID NO 64054
  misc_feature (1)..(1309): Ortholog of  Ceres SEQ ID NO 12625474 as cited in SEQ ID NO 64169
cgaaaaatataataagcagagagggtatgcgctggtggtggtggcgactggcgacggccgcgatcgaccatggctacgacggcgccgctcgttctcctcttccccctcgtgctgctgctgcaggcgaggtggtcgtcgcagcagcagcagcagcaggctgtgacggcggtgatcgtgttcggcgactccatcgtggacccggggaacaacaatggtttgcacacgctgatcaaggccaaccatccgccctacggcatggacatgttgaaccacgaggccaccggacgctactccaacggcctcataccaacagacctcattgcccagcagctcggcgtcaagcagctgcttccgccctacctgggcgtggacctgagccccgatgaccttctcaccggcgtcagcttcgcgtccggcgccaccggattcgacccgctcacgcccgtcgtggtcagcgtcatctcgctggaccagcagctcgcctacttcgacgggtaccgggggaggctggtggacatcgccggcgaggccgagacggcgcggatcatcgacggcgcgctgttcctggtgtgcgccggcaccgacgacgtggccaacacctacttcaccacgccgttccgcagcgccgagtacgacatcccgggctacgtggacctgctggtgggccatgccgaggagttcctccgcgagctggtcgtcagctccaggggcgccaggaggatcggcttcgtggggatgccgccggtaggctgcgtgccgtcgcagcgcacgctcgggggcggcctcgccaccagggcctgcgagcccaagcgaaacgaggcggcgctgctgtacaacgccagggcccaggagatgatcgccgccttcaacaacaacaacgccgacgccgatgtgctggtcgtgttcctcgacatctaccgcatcctggacgacctcatggagcgcggggaggagtacggcttctccgagaccaccaggggatgctgcggcaccggcaccatcgaggtcacggggctatgtgactcccgcttcgtctccgtctgcgacgacgtctcgcagcacgtcttcttcgacagctaccacccaacagagagagcctacaggatcatcgtcaacgacatctttctaaactacgcacacgtgctcttctcatgactatatatcacgtactctctgtctctgtctctgtctctgtctctgtctctgtctctggtagctggcccaatcgacccaacagcatccaaatataattaaatgagctagcccatcctccaaataccgcagcccattgttacactactactttcct

SEQ ID NO: 4852 - protein, 361 aa, Zea mays subsp. mays
  peptide (1)..(361): Ceres Seq. ID no. 12352317
MATTAPLVLLFPLVLLLQARWSSQQQQQQAVTAVIVFGDSIVDPGNNNGLHTLIKANHPPYGMDMLNHEATGRYSNGLIPTDLIAQQLGVKQLLPPYLGVDLSPDDLLTGVSFASGATGFDPLTPVVVSVISLDQQLAYFDGYRGRLVDIAGEAETARIIDGALFLVCAGTDDVANTYFTTPFRSAEYDIPGYVDLLVGHAEEFLRELVVSSRGARRIGFVGMPPVGCVPSQRTLGGGLATRACEPKRNEAALLYNARAQEMIAAFNNNNADADVLVVFLDIYRILDDLMERGEEYGFSETTRGCCGTGTIEVTGLCDSRFVSVCDDVSQHVFFDSYHPTERAYRIIVNDIFLNYAHVLFS

SEQ ID NO: 4853 - protein, 299 aa, Zea mays subsp. mays
  peptide (1)..(299): Ceres Seq. ID no. 12352318
MDMLNHEATGRYSNGLIPTDLIAQQLGVKQLLPPYLGVDLSPDDLLTGVSFASGATGFDPLTPVVVSVISLDQQLAYFDGYRGRLVDIAGEAETARIIDGALFLVCAGTDDVANTYFTTPFRSAEYDIPGYVDLLVGHAEEFLRELVVSSRGARRIGFVGMPPVGCVPSQRTLGGGLATRACEPKRNEAALLYNARAQEMIAAFNNNNADADVLVVFLDIYRILDDLMERGEEYGFSETTRGCCGTGTIEVTGLCDSRFVSVCDDVSQHVFFDSYHPTERAYRIIVNDIFLNYAHVLFS

SEQ ID NO: 4854 - protein, 297 aa, Zea mays subsp. mays
  peptide (1)..(297): Ceres Seq. ID no. 12352319
MLNHEATGRYSNGLIPTDLIAQQLGVKQLLPPYLGVDLSPDDLLTGVSFASGATGFDPLTPVVVSVISLDQQLAYFDGYRGRLVDIAGEAETARIIDGALFLVCAGTDDVANTYFTTPFRSAEYDIPGYVDLLVGHAEEFLRELVVSSRGARRIGFVGMPPVGCVPSQRTLGGGLATRACEPKRNEAALLYNARAQEMIAAFNNNNADADVLVVFLDIYRILDDLMERGEEYGFSETTRGCCGTGTIEVTGLCDSRFVSVCDDVSQHVFFDSYHPTERAYRIIVNDIFLNYAHVLFS

SEQ ID NO: 4855 - DNA, 1301 bp, Zea mays subsp. mays
  misc_feature (1)..(1301): Ceres Seq. ID no. 12435108
  misc_feature (1)..(1301): Ortholog of  Ceres SEQ ID NO 14305750 as cited in SEQ ID NO 52458
  misc_feature (1)..(1301): Ortholog of  Ceres SEQ ID NO 14314252 as cited in SEQ ID NO 57492
  misc_feature (1)..(1301): Ortholog of  Ceres SEQ ID NO 12608276 as cited in SEQ ID NO 57871
  misc_feature (1)..(1301): Ortholog of  Ceres SEQ ID NO 13598492 as cited in SEQ ID NO 63882
  misc_feature (1)..(1301): Ortholog of  Ceres SEQ ID NO 13657914 as cited in SEQ ID NO 66230
  misc_feature (1)..(1301): Ortholog of  Ceres SEQ ID NO 13595877 as cited in SEQ ID NO 67702
gcacgagaccattacctagaacatcctaatcgaaaaactgcgcgtgtgcgccactacaccaaccgtttggtccgccgttcggggattccttccgcactactacatagtagcacccgtgtggccgtgtccgagctacccacgcccccaacgccaagaacgtcgacgggcgcgacggcatggcggcggcggacccggacaccgaggtgcaggcagagttcccacccctcgtccgccagtacaaaagcggccgcgtcgagcggttcttcaacctggccccgctcccggccggcaccgacccggccacgggcgtcgtgtccaaggacgtcgtcgtcgacccggccaccggcctctgggcgcgcctcttcctccccgccggcagccacgggaagaagctccccgtcgtcgtctactaccatggcggcgcctacgtgatcggctcggcggccgacccgatgacgcacggctacctcaacgcgctcgtcgccaaggccggcgtcctcgcggtcgcgctcgagtaccgcctcgcgccggagcacccgctcccggccgcctacgaggactcatgggagggactcaagtgggtggccacccacgcctccgcctccgccgccgcgggaggaggaccggccgccgagccgtggctaaccgagcacggcgacttctcccgcgtgttcctggccggggccagcgcgggggccaccatcgctcacttcgtagcagtccgtgccggtgagcagcacaagagcggcggcctcgggatgcggatcagggggctgctgatagtgcacccctacttcagcggcgcggcggacatcggcgacgaggggacgacggggaaggcgcgcaaggcgcgggccgacgcgttctggcggttcctgtgccctggcacccccgggctcgacgaccctctctccaacccgttctcggaggcctccggcgggagcgcggcgcgcgtcgccgccgagcgcgtgctcgtctgcgtcgccgagaaggacgacctcagggacaggggcgtctggtactacgagagcctcaaggccagcggctaccctggcgaggtggagctgctcgagtccatgggcgagggccacgtcttctactgcatgaacccgcgctgcgacagggcgcgggagatggaggagcgcgtcctcggcttcctgcgcaagtgagcgagcgacggagcgcgcgccttgctncgcgattgagatggaataatttcaccgtttccagatgtggaggcgtttgagcatgaggccatgagggtcttatttgtttgcttaagatcaattgattgaagtttc

SEQ ID NO: 4856 - protein, 330 aa, Zea mays subsp. mays
  peptide (1)..(330): Ceres Seq. ID no. 12435109
MAAADPDTEVQAEFPPLVRQYKSGRVERFFNLAPLPAGTDPATGVVSKDVVVDPATGLWARLFLPAGSHGKKLPVVVYYHGGAYVIGSAADPMTHGYLNALVAKAGVLAVALEYRLAPEHPLPAAYEDSWEGLKWVATHASASAAAGGGPAAEPWLTEHGDFSRVFLAGASAGATIAHFVAVRAGEQHKSGGLGMRIRGLLIVHPYFSGAADIGDEGTTGKARKARADAFWRFLCPGTPGLDDPLSNPFSEASGGSAARVAAERVLVCVAEKDDLRDRGVWYYESLKASGYPGEVELLESMGEGHVFYCMNPRCDRAREMEERVLGFLRK

SEQ ID NO: 4857 - protein, 238 aa, Zea mays subsp. mays
  peptide (1)..(238): Ceres Seq. ID no. 12435110
MTHGYLNALVAKAGVLAVALEYRLAPEHPLPAAYEDSWEGLKWVATHASASAAAGGGPAAEPWLTEHGDFSRVFLAGASAGATIAHFVAVRAGEQHKSGGLGMRIRGLLIVHPYFSGAADIGDEGTTGKARKARADAFWRFLCPGTPGLDDPLSNPFSEASGGSAARVAAERVLVCVAEKDDLRDRGVWYYESLKASGYPGEVELLESMGEGHVFYCMNPRCDRAREMEERVLGFLRK

SEQ ID NO: 4858 - DNA, 1229 bp, Zea mays subsp. mays
  misc_feature (1)..(1229): Ceres Seq. ID no. 12434883
  misc_feature (1)..(1229): Ortholog of  Ceres SEQ ID NO 13585143 as cited in SEQ ID NO 67757
atacccaaacccaccgaccgccgcctaggcttccacctctcccgctcaaactccggccactgaggtcgaacccgagcacgcgccgcagcggcacgatggtgaacgacgccgcggcgatggccgtcgtgagggcggcgcgcccagccctccgtggcgcccacgatggcgtcgccttcgccgcccacgccgccttcctcgccgatgggtactcgctctgcgccgtcggccctgccgcgctcgccgacccctcgaccttaggtgatgaggaggtggggattgatggttggaacatcatggaggattgttacgcctttttgtatagcaaggaggagaagggcaagaagaaaagggtactagtgaaatgtctggtgatcggtgaagtacttgcaattgatgtcttggatcttgaggcacaagataaggcgccttataatatccagattaatgtgaaagacttctttgttgaagagcagccaaagaattatggggatatgtacaagaattttacaagtctcattgatactgtgaactcaaatgtgttgtgcaaattgcatggagacggttctggtgctgaggctgctaagagcactgccgtcgctgctgccaagaactctgatgggagaagttcaccaatacagagctctggagatccaggtcctagaactgctgacccttccggcctaatttatcctccaatagcaccgattggttctgatgatctctaccctggacctggtgcaggcttctaccctcacagtggcattgggagcggtggcagcatgcatgttggtcctaatgatccgcgcttctttccttctaatcccttctctgccccatttggtgggcttgggagtgttccaccaggtggtcgctatgatccaattggcccacctgacgtcccagggtttgagccatctagctttgttaggcgtccaaggcggcctccaggcgggagcacccacccagacctcgagttcttccagcaaggcccagacttctgagagtcgcgcatcgcgcagaggccggccggagcctcgccctaccctcacgaaataacttcaaaatgctgagccctcgagctagatatcccgcttgttgtgattgcaactgctgtatcgagtatagtcctagtgcgctttggctgtaaagatggatgtgaacatcgtcctagtgtatttactcttaattccaaaccatcgtctgtcatagcctaatatactcttttgtgt

SEQ ID NO: 4859 - protein, 332 aa, Zea mays subsp. mays
  peptide (1)..(332): Ceres Seq. ID no. 12434884
TQTHRPPPRLPPLPLKLRPLRSNPSTRRSGTMVNDAAAMAVVRAARPALRGAHDGVAFAAHAAFLADGYSLCAVGPAALADPSTLGDEEVGIDGWNIMEDCYAFLYSKEEKGKKKRVLVKCLVIGEVLAIDVLDLEAQDKAPYNIQINVKDFFVEEQPKNYGDMYKNFTSLIDTVNSNVLCKLHGDGSGAEAAKSTAVAAAKNSDGRSSPIQSSGDPGPRTADPSGLIYPPIAPIGSDDLYPGPGAGFYPHSGIGSGGSMHVGPNDPRFFPSNPFSAPFGGLGSVPPGGRYDPIGPPDVPGFEPSSFVRRPRRPPGGSTHPDLEFFQQGPDF

SEQ ID NO: 4860 - protein, 301 aa, Zea mays subsp. mays
  peptide (1)..(301): Ceres Seq. ID no. 12434885
MVNDAAAMAVVRAARPALRGAHDGVAFAAHAAFLADGYSLCAVGPAALADPSTLGDEEVGIDGWNIMEDCYAFLYSKEEKGKKKRVLVKCLVIGEVLAIDVLDLEAQDKAPYNIQINVKDFFVEEQPKNYGDMYKNFTSLIDTVNSNVLCKLHGDGSGAEAAKSTAVAAAKNSDGRSSPIQSSGDPGPRTADPSGLIYPPIAPIGSDDLYPGPGAGFYPHSGIGSGGSMHVGPNDPRFFPSNPFSAPFGGLGSVPPGGRYDPIGPPDVPGFEPSSFVRRPRRPPGGSTHPDLEFFQQGPDF

SEQ ID NO: 4861 - protein, 294 aa, Zea mays subsp. mays
  peptide (1)..(294): Ceres Seq. ID no. 12434886
MAVVRAARPALRGAHDGVAFAAHAAFLADGYSLCAVGPAALADPSTLGDEEVGIDGWNIMEDCYAFLYSKEEKGKKKRVLVKCLVIGEVLAIDVLDLEAQDKAPYNIQINVKDFFVEEQPKNYGDMYKNFTSLIDTVNSNVLCKLHGDGSGAEAAKSTAVAAAKNSDGRSSPIQSSGDPGPRTADPSGLIYPPIAPIGSDDLYPGPGAGFYPHSGIGSGGSMHVGPNDPRFFPSNPFSAPFGGLGSVPPGGRYDPIGPPDVPGFEPSSFVRRPRRPPGGSTHPDLEFFQQGPDF

SEQ ID NO: 4862 - DNA, 1535 bp, Zea mays subsp. mays
  misc_feature (1)..(1535): Ceres Seq. ID no. 12347934
  misc_feature (1)..(1535): Ortholog of  Ceres SEQ ID NO 13592859 as cited in SEQ ID NO 20479
agctcctctgttccctgcccccgggctggcttcctccccttcctggtctgcttctcctcaccgttgacgaatcacgaggcctgcctgcctgcctgctttctctgtgctccgttcgaatggacgggcagaggagtcgatgagcggccgtgggctttgatttcccctggggtctgctcttcttggtcagcaaggagacctgaacacgaattgatctctgcgccgctgcaaccccggcccgtcgaagccatggggtccggggactggttcaagacgatcatcagcaagaaaaaatcgaagcggggaaagtcaaagcacgcaaagctctctggtcaagtaacaaatggaggcaaccagacaaatcagaagttagatggcccttcttccagtagtgaggaccacgaagacaatgcagcactagaggaatgggctgctactcgcattcagaatgcgtttcggaaatacaaggcaaggaagaccctgcgttgtctcaagggagtcaaaagattgcgcgttgtcggtcaggcgaatccggttaagaagcagactgctgccacgctgagttacatacagtcttggaacaagttgcagtcggagataagaaaccgacgtgctttcatggtcaccgaaggacgcaacaggaagaagaagcaggagaaccaaatgaaacttgaggcaaaactgcataatttgcagattgaatggaatggaggctcggatactatggatgaaattcttgctaggatacaacaacgggaagaagcagcagtaaagcgtgagcgagccatggcgtacgcgttcaaccatcagtggagagcaaggtctgccacaagtctaggaaacttcagctatgaagtcggtaagggtggctggggctggagctggatggaccgctggatcgcagcacgaccatgggagccgcgatccatggtccaccctgagaacccgaagaaagcacaggcaaagaaagagaacaccacaaacccatcagctctcaagctgcaaggctccattaccctaagcaacaatatcaatgaccggaaaaccctgaaaaagaagccattgccttcagcttctcctgctgatcagaagaagccatcaccgtcgccttcttccgatcagaagaaaccagtaccgaaggagcagagagcaaaggcagctggcactcctccaaaaccaaaggccaaagatatgaaggggagtcaagagaaaaagccacaaccacaacagaaagtgcctcctccggttagcgcatgaagcttgctgctgcgaaaatggttactgatcatgtaagatacatcttgtgaagttctctcatgttcaacactcatgcttgtatgttttcgttttttgttttatggtgttatgggacgaggggtgcccaatctagaatgtgcttggtttgagcgattgcgcacgcacaacatatctgatgagaattgtttttggttaggattaggatctctgttattcattgttgtggtgttgtaataagacttgccttgcctggctatatgcttgaatggaaggtcttgttg

SEQ ID NO: 4863 - protein, 417 aa, Zea mays subsp. mays
  peptide (1)..(417): Ceres Seq. ID no. 12347935
SSSVPCPRAGFLPFLVCFSSPLTNHEACLPACFLCAPFEWTGRGVDERPWALISPGVCSSWSARRPEHELISAPLQPRPVEAMGSGDWFKTIISKKKSKRGKSKHAKLSGQVTNGGNQTNQKLDGPSSSSEDHEDNAALEEWAATRIQNAFRKYKARKTLRCLKGVKRLRVVGQANPVKKQTAATLSYIQSWNKLQSEIRNRRAFMVTEGRNRKKKQENQMKLEAKLHNLQIEWNGGSDTMDEILARIQQREEAAVKRERAMAYAFNHQWRARSATSLGNFSYEVGKGGWGWSWMDRWIAARPWEPRSMVHPENPKKAQAKKENTTNPSALKLQGSITLSNNINDRKTLKKKPLPSASPADQKKPSPSPSSDQKKPVPKEQRAKAAGTPPKPKAKDMKGSQEKKPQPQQKVPPPVSA

SEQ ID NO: 4864 - protein, 335 aa, Zea mays subsp. mays
  peptide (1)..(335): Ceres Seq. ID no. 12347936
MGSGDWFKTIISKKKSKRGKSKHAKLSGQVTNGGNQTNQKLDGPSSSSEDHEDNAALEEWAATRIQNAFRKYKARKTLRCLKGVKRLRVVGQANPVKKQTAATLSYIQSWNKLQSEIRNRRAFMVTEGRNRKKKQENQMKLEAKLHNLQIEWNGGSDTMDEILARIQQREEAAVKRERAMAYAFNHQWRARSATSLGNFSYEVGKGGWGWSWMDRWIAARPWEPRSMVHPENPKKAQAKKENTTNPSALKLQGSITLSNNINDRKTLKKKPLPSASPADQKKPSPSPSSDQKKPVPKEQRAKAAGTPPKPKAKDMKGSQEKKPQPQQKVPPPVSA

SEQ ID NO: 4865 - protein, 212 aa, Zea mays subsp. mays
  peptide (1)..(212): Ceres Seq. ID no. 12347937
MVTEGRNRKKKQENQMKLEAKLHNLQIEWNGGSDTMDEILARIQQREEAAVKRERAMAYAFNHQWRARSATSLGNFSYEVGKGGWGWSWMDRWIAARPWEPRSMVHPENPKKAQAKKENTTNPSALKLQGSITLSNNINDRKTLKKKPLPSASPADQKKPSPSPSSDQKKPVPKEQRAKAAGTPPKPKAKDMKGSQEKKPQPQQKVPPPVSA

SEQ ID NO: 4866 - DNA, 1445 bp, Zea mays subsp. mays
  misc_feature (1)..(1445): Ceres Seq. ID no. 12373700
  misc_feature (1)..(1445): Ortholog of  Ceres SEQ ID NO 15178228 as cited in SEQ ID NO 58330
  misc_feature (1)..(1445): Ortholog of  Ceres SEQ ID NO 13596635 as cited in SEQ ID NO 62488
aaggtatttctttttacttttgcgtttgcacaggccactccaccggttctcctattcttcctagcacaaaggggaggaagtaaagccttcccctcgccggagatgctgccgtcggcgaccgggtacactgccggcgacgtccactcggcacgcgagatgttccatcccttctacctctgacttcttgcgcacgcggcctctagtagatagtaattggacacttcatacttggattggatctctagatagcctagaaggtgagcggggcgtggaaggagaaatccgggaagcgatgagctttagcgccgcaagagtctcggagcatggcggcgagttcgaggaggcaagggggatgccggcagaggtgagctgggagatgctcgacaagtcgcggttttttgtactcgtcgccgcgctcttctctggcgtctccgcggcgctatatccggccgtcgtcctcaagacgcacctccaggttgctgcccccgcacaggccgcggcctcggcggcagcggcggcgattctccggcgcgacggtccccgagggttctaccgtggcttcggtgcgtccctcgcgggcacggtgcccgcgcgcgctctctatatggcggcgctcgaggccaccaagagcgtcgtgggctccgccgccctccgcctcggcgtcgcggaaccggccgcctcggctgccgcctcggccgcgggcggcgtctccgctgccgtagccgcgcaggtcgtctggaccccggtggacgtcgtcagccagcgtctcatgcttcagacggcgcccctcgctgccgcccgctaccgcggcggtaccgacgcgttccggaagatcctactcgcggacggcgtgcgcggcctgtaccgcggcttcggcatctcggtgctgacctacgcgccctccagtgccgcgtggtgggcctcctacgtgaccgcgcagcggctcctctggcgcgccgtcggccccgcggcgcacgacagccgcggcgccgcgatagccctgcagggtgcgagcgcggccgcggcgggaagcgcggcggcgctggtgacgatgccgctggacaccgtgaagacgcggctgcaggttatggacgctggggcgcaggcgccgacgctcgcggccgcggcgcgcgcgctagttcgggagggaggttggtctgcttgctaccgcgggttcgggccgcggtgggcgtccatgtcgctgtcttcggccaccatggtcaccgtctacgagttcttgaagcggctctcggccaaggaaggctccctctaagctctggatcaaagtgtatccatggatgatccttgtaagcatccatgtccaaatgcgaatatcctgcactgatctcttgatgggatgttaggaagcaagatttctgctgggtttgtctgttgatgacgatgatgatgaattttgtaaaataaagatttgtgtatatacttcg

SEQ ID NO: 4867 - protein, 326 aa, Zea mays subsp. mays
  peptide (1)..(326): Ceres Seq. ID no. 12373701
MSFSAARVSEHGGEFEEARGMPAEVSWEMLDKSRFFVLVAALFSGVSAALYPAVVLKTHLQVAAPAQAAASAAAAAILRRDGPRGFYRGFGASLAGTVPARALYMAALEATKSVVGSAALRLGVAEPAASAAASAAGGVSAAVAAQVVWTPVDVVSQRLMLQTAPLAAARYRGGTDAFRKILLADGVRGLYRGFGISVLTYAPSSAAWWASYVTAQRLLWRAVGPAAHDSRGAAIALQGASAAAAGSAAALVTMPLDTVKTRLQVMDAGAQAPTLAAAARALVREGGWSACYRGFGPRWASMSLSSATMVTVYEFLKRLSAKEGSL

SEQ ID NO: 4868 - protein, 306 aa, Zea mays subsp. mays
  peptide (1)..(306): Ceres Seq. ID no. 12373702
MPAEVSWEMLDKSRFFVLVAALFSGVSAALYPAVVLKTHLQVAAPAQAAASAAAAAILRRDGPRGFYRGFGASLAGTVPARALYMAALEATKSVVGSAALRLGVAEPAASAAASAAGGVSAAVAAQVVWTPVDVVSQRLMLQTAPLAAARYRGGTDAFRKILLADGVRGLYRGFGISVLTYAPSSAAWWASYVTAQRLLWRAVGPAAHDSRGAAIALQGASAAAAGSAAALVTMPLDTVKTRLQVMDAGAQAPTLAAAARALVREGGWSACYRGFGPRWASMSLSSATMVTVYEFLKRLSAKEGSL

SEQ ID NO: 4869 - protein, 298 aa, Zea mays subsp. mays
  peptide (1)..(298): Ceres Seq. ID no. 12373703
MLDKSRFFVLVAALFSGVSAALYPAVVLKTHLQVAAPAQAAASAAAAAILRRDGPRGFYRGFGASLAGTVPARALYMAALEATKSVVGSAALRLGVAEPAASAAASAAGGVSAAVAAQVVWTPVDVVSQRLMLQTAPLAAARYRGGTDAFRKILLADGVRGLYRGFGISVLTYAPSSAAWWASYVTAQRLLWRAVGPAAHDSRGAAIALQGASAAAAGSAAALVTMPLDTVKTRLQVMDAGAQAPTLAAAARALVREGGWSACYRGFGPRWASMSLSSATMVTVYEFLKRLSAKEGSL

SEQ ID NO: 4870 - DNA, 968 bp, Zea mays subsp. mays
  misc_feature (1)..(968): Ceres Seq. ID no. 12368885
  misc_feature (1)..(968): Ortholog of  Ceres SEQ ID NO 13583408 as cited in SEQ ID NO 62616
  misc_feature (1)..(968): Ortholog of  Ceres SEQ ID NO 15179752 as cited in SEQ ID NO 63074
acataacccgccattcccactcccctcgccgcctgcgtccacctccgccccccgccctccccgcgtcccccctctcctacgcagatcgtccaggtaagatgtcgtccgaggcggtgaaggtggcggtgccggagtcggtactccgcaagcggaagcgcgaggagcagtgggccgccgagaagaaggagaagtccctggccgagaggaagaagtccatcgagaaccggaagctcatcttcacccgcgccaagcagtacgccgaggagtacgatgcccaggagaaggaactggtacagcttaagcgtgaggcccgtttgaagggtggtttctatgtcagtcctgaggcaaagctgctatttgtgatccgcatccgtggtatcaatgccatgcatcctaagaccaggaagatattgcagcttctgcgtttgaggcagatattcaatggcgtgttcctgaaagtcaacaaggctaccattaacatgcttcgcagggttgagccttatgttgcatatgggtacccgaacttgaagagtgtcagggagttgatctacaagaggggctacggaaaactgaacaagcagaggatccctctgtctaacaaccaagtcatcgaggagggcttgggcaagcacaacatcatttgcattgaggatcttgttcatgagatcatgactgtcggcccacacttcaaggaggcgaacaacttcctttggccatttaagctgaaggcaccgctgggaggtctgaagaagaagaggaaccactatgtggagggtggtgatgccggtaaccgtgagaattacatcaacgagctcatcaaaaggatgaattaggttcacgatcaagctctattgtgttctaagaaactttctgtgctctcccaattttacattattaggaagcggatgaatatgcatgcagttttgttgtttggaactagatgtgtatggaagaaacatgatcttttc

SEQ ID NO: 4871 - protein, 276 aa, Zea mays subsp. mays
  peptide (1)..(276): Ceres Seq. ID no. 12368886
ITRHSHSPRRLRPPPPPALPASPLSYADRPGKMSSEAVKVAVPESVLRKRKREEQWAAEKKEKSLAERKKSIENRKLIFTRAKQYAEEYDAQEKELVQLKREARLKGGFYVSPEAKLLFVIRIRGINAMHPKTRKILQLLRLRQIFNGVFLKVNKATINMLRRVEPYVAYGYPNLKSVRELIYKRGYGKLNKQRIPLSNNQVIEEGLGKHNIICIEDLVHEIMTVGPHFKEANNFLWPFKLKAPLGGLKKKRNHYVEGGDAGNRENYINELIKRMN

SEQ ID NO: 4872 - protein, 244 aa, Zea mays subsp. mays
  peptide (1)..(244): Ceres Seq. ID no. 12368887
MSSEAVKVAVPESVLRKRKREEQWAAEKKEKSLAERKKSIENRKLIFTRAKQYAEEYDAQEKELVQLKREARLKGGFYVSPEAKLLFVIRIRGINAMHPKTRKILQLLRLRQIFNGVFLKVNKATINMLRRVEPYVAYGYPNLKSVRELIYKRGYGKLNKQRIPLSNNQVIEEGLGKHNIICIEDLVHEIMTVGPHFKEANNFLWPFKLKAPLGGLKKKRNHYVEGGDAGNRENYINELIKRMN

SEQ ID NO: 4873 - protein, 148 aa, Zea mays subsp. mays
  peptide (1)..(148): Ceres Seq. ID no. 12368888
MHPKTRKILQLLRLRQIFNGVFLKVNKATINMLRRVEPYVAYGYPNLKSVRELIYKRGYGKLNKQRIPLSNNQVIEEGLGKHNIICIEDLVHEIMTVGPHFKEANNFLWPFKLKAPLGGLKKKRNHYVEGGDAGNRENYINELIKRMN

SEQ ID NO: 4874 - DNA, 1231 bp, Zea mays subsp. mays
  misc_feature (1)..(1231): Ceres Seq. ID no. 12363179
  misc_feature (1)..(1231): Ortholog of  Ceres SEQ ID NO 13595084 as cited in SEQ ID NO 56095
  misc_feature (1)..(1231): Ortholog of  Ceres SEQ ID NO 13594252 as cited in SEQ ID NO 57528
  misc_feature (1)..(1231): Ortholog of  Ceres SEQ ID NO 14305682 as cited in SEQ ID NO 59267
  misc_feature (1)..(1231): Ortholog of  Ceres SEQ ID NO 14315060 as cited in SEQ ID NO 60039
  misc_feature (1)..(1231): Ortholog of  Ceres SEQ ID NO 13597809 as cited in SEQ ID NO 64598
  misc_feature (1)..(1231): Ortholog of  Ceres SEQ ID NO 14313544 as cited in SEQ ID NO 68424
  misc_feature (1)..(1231): Ortholog of  Ceres SEQ ID NO 12617960 as cited in SEQ ID NO 69051
  misc_feature (1)..(1231): Ortholog of  Ceres SEQ ID NO 13589401 as cited in SEQ ID NO 0
  misc_feature (1)..(1231): Ortholog of  Ceres SEQ ID NO 15179361 as cited in SEQ ID NO 0
gcacgagaccattacctagaacatcctaatcgaaaaaaaggaaaaccacacaccggccaaaccacgactgcaggaggcgggtagtagcaagagaaaggaaacgctctcccagccccaaagaaaaaggcagcacaccaactcaccaagaaagtgtggaactgctcctgcctgcagcctcctgctcatcgaccctttcgccccacaagctcgattcctcgctcggccatggctgcacccgcggaggagacgcttgccgccgaggatacggcgtcaccaccgccgccggcgaggtctgcggggttctggttccttggcgaggataagtctgtccacaaggctctcggcgggggtaaaactgctgatgtacttttgtggaaagacaagaagacctctgctgcggtagttggtggtgcaactgtcctatgggttctgttcgaaattgtagaataccatctcctgaccctggtttctcatgtgctgatcgctgcactgaccatcttgttcctgtggtccaatgcgactgtctttatcaaaaagagtcctcctgatgttcctgaagtgcagatatctgaagaccttgctgtaaacattgcgctagcattgcgtgctgacatcaacaaggcacttgccctgcttcgggagattgctctgggccataacctgatgaagttcctaggcgtggtcgtcgccctttggattctttcagagatcggggagctatgtgatctcctgagattgatgtacattgtggtcttgatcctccacacagtgccgatactgtaccacaagtatcaggaccaggtggacaatttcgctgcaaaggcgcacagggagctctgcaagcaatacgcggtcctggatgccaaagttctgagcaagattccaagagctccaccaaaagataagaaacagaactagaacgtggaggatgacaagcgccttgttttcggcttgggcgacgagagtttgtagccaatggtctgatgtggttcgtgggctttgtgtaggtgcacagtttcacgtatatgttctggtcgtgtaatctatatgtttatataaacctgtaggggtgttgatgaccatcgaaagtgtcgtaaatattcagtagtatatgtagcttagggcttaagcggttgtgtttataaggtcattgtcgttgtcgatgggaagtattatcatgttattttcaggactcaggagtataaaatgaaataaaatgtgaattcatctg

SEQ ID NO: 4875 - protein, 230 aa, Zea mays subsp. mays
  peptide (1)..(230): Ceres Seq. ID no. 12363180
MAAPAEETLAAEDTASPPPPARSAGFWFLGEDKSVHKALGGGKTADVLLWKDKKTSAAVVGGATVLWVLFEIVEYHLLTLVSHVLIAALTILFLWSNATVFIKKSPPDVPEVQISEDLAVNIALALRADINKALALLREIALGHNLMKFLGVVVALWILSEIGELCDLLRLMYIVVLILHTVPILYHKYQDQVDNFAAKAHRELCKQYAVLDAKVLSKIPRAPPKDKKQN

SEQ ID NO: 4876 - DNA, 1485 bp, Zea mays subsp. mays
  misc_feature (1)..(1485): Ceres Seq. ID no. 12352324
  misc_feature (1)..(1485): Ortholog of  Ceres SEQ ID NO 13654490 as cited in SEQ ID NO 68540
ctaccgtctgcgtctgcccgtcttcctctctctctctctctctcctctccctcattctggatccaccgccgcagccttagctgggtccgtcgctgtcgctccgcctcccgctcgcttgccgggcccgacacgcccgccaccgcctccgctttgtctctccggcgatccgacgccccacccggcgtctgtgcagagcagtcgtgaggagttctctgttgtgggctgcccggcgatggaccggggcgagcgtctcggccgcgcgctggacgccttcgggggcaacctgtgggcgctggttgacgcagcgctggacgcggccgctcgcgaccgccccgacgagcttcgcgcgcgccgcgatagcatcgtcgagcgcctctacgctgccnccgcgggctgtagcaactgcgccgggcgtccgccgtctgttgccgctttagcggccgcggggctggaggaagaggacggcgaggaggcggctccggcttctccgtgggcggaggctgacgcgcaagccggtggcgcggaggcacagaccgaggtgctcggcgccggcgagcctgatctcgagagcaagatcgtggccatcagggacttcttggaggaccctaatcagcccgagaacgagctggtgagcttgctgcagaacctggcagacatggatgttacctacaacgcactccaggagactgacatcgggcggcaggttaatggtctgcgcaagcatccttcggccgaggtcaggcggctggtgaagcagctcatcaggaagtggaaggagatagtggacgactgggtgcgcctggacaattccggcggtgacggcagtgcctctgttatgacagctgatggtgactccccacataaaatccaaggcagaagccaccaaagccctcgggtttcggggtttcagtattctccaagcccacagaggtttaatggttcaacttcagagatggctaacaatgggtttgagtcaacaatggatgcgaagcgtagggccagccctgtaccagcacatcataactccaggcagatgaacaacaatcatcattctactactattaccaccagcacgtcatctgctccagctaaagtgacaagggagcaaaagcagagtcttgtggaccttgacaggcttgattctgccaggaagaggctccaggagaattaccaagaagcacaaaatgccaaaaagcagaggacaatccaagtgatggacatcaatgacataccaaagccgaagagcagaaacgctttcatccgcaagagcggcagcggtgggctcccggcgaggcaccgatagcctaacctcctccgtcggctggatatctgcgacacttgcgaagttgtgcctagaaccgcaacgggaaagaaaaagaagcaaacggtttcttgttctttttttccctgtaccttgactgcctaggtttacctccagtgtaatattgtcaggtacataagggtgaaatgatatgatgtttcccg

SEQ ID NO: 4877 - protein, 433 aa, Zea mays subsp. mays
  peptide (1)..(433): Ceres Seq. ID no. 12352325
  misc_feature (129)..(129): Xaa is any aa, unknown or other
YRLRLPVFLSLSLSPLPHSGSTAAALAGSVAVAPPPARLPGPTRPPPPPLCLSGDPTPHPASVQSSREEFSVVGCPAMDRGERLGRALDAFGGNLWALVDAALDAAARDRPDELRARRDSIVERLYAAXAGCSNCAGRPPSVAALAAAGLEEEDGEEAAPASPWAEADAQAGGAEAQTEVLGAGEPDLESKIVAIRDFLEDPNQPENELVSLLQNLADMDVTYNALQETDIGRQVNGLRKHPSAEVRRLVKQLIRKWKEIVDDWVRLDNSGGDGSASVMTADGDSPHKIQGRSHQSPRVSGFQYSPSPQRFNGSTSEMANNGFESTMDAKRRASPVPAHHNSRQMNNNHHSTTITTSTSSAPAKVTREQKQSLVDLDRLDSARKRLQENYQEAQNAKKQRTIQVMDINDIPKPKSRNAFIRKSGSGGLPARHR

SEQ ID NO: 4878 - protein, 356 aa, Zea mays subsp. mays
  peptide (1)..(356): Ceres Seq. ID no. 12352326
  misc_feature (52)..(52): Xaa is any aa, unknown or other
MDRGERLGRALDAFGGNLWALVDAALDAAARDRPDELRARRDSIVERLYAAXAGCSNCAGRPPSVAALAAAGLEEEDGEEAAPASPWAEADAQAGGAEAQTEVLGAGEPDLESKIVAIRDFLEDPNQPENELVSLLQNLADMDVTYNALQETDIGRQVNGLRKHPSAEVRRLVKQLIRKWKEIVDDWVRLDNSGGDGSASVMTADGDSPHKIQGRSHQSPRVSGFQYSPSPQRFNGSTSEMANNGFESTMDAKRRASPVPAHHNSRQMNNNHHSTTITTSTSSAPAKVTREQKQSLVDLDRLDSARKRLQENYQEAQNAKKQRTIQVMDINDIPKPKSRNAFIRKSGSGGLPARHR

SEQ ID NO: 4879 - DNA, 1407 bp, Zea mays subsp. mays
  misc_feature (1)..(1407): Ceres Seq. ID no. 12409806
  misc_feature (1)..(1407): Ortholog of  Ceres SEQ ID NO 13648081 as cited in SEQ ID NO 165
  misc_feature (1)..(1407): Ortholog of  Ceres SEQ ID NO 13502952 as cited in SEQ ID NO 62271
  misc_feature (1)..(1407): Ortholog of  Ceres SEQ ID NO 13502973 as cited in SEQ ID NO 68052
  misc_feature (1)..(1407): Ortholog of  Ceres SEQ ID NO 13596000 as cited in SEQ ID NO 68188
atccatcccgagcaagcaagtaatatggcttggtcttgtgctcgtccgatgagcatcgccctcgctgccgtcctcctgctgtgcggcggcgcgtggctgcagcaggcggcggaggcgcgcccccaccacatggacgacgacagcagcatcgacatggaccgcggcagcgacgacttcttctccatcgtggggtactcgccggaggacctgacgcagcacgaccggctcgtcaggctgttcgaggagtgggtggccaagtaccgcaaggcgtacggcagcttcgaggagaagctgcgccggttcgaggtgttcaaggacaacctgcaccacatcgacgaggccaacaggaaggaggtcaccagctactggctggggcctcaacgccttcgccgacctcacgcacgacgagttcaaggccacctacctgggcctcctgcccgaagaggaccagcggtggccggttcaggtacggcggcgtgggcgacggcggcgacgaggtgcccgcgtccgtggactggcggaagaagggcgccgtgacggaggtcaagaaccaggggcagtgcggcagctgctgggccttctccacggtggcggccgtggaagggatcaaccagatcgtgacgggcaacctcacgtcgctgtcggagcagcagctggtcgactgcagcaccgacgggaacaacgggtgcagcggcggcgtcatggacaacgccttctcgttcatcgccaccggcgccgggctccgctccgaggaggcgtacccgtacctcatggaggaaggggactgcgacgacagggcccgcgacggcgaggtgctcgtcactatatccgggtacgaggacgtgccggccaacgacgagcaggcgctcgtcaaggccctcgcccaccagcccgtcagcgtcgccatcgaggcgtccgggaggcacttccagttctacagcgggggcgtgttcgatggaccgtgcgggtcggagctggaccacggcgtggcggcggtgggctacggcagcagcaaggggcaggactacatcatcgtcaagaactcgtggggcacccactggggcgagaagggctacatccgcatgaagaggggcaccggcaagccggagggcctctgcggcatcaacaagatggcatcctacccgaccaaggaccattgatggatcatggacgacggagatcatatctatcttcccttccctttcatccgactctttcgatttccatcgtttgcccccttttcctgaatgtgtgtgttttttttatatattactgtgtcaagtaatttctcgatggatcgatcgaggaagaacgacaaacatgcactcaagcacgagcgcagcaatgtcatctttctcttcatttggtgcgttgaaatgacgaatatcaaataaagtggtttatttc

SEQ ID NO: 4880 - protein, 178 aa, Zea mays subsp. mays
  peptide (1)..(178): Ceres Seq. ID no. 12409807
IHPEQASNMAWSCARPMSIALAAVLLLCGGAWLQQAAEARPHHMDDDSSIDMDRGSDDFFSIVGYSPEDLTQHDRLVRLFEEWVAKYRKAYGSFEEKLRRFEVFKDNLHHIDEANRKEVTSYWLGPQRLRRPHARRVQGHLPGPPARRGPAVAGSGTAAWATAATRCPRPWTGGRRAP

SEQ ID NO: 4881 - protein, 170 aa, Zea mays subsp. mays
  peptide (1)..(170): Ceres Seq. ID no. 12409808
MAWSCARPMSIALAAVLLLCGGAWLQQAAEARPHHMDDDSSIDMDRGSDDFFSIVGYSPEDLTQHDRLVRLFEEWVAKYRKAYGSFEEKLRRFEVFKDNLHHIDEANRKEVTSYWLGPQRLRRPHARRVQGHLPGPPARRGPAVAGSGTAAWATAATRCPRPWTGGRRAP

SEQ ID NO: 4882 - protein, 162 aa, Zea mays subsp. mays
  peptide (1)..(162): Ceres Seq. ID no. 12409809
MSIALAAVLLLCGGAWLQQAAEARPHHMDDDSSIDMDRGSDDFFSIVGYSPEDLTQHDRLVRLFEEWVAKYRKAYGSFEEKLRRFEVFKDNLHHIDEANRKEVTSYWLGPQRLRRPHARRVQGHLPGPPARRGPAVAGSGTAAWATAATRCPRPWTGGRRAP

SEQ ID NO: 4883 - DNA, 1024 bp, Zea mays subsp. mays
  misc_feature (1)..(1024): Ceres Seq. ID no. 12407960
  misc_feature (1)..(1024): Ortholog of  Ceres SEQ ID NO 14304124 as cited in SEQ ID NO 56378
  misc_feature (1)..(1024): Ortholog of  Ceres SEQ ID NO 12585331 as cited in SEQ ID NO 62912
  misc_feature (1)..(1024): Ortholog of  Ceres SEQ ID NO 13654964 as cited in SEQ ID NO 63176
gtccatccatccatccaggtagtccgagccagcgaaccaactattcgtttgcttttcgtcttcgtcctctctttgcccagttgtcggtcgcccgcgccgtcgtctccgctccgccggccggcctgcgaaaccctagcgaggcgagcgagagagaaactagcggccatgttcggctacaggaaggctgacccggacctcgaggccggcgggtcctcgctgctgtacccgggaatgacggagaagccccgagcttcggtgggcgttcgtccgcaaggatctacgtcatcctagccgtccagctcgccatgacggccgcggtctccgccttcgtcgtcaaggtgcccgccgtctccaacttcttcgtctcctccaacgccggggtcgcactctacatcttcctcatcatcctgcctttcctcgtgctgtgccctctgcgctactaccaccagaagcatccggtcaatctgctgctgctcggcctcttcaccgtcgccatcagctttgccgtcggcatgacatgcgctttcactagcggaaaaatcattttggaggctgccattcttacagcagtggtggtgatcagcttaactgcgtacactttctgggctgcaaagaggggccatgacttcaacttcctcggtcccttcctatttgctgctatcatggtgctcatggtgttttcactaatccagatctttttcccgctgggtaagatatctgtgatgatatacggtgggttggcatcacttatcttctgtggatacatcatctatgacacggacaatgtcatcaagcgctacacctacgatgaatatatatgggctgctgtttcactctacctcgacgtcatcaacctgttcctgtctctgctgcagctgctgagggcagccgatagctgagctcgtcaagctttcacttggatcttgttctcacatacatttgtgtatatcacaaactctgtaatggtcatggatactccaatttataactatactttgtcggtggctcggtgttaccttggtcc

SEQ ID NO: 4884 - protein, 197 aa, Zea mays subsp. mays
  peptide (1)..(197): Ceres Seq. ID no. 12407961
MTAAVSAFVVKVPAVSNFFVSSNAGVALYIFLIILPFLVLCPLRYYHQKHPVNLLLLGLFTVAISFAVGMTCAFTSGKIILEAAILTAVVVISLTAYTFWAAKRGHDFNFLGPFLFAAIMVLMVFSLIQIFFPLGKISVMIYGGLASLIFCGYIIYDTDNVIKRYTYDEYIWAAVSLYLDVINLFLSLLQLLRAADS

SEQ ID NO: 4885 - protein, 128 aa, Zea mays subsp. mays
  peptide (1)..(128): Ceres Seq. ID no. 12407962
MTCAFTSGKIILEAAILTAVVVISLTAYTFWAAKRGHDFNFLGPFLFAAIMVLMVFSLIQIFFPLGKISVMIYGGLASLIFCGYIIYDTDNVIKRYTYDEYIWAAVSLYLDVINLFLSLLQLLRAADS

SEQ ID NO: 4886 - DNA, 1474 bp, Zea mays subsp. mays
  misc_feature (1)..(1474): Ceres Seq. ID no. 12352327
  misc_feature (1)..(1474): Ortholog of  Ceres SEQ ID NO 15169557 as cited in SEQ ID NO 67273
agaaatcctccttcaagatggtcgttttgggccaacaacgtacgactcctcccacaggggggctgctgccggagaaatccgtgcaggagcagaactcagtctcatcatcttcctccacccgacagatgattggaggaggtatccagtggtggagcaggtccctgtgggtcaagtccagggcgtggatccggaaccccatgaacatggccctgtccgtctggatcctggccgtcggcgtctcgggcgccatcctcttcatggtgatgacggggatgctcaaccgcgtgctgccaagcaagccgcggagggacacgtggttcgaggtgaacaaccagatcctgaacgcgctcttcaccctcatgtgcctgtaccagcacccgaggaggttctaccacctggccctcgtgtgccgctggaaggccggcgacatgcaccagctccgccaagcgtactgcaaggacggggcctgcaagcccaacgagaggaagcacatgacggctgtcatcctgctgctccacctcaactgctttgctcagtacgcgctctgtggcctcaaccttggctaccggaggccccggcgtccggtggtcggtgtcgccctcaccgtagcggtcgccatctgcgcgccggccgtcgctgggatgtacaacaacctcagtcctctcgggagagactacgaggcgccggcgccggcggaggggatgataataagtgaggaagagtcgcagctccagcgcaaaacgcccgacaccgagaggcgctactcgttggtgccacggcaaggacaaggagaagaaccgcagtgggtcggcgggctgtgggaggacctgtgggacgacatgtcgctggcgtacctgtcgctgttctgcagctgctgcgtgttcgggtggaacgcgagcaggctcggcttgggcaacatgtacgtccacgtcgccaccttcgtgctcctgtgcctggcgcccttcttcatcttggacctggcggccatcaacgtggacgacgaggcggtcagggacgcgctggggctggccggcatcttcctctgcgtgttcggcctgctctacggcggattctggaggatccagatgcgcaggcggttcggcctccccgagaaccgcgcctgctgcggcaagccggacctcaccgactgcctactgtggctctgctgctacccgtgctcgctagcgcaggaggtccgtacggcagacgcctacgaggtggtggtgctgctggacacgccgatgcatcgccatccgactctgcaggaagagctggccacgatgcaggagccaccagatgaagaagaaggaggcggtgtcatccccccttcgacagtgtcagctacacgctcataagcagtacccaacatgtacaggatgagcagtttcaatttcaacatcaggtggtcatttcaatgtatccatgcagccgctgaatatcatcattaaaaaaagcagcaaaaacagccttctct

SEQ ID NO: 4887 - protein, 450 aa, Zea mays subsp. mays
  peptide (1)..(450): Ceres Seq. ID no. 12352328
KSSFKMVVLGQQRTTPPTGGLLPEKSVQEQNSVSSSSSTRQMIGGGIQWWSRSLWVKSRAWIRNPMNMALSVWILAVGVSGAILFMVMTGMLNRVLPSKPRRDTWFEVNNQILNALFTLMCLYQHPRRFYHLALVCRWKAGDMHQLRQAYCKDGACKPNERKHMTAVILLLHLNCFAQYALCGLNLGYRRPRRPVVGVALTVAVAICAPAVAGMYNNLSPLGRDYEAPAPAEGMIISEEESQLQRKTPDTERRYSLVPRQGQGEEPQWVGGLWEDLWDDMSLAYLSLFCSCCVFGWNASRLGLGNMYVHVATFVLLCLAPFFILDLAAINVDDEAVRDALGLAGIFLCVFGLLYGGFWRIQMRRRFGLPENRACCGKPDLTDCLLWLCCYPCSLAQEVRTADAYEVVVLLDTPMHRHPTLQEELATMQEPPDEEEGGGVIPPSTVSATRS

SEQ ID NO: 4888 - protein, 445 aa, Zea mays subsp. mays
  peptide (1)..(445): Ceres Seq. ID no. 12352329
MVVLGQQRTTPPTGGLLPEKSVQEQNSVSSSSSTRQMIGGGIQWWSRSLWVKSRAWIRNPMNMALSVWILAVGVSGAILFMVMTGMLNRVLPSKPRRDTWFEVNNQILNALFTLMCLYQHPRRFYHLALVCRWKAGDMHQLRQAYCKDGACKPNERKHMTAVILLLHLNCFAQYALCGLNLGYRRPRRPVVGVALTVAVAICAPAVAGMYNNLSPLGRDYEAPAPAEGMIISEEESQLQRKTPDTERRYSLVPRQGQGEEPQWVGGLWEDLWDDMSLAYLSLFCSCCVFGWNASRLGLGNMYVHVATFVLLCLAPFFILDLAAINVDDEAVRDALGLAGIFLCVFGLLYGGFWRIQMRRRFGLPENRACCGKPDLTDCLLWLCCYPCSLAQEVRTADAYEVVVLLDTPMHRHPTLQEELATMQEPPDEEEGGGVIPPSTVSATRS

SEQ ID NO: 4889 - protein, 409 aa, Zea mays subsp. mays
  peptide (1)..(409): Ceres Seq. ID no. 12352330
MIGGGIQWWSRSLWVKSRAWIRNPMNMALSVWILAVGVSGAILFMVMTGMLNRVLPSKPRRDTWFEVNNQILNALFTLMCLYQHPRRFYHLALVCRWKAGDMHQLRQAYCKDGACKPNERKHMTAVILLLHLNCFAQYALCGLNLGYRRPRRPVVGVALTVAVAICAPAVAGMYNNLSPLGRDYEAPAPAEGMIISEEESQLQRKTPDTERRYSLVPRQGQGEEPQWVGGLWEDLWDDMSLAYLSLFCSCCVFGWNASRLGLGNMYVHVATFVLLCLAPFFILDLAAINVDDEAVRDALGLAGIFLCVFGLLYGGFWRIQMRRRFGLPENRACCGKPDLTDCLLWLCCYPCSLAQEVRTADAYEVVVLLDTPMHRHPTLQEELATMQEPPDEEEGGGVIPPSTVSATRS

SEQ ID NO: 4890 - DNA, 1531 bp, Zea mays subsp. mays
  misc_feature (1)..(1531): Ceres Seq. ID no. 13498310
  misc_feature (1)..(1531): Ortholog of  Ceres SEQ ID NO 13596868 as cited in SEQ ID NO 62806
  misc_feature (1)..(1531): Ortholog of  Ceres SEQ ID NO 12587035 as cited in SEQ ID NO 63605
  misc_feature (1)..(1531): Ortholog of  Ceres SEQ ID NO 14302836 as cited in SEQ ID NO 65013
  misc_feature (1)..(1531): Ortholog of  Ceres SEQ ID NO 13599119 as cited in SEQ ID NO 0
ctctcaactctcgtttcgccggagtatttagcttgcttcagggagcacgtggcggtggaagcttccctaggggtggcggaggcggtggtggtgcttggttgatgtcgatnnnncgcaggtctgctgtgactcggccgtagcggcgacggcggcaccggtggttggtgcggaggcggaggccagggccagggcgcgcgccgagaggcggagccgggccggagagtctggggcgtggaagcacgcggtggccgctggcacggccgatgctacgaggaagcggagtctcggggcaggggagctgctggtggcgcggaagcacggggcggcgtcggtggccggccgcaggagggagatggaggatgccgtgtccgtgcgcgacgcgttctgcgcggagggcacggccgacggcgggaggcgcgacttctacggagtgttcgacggccacggctgctcgcacgtggccgaggcgtgccgggaccggatgcacgagctggtcgccgaggagctcgccgccaccgccgccgacagctcagtctccgcggcggcggcctggaccgtggcgatggaacgcagcttcgcgcggatggacgccgaggtgacgtcngccggcgggcgcgccgnnnncnncagaagcagcacctgccgctgcgacgcgcacaggtgcgaccacgtgggctccacggccgtggtggccgtcnnggangagcacagcgtcattgtggccaactgcggcgacagccgcgccgtgctctgccgtggggacggcgcgccgccgctgccgctgtcgtcggaccacaagcccgaccgccccgacgagctggagcgcatcgagtccgccggcgggcgcgtcatcttctgggagggcgcgcgcgttctgggcgtcctcgccatgtcccgcgccgtcggggacggatacctgaagccgtacgtgtcgtccgttcccgaggtgacggtgaccgaccggtccgacggcgacgagtgcctcatcctgggcagcgacgggctctgggacgtggtgagcaacgaggccgcgtgcgaggtggcgcgcgcctgcctccgcaggggccgggccaagtggtgtgccgaggccgccgcgttgctcaccaagctggccctcgcgaggagaagctccgacaacgtctcggtggtcgtcatcgatctccggaggaggaatcactagttctgtgcagttgtcagctagtactagtactccctccgaaggatggctggtcgcacaagggatttcgcgggggtgcctaattgggttttttttcttccattttcattcaaaaagtttttttttttttttgctgtactctccctgaatcaaaaagttcagaggagcccttagattaattattgtggtagagccggaatttggtccggataccattcggagaggtggtcgcgtagaaaaaactcagaggagagacggtctcacaagaaaatcagtctgtgtattgtatcatctagacatctaatgaaatagcaaccgaaacaaacaccacctccggtgtctggatgttctcgc

SEQ ID NO: 4891 - protein, 275 aa, Zea mays subsp. mays
  peptide (1)..(275): Ceres Seq. ID no. 13498311
  misc_feature (84)..(84): Xaa is any aa, unknown or other
  misc_feature (90)..(90): Xaa is any aa, unknown or other
  misc_feature (91)..(91): Xaa is any aa, unknown or other
  misc_feature (92)..(92): Xaa is any aa, unknown or other
  misc_feature (116)..(116): Xaa is any aa, unknown or other
  misc_feature (117)..(117): Xaa is any aa, unknown or other
MEDAVSVRDAFCAEGTADGGRRDFYGVFDGHGCSHVAEACRDRMHELVAEELAATAADSSVSAAAAWTVAMERSFARMDAEVTXAGGRAXXXRSSTCRCDAHRCDHVGSTAVVAVXXEHSVIVANCGDSRAVLCRGDGAPPLPLSSDHKPDRPDELERIESAGGRVIFWEGARVLGVLAMSRAVGDGYLKPYVSSVPEVTVTDRSDGDECLILGSDGLWDVVSNEAACEVARACLRRGRAKWCAEAAALLTKLALARRSSDNVSVVVIDLRRRNH

SEQ ID NO: 4892 - protein, 232 aa, Zea mays subsp. mays
  peptide (1)..(232): Ceres Seq. ID no. 13498312
  misc_feature (41)..(41): Xaa is any aa, unknown or other
  misc_feature (47)..(47): Xaa is any aa, unknown or other
  misc_feature (48)..(48): Xaa is any aa, unknown or other
  misc_feature (49)..(49): Xaa is any aa, unknown or other
  misc_feature (73)..(73): Xaa is any aa, unknown or other
  misc_feature (74)..(74): Xaa is any aa, unknown or other
MHELVAEELAATAADSSVSAAAAWTVAMERSFARMDAEVTXAGGRAXXXRSSTCRCDAHRCDHVGSTAVVAVXXEHSVIVANCGDSRAVLCRGDGAPPLPLSSDHKPDRPDELERIESAGGRVIFWEGARVLGVLAMSRAVGDGYLKPYVSSVPEVTVTDRSDGDECLILGSDGLWDVVSNEAACEVARACLRRGRAKWCAEAAALLTKLALARRSSDNVSVVVIDLRRRNH

SEQ ID NO: 4893 - protein, 205 aa, Zea mays subsp. mays
  peptide (1)..(205): Ceres Seq. ID no. 13498313
  misc_feature (14)..(14): Xaa is any aa, unknown or other
  misc_feature (20)..(20): Xaa is any aa, unknown or other
  misc_feature (21)..(21): Xaa is any aa, unknown or other
  misc_feature (22)..(22): Xaa is any aa, unknown or other
  misc_feature (46)..(46): Xaa is any aa, unknown or other
  misc_feature (47)..(47): Xaa is any aa, unknown or other
MERSFARMDAEVTXAGGRAXXXRSSTCRCDAHRCDHVGSTAVVAVXXEHSVIVANCGDSRAVLCRGDGAPPLPLSSDHKPDRPDELERIESAGGRVIFWEGARVLGVLAMSRAVGDGYLKPYVSSVPEVTVTDRSDGDECLILGSDGLWDVVSNEAACEVARACLRRGRAKWCAEAAALLTKLALARRSSDNVSVVVIDLRRRNH

SEQ ID NO: 4894 - DNA, 1203 bp, Zea mays subsp. mays
  misc_feature (1)..(1203): Ceres Seq. ID no. 12409796
  misc_feature (1)..(1203): Ortholog of  Ceres SEQ ID NO 13595187 as cited in SEQ ID NO 56052
  misc_feature (1)..(1203): Ortholog of  Ceres SEQ ID NO 14312239 as cited in SEQ ID NO 59176
  misc_feature (1)..(1203): Ortholog of  Ceres SEQ ID NO 14313718 as cited in SEQ ID NO 59559
  misc_feature (1)..(1203): Ortholog of  Ceres SEQ ID NO 15169505 as cited in SEQ ID NO 61011
  misc_feature (1)..(1203): Ortholog of  Ceres SEQ ID NO 13662053 as cited in SEQ ID NO 61547
  misc_feature (1)..(1203): Ortholog of  Ceres SEQ ID NO 13624283 as cited in SEQ ID NO 0
agcttgattctctctggctggtacgcggtagcctcgctctctctcctacctacacggctacacttaaacggcagcaggcacctgcaggcagggagagctgctaacggaccgatcggggagctgctggccatggagcctggtccggatgcgcccgctggtggtggtggcggaggaggaaccagtattagtgagccagcagaggccgggccgtcgccgtcgtcgtcctcggccgccgcagcagcctcgtcgtcgagccggcagcaggcagagcaggaagcacagcagcaacaaggagcacagcagagggaacagccagcagtaagggcccaggcgcagccgcagccgcagccgcatcagcagcagcctccggcggggctcagccggtacgagtcgcagaagcgccgggactggaacacgttcctgcagtacctgcggaaccacaagccgccgctgacgctggcacgctgcagcggcgcacacgtcatcgagttcctccgctacctggaccagttcggcaagacgaaggtgcacgctgagggctgcgcctacttcgggcagccgaacccgccggcgccctgcacgtgcccgctgcgccaggcctggggtagcctcgacgcgctcatcggccgcctccgcgccgcgtacgaggagtccggcggccgccccgagtccaacccgttcgcggccaaggccgtgcgcatctacctccgcgacgtgcgggaggcgcaggccaaggcccgcggcatcccgtacgagaagaagaagcggaagcgcgggagcgccgccgcgcctccggtcgcgccgcctcctgttgtgactgcagaggccgccgggacgtcgtcaggggccggcggtggtgatgacgaggacgacgacgaaccaccgccatctgcagatgaaccacgacgacagcagaccgccgcgccgactcctcctcctcctgcaagtatgatttccagcactagtgcaagcagtagcagtgtcgccccagtcacgacgacgacgacgacaagcaaggagaaagaaggatccgcgccaagctcgtgataagtttgtagatcatctactagccttctgattcaattctatcatcgccggcctccaaattataatcccaaccgcctccatcttaaatttttagttgctcactattactatatattgttattgtttactggcatatataagagagaggtctaaggg

SEQ ID NO: 4895 - protein, 348 aa, Zea mays subsp. mays
  peptide (1)..(348): Ceres Seq. ID no. 12409797
SLILSGWYAVASLSLLPTRLHLNGSRHLQAGRAANGPIGELLAMEPGPDAPAGGGGGGGTSISEPAEAGPSPSSSSAAAAASSSSRQQAEQEAQQQQGAQQREQPAVRAQAQPQPQPHQQQPPAGLSRYESQKRRDWNTFLQYLRNHKPPLTLARCSGAHVIEFLRYLDQFGKTKVHAEGCAYFGQPNPPAPCTCPLRQAWGSLDALIGRLRAAYEESGGRPESNPFAAKAVRIYLRDVREAQAKARGIPYEKKKRKRGSAAAPPVAPPPVVTAEAAGTSSGAGGGDDEDDDEPPPSADEPRRQQTAAPTPPPPASMISSTSASSSSVAPVTTTTTTSKEKEGSAPSS

SEQ ID NO: 4896 - protein, 305 aa, Zea mays subsp. mays
  peptide (1)..(305): Ceres Seq. ID no. 12409798
MEPGPDAPAGGGGGGGTSISEPAEAGPSPSSSSAAAAASSSSRQQAEQEAQQQQGAQQREQPAVRAQAQPQPQPHQQQPPAGLSRYESQKRRDWNTFLQYLRNHKPPLTLARCSGAHVIEFLRYLDQFGKTKVHAEGCAYFGQPNPPAPCTCPLRQAWGSLDALIGRLRAAYEESGGRPESNPFAAKAVRIYLRDVREAQAKARGIPYEKKKRKRGSAAAPPVAPPPVVTAEAAGTSSGAGGGDDEDDDEPPPSADEPRRQQTAAPTPPPPASMISSTSASSSSVAPVTTTTTTSKEKEGSAPSS

SEQ ID NO: 4897 - DNA, 1508 bp, Zea mays subsp. mays
  misc_feature (1)..(1508): Ceres Seq. ID no. 12366608
  misc_feature (1)..(1508): Ortholog of  Ceres SEQ ID NO 14305026 as cited in SEQ ID NO 52980
gtttttgcccctttggtccctctccctcccccgtccgccctgcactctccagctcaacaaggaagaagagggggccttcaccacaccactcgattcctctttagagcacgacttacgaagagtgcccaggccgtcgccgccgaccagcaaaagggctggaaagcccccctcttttgtgctgtgcgtgcaactcggctcctgccctgccatcttgctttccaagacccctgcgcccccagtcccataattagttaggattaggatcaccaccatttccaaatccttgcagagctgccgaagcgcggatcacagatgaagaggcaatccaagaggcccaccgccagccgcgaatccccagaaacaggggagaagcagaagctggcgttcgcggaggaagaggccccgccggcgcggaaggtggagcccgacgacgaggccgagatggacgaggacgaggacgagctgggcccgggcctgggcggcgggcgcgcggcgcggtcgccgtgcgggctcggggagaagaagcggcgcctggcgctggagcaggtgcgcgcgctggagcgctgcttcgagacggacaacaagctggacccggaccgcaaggcccgcatcgcgcgcgacctcgcgctgcagccccgccaggtcgccgtctggttccagaaccgccgcgcccgctggaagaccaagacgctcgagcgcgacttcgcggcgctgcgcgcgcgccacgacgcgctccgcgccgactgcgacgcgctccgccgcgacaaggacgccctcgccgccgagataagggagttgaggcagaagctgctgcccaagccggaagccacggtgaagctggaggcgacgacgggcaatgacacggcggaggagcgccgccaggcgacggccggcgcgccgcccgcgggggcctgcaaggacggctcctcggacagcgactccagcgtggtcttcagcgacgtcgaggcgtcgccgtactccggcggcgcggggttcgagccgccggccttggccgggctcggcgcgccgttcctggacacgtcggtggcgccgacgggctgctcgtctccccccgttttcgtcgagaccaagtggcagcacgggccgacacagtacccgttcccattcgactcgtacaaggcctgcgccggctatggcttcacggaggaatggcccgcgagctcggacctcatcggcagcgacggcggcgcggcggggttcttctccgaggatcacgcctccagcctcaacttcaactggtgcccgagtggcatccagggctgggagtgaagaggggtttttgatctgcacggctagtgtaaaaaaaccgatgttacggtggcatttgtacatgcatggaactggagtctagtgacctggcctggcgagtgtggtgtggccaaagctagaggacatccagcgcaaaaggcgggaacaggagcagtagtagcctgtaacaataacggaataacttgagccaggctagtaaaaaaagaggatgtaaatgc

SEQ ID NO: 4898 - protein, 325 aa, Zea mays subsp. mays
  peptide (1)..(325): Ceres Seq. ID no. 12366609
MKRQSKRPTASRESPETGEKQKLAFAEEEAPPARKVEPDDEAEMDEDEDELGPGLGGGRAARSPCGLGEKKRRLALEQVRALERCFETDNKLDPDRKARIARDLALQPRQVAVWFQNRRARWKTKTLERDFAALRARHDALRADCDALRRDKDALAAEIRELRQKLLPKPEATVKLEATTGNDTAEERRQATAGAPPAGACKDGSSDSDSSVVFSDVEASPYSGGAGFEPPALAGLGAPFLDTSVAPTGCSSPPVFVETKWQHGPTQYPFPFDSYKACAGYGFTEEWPASSDLIGSDGGAAGFFSEDHASSLNFNWCPSGIQGWE

SEQ ID NO: 4899 - protein, 282 aa, Zea mays subsp. mays
  peptide (1)..(282): Ceres Seq. ID no. 12366610
MDEDEDELGPGLGGGRAARSPCGLGEKKRRLALEQVRALERCFETDNKLDPDRKARIARDLALQPRQVAVWFQNRRARWKTKTLERDFAALRARHDALRADCDALRRDKDALAAEIRELRQKLLPKPEATVKLEATTGNDTAEERRQATAGAPPAGACKDGSSDSDSSVVFSDVEASPYSGGAGFEPPALAGLGAPFLDTSVAPTGCSSPPVFVETKWQHGPTQYPFPFDSYKACAGYGFTEEWPASSDLIGSDGGAAGFFSEDHASSLNFNWCPSGIQGWE

SEQ ID NO: 4900 - protein, 171 aa, Zea mays subsp. mays
  peptide (1)..(171): Ceres Seq. ID no. 12366611
MTRRRSAARRRPARRPRGPARTAPRTATPAWSSATSRRRRTPAARGSSRRPWPGSARRSWTRRWRRRAARLPPFSSRPSGSTGRHSTRSHSTRTRPAPAMASRRNGPRARTSSAATAARRGSSPRITPPASTSTGARVASRAGSEEGFLICTASVKKPMLRWHLYMHGTGV

SEQ ID NO: 4901 - DNA, 1715 bp, Zea mays subsp. mays
  misc_feature (1)..(1715): Ceres Seq. ID no. 12406967
  misc_feature (1)..(1715): Ortholog of  Ceres SEQ ID NO 13655298 as cited in SEQ ID NO 68914
  misc_feature (1)..(1715): Ortholog of  Ceres SEQ ID NO 13656501 as cited in SEQ ID NO 69206
accgaggagagagagaccgatacagagagagagaccaagaggacacgggagagaggacgttcatttccgcgtcgtctccgcccgcagccggcagccccaccacccaccacatggccgccatgccgggtggggcccacggcgccggcgccgcggacccgatgcaggtggaccagccgctcccccctgccgccgcaggcacagcacacgcccccgccgacgccaagcatgctggttctatgattgaagggagtgatccggtcacaggccatataatctcgacaaccattggagggaagaatggagagcctaaaaggactatcagctacatggcagagagagttgtgggaactggatcatttggaatcgtcttccaggcaaaatgtctggagactggtgagactgttgcgattaagaaggttttgcaggacaagcgctacaagaacagggagctacaaatcatgcgatccatggatcactgcaatgttgtttccttgaagcattgcttcttctctaccacaagcagagatgaacttttccttaacttagtgatggagtttgttcccgagtcattatatcgggtgttgaaacattacagcaatatgaaccagaggatgccactcatttatgtcaaattatatacctaccagatatttcgaggcttagcctatattcacacagtacctggagtttgccacagggatgtgaaaccacaaaatcttttggttgatccactgactcaccaagtgaagatatgtgattttgggagtgccaaaatgttggtcaaaggtgaagcaaacatatcatatatatgttcacgttattaccgtgctccagagctcatatttggggcaactgagtacacaacatcaattgatatttggtcagctggatgtgttcttgctgagctgcttcttggccagcctctcttccctggtgaaagtgctgtggatcagcttgttgagataataaaggttcttggtaccccaacgcgcgaggaaatccgatgtatgaatccaaactacaccgagtttagatttcctcagatcaaagctcacccatggcacaagattttccacaagcggatgcctccagaagctatagatctcgcttcacgcttgctccagtattcaccaaatctaagatgcactgctcttgaagcgtgtgcacatccattctttgacgatttgcgagaaccacatgcgaggttgccaaatggacggccatttcctccactgttcaactttaaacaggaactagcaaatgcctccccagagctcatcaacaggttgatcccagaccatgctaggcggcatcttgggctcacattattgcccgctactggaccataggcgaaggctctatggtggtgcttcgttgtgcggaaggcaacctgcattcaaggtgtagaatctgacaattattggaaggtcaaacatgagctggcgcgtaaggagaggtggtatgttctcgtgcagccagccttaatttgtcgcatgtcttaatgcaaaaatctgatttttgcccaagtagtgagaggagggaagggggtggtcggtgtattgttaagctattgaaggaattcgatccctgctattgtgttactttctccaacgtttaaacgttgtagtgcgcctgtaagtgttccatatatcccctgttgtcagtcagtgtaattctgtaaatgttattaatgggaaattatttcgtgcttttcc

SEQ ID NO: 4902 - protein, 448 aa, Zea mays subsp. mays
  peptide (1)..(448): Ceres Seq. ID no. 12406968
RGERDRYRERDQEDTGERTFISASSPPAAGSPTTHHMAAMPGGAHGAGAADPMQVDQPLPPAAAGTAHAPADAKHAGSMIEGSDPVTGHIISTTIGGKNGEPKRTISYMAERVVGTGSFGIVFQAKCLETGETVAIKKVLQDKRYKNRELQIMRSMDHCNVVSLKHCFFSTTSRDELFLNLVMEFVPESLYRVLKHYSNMNQRMPLIYVKLYTYQIFRGLAYIHTVPGVCHRDVKPQNLLVDPLTHQVKICDFGSAKMLVKGEANISYICSRYYRAPELIFGATEYTTSIDIWSAGCVLAELLLGQPLFPGESAVDQLVEIIKVLGTPTREEIRCMNPNYTEFRFPQIKAHPWHKIFHKRMPPEAIDLASRLLQYSPNLRCTALEACAHPFFDDLREPHARLPNGRPFPPLFNFKQELANASPELINRLIPDHARRHLGLTLLPATGP

SEQ ID NO: 4903 - protein, 412 aa, Zea mays subsp. mays
  peptide (1)..(412): Ceres Seq. ID no. 12406969
MAAMPGGAHGAGAADPMQVDQPLPPAAAGTAHAPADAKHAGSMIEGSDPVTGHIISTTIGGKNGEPKRTISYMAERVVGTGSFGIVFQAKCLETGETVAIKKVLQDKRYKNRELQIMRSMDHCNVVSLKHCFFSTTSRDELFLNLVMEFVPESLYRVLKHYSNMNQRMPLIYVKLYTYQIFRGLAYIHTVPGVCHRDVKPQNLLVDPLTHQVKICDFGSAKMLVKGEANISYICSRYYRAPELIFGATEYTTSIDIWSAGCVLAELLLGQPLFPGESAVDQLVEIIKVLGTPTREEIRCMNPNYTEFRFPQIKAHPWHKIFHKRMPPEAIDLASRLLQYSPNLRCTALEACAHPFFDDLREPHARLPNGRPFPPLFNFKQELANASPELINRLIPDHARRHLGLTLLPATGP

SEQ ID NO: 4904 - protein, 409 aa, Zea mays subsp. mays
  peptide (1)..(409): Ceres Seq. ID no. 12406970
MPGGAHGAGAADPMQVDQPLPPAAAGTAHAPADAKHAGSMIEGSDPVTGHIISTTIGGKNGEPKRTISYMAERVVGTGSFGIVFQAKCLETGETVAIKKVLQDKRYKNRELQIMRSMDHCNVVSLKHCFFSTTSRDELFLNLVMEFVPESLYRVLKHYSNMNQRMPLIYVKLYTYQIFRGLAYIHTVPGVCHRDVKPQNLLVDPLTHQVKICDFGSAKMLVKGEANISYICSRYYRAPELIFGATEYTTSIDIWSAGCVLAELLLGQPLFPGESAVDQLVEIIKVLGTPTREEIRCMNPNYTEFRFPQIKAHPWHKIFHKRMPPEAIDLASRLLQYSPNLRCTALEACAHPFFDDLREPHARLPNGRPFPPLFNFKQELANASPELINRLIPDHARRHLGLTLLPATGP

SEQ ID NO: 4905 - DNA, 1672 bp, Zea mays subsp. mays
  misc_feature (1)..(1672): Ceres Seq. ID no. 12349023
  misc_feature (1)..(1672): Ortholog of  Ceres SEQ ID NO 14313216 as cited in SEQ ID NO 66103
ccgtccactcctttggtctcaaatcctcaatcatgcccggaattttgtaccagctcgtcgtcgccgccgccatctgcgccctctccagcggcagcatcgcggtcgcctcaggtttgaatgcgaccgactcgttcctcgtctgcctcatcggcgccggcgtcccgccgcgcctccttcagaccccggcgtccccgtcgtactccgcgacgctgctctcatccttacgcaacctccgctacgtcacgtcggacattcagcggccggtcgccatcgtggccgccaccgagccagcccacgcgcaggcggccgtacgctgcggccgccgccacggcgtccgcgtccgcgcccgaagcggcgggcacgactacgagggcctatcctacgcctccctcgacccccgcgagcgcttcgccgtgctcgacctcgccgctttccgtgacgtccgcgtcgactccgcgcgcgccgaggcgtgggctggatcgggggccacgctcggcgaggtctactatgccgtcgccgccgccagccgcgtgctcgcgttccccgcggggatctgccccactgtcggcgtaggaggacacctcagcggcggcggcttcggcacgctgatgcgcaggtacggcctcgccgcggacaacgtcattgacgccgtcctcgttgacgccgacgggaggctgctgaaccggaccaccatgggggaggatctgttctgggccatccgcggtggcggcggggagagcttcggtgtcatactgtcttggaagctccgcctcgtgcgcgtgccggagacagtcaccgtgttcaccgtgcgccggtcaataaaccagtccgcctcccaactcatcaccaaatggcaggcaatcgcgccggcgctgcccagtgacctcatcctccgagtcgccgtccggagccagcccgcgcggtttgaggcactgttcctcggccgctgcagccgcctccttgagcacatgagagctcacttcccggaccttggcgtcacccaatcggactgcgaggagataagctggatccagtccaccgtgtacttcgccttctactcgagctccaagccactggagctgctcctggacaggagcggcgagacgcccagatacgtcaaggccaagtccgactacgtgcaagaacccatcccacggcacgtgtgggagagaacatggtcatggctggagaagcccgaggccgggctgctcatcctggacccctacggcggccggatgggcagcatctctccgtcagcgacgccgttcccgcaccggaaggggaacctgtacaacctccagtactactcgtattggttcgagaatggcactgcggcattggagaagcggatgagctgggtcagggggctgtacgaggagatggagccgtatgtgtccaagaacccaagaactggatatgtcaactacagggacctggatcttgggacgaacgagttggaggacaatgtgactagctacgccagggcgaggatctggggggagaagtatttcaaaggcaattttgagaggctggcagctgtgaaggccatggcggatcctgatgacttcttcaggaatgagcagagcatccctcctcttcccgctgcaaaaggatggggcttcatttgagtggtcgtttgtttcgtagctttgtggtggtggatttcttggct

SEQ ID NO: 4906 - protein, 541 aa, Zea mays subsp. mays
  peptide (1)..(541): Ceres Seq. ID no. 12349024
VHSFGLKSSIMPGILYQLVVAAAICALSSGSIAVASGLNATDSFLVCLIGAGVPPRLLQTPASPSYSATLLSSLRNLRYVTSDIQRPVAIVAATEPAHAQAAVRCGRRHGVRVRARSGGHDYEGLSYASLDPRERFAVLDLAAFRDVRVDSARAEAWAGSGATLGEVYYAVAAASRVLAFPAGICPTVGVGGHLSGGGFGTLMRRYGLAADNVIDAVLVDADGRLLNRTTMGEDLFWAIRGGGGESFGVILSWKLRLVRVPETVTVFTVRRSINQSASQLITKWQAIAPALPSDLILRVAVRSQPARFEALFLGRCSRLLEHMRAHFPDLGVTQSDCEEISWIQSTVYFAFYSSSKPLELLLDRSGETPRYVKAKSDYVQEPIPRHVWERTWSWLEKPEAGLLILDPYGGRMGSISPSATPFPHRKGNLYNLQYYSYWFENGTAALEKRMSWVRGLYEEMEPYVSKNPRTGYVNYRDLDLGTNELEDNVTSYARARIWGEKYFKGNFERLAAVKAMADPDDFFRNEQSIPPLPAAKGWGFI

SEQ ID NO: 4907 - protein, 531 aa, Zea mays subsp. mays
  peptide (1)..(531): Ceres Seq. ID no. 12349025
MPGILYQLVVAAAICALSSGSIAVASGLNATDSFLVCLIGAGVPPRLLQTPASPSYSATLLSSLRNLRYVTSDIQRPVAIVAATEPAHAQAAVRCGRRHGVRVRARSGGHDYEGLSYASLDPRERFAVLDLAAFRDVRVDSARAEAWAGSGATLGEVYYAVAAASRVLAFPAGICPTVGVGGHLSGGGFGTLMRRYGLAADNVIDAVLVDADGRLLNRTTMGEDLFWAIRGGGGESFGVILSWKLRLVRVPETVTVFTVRRSINQSASQLITKWQAIAPALPSDLILRVAVRSQPARFEALFLGRCSRLLEHMRAHFPDLGVTQSDCEEISWIQSTVYFAFYSSSKPLELLLDRSGETPRYVKAKSDYVQEPIPRHVWERTWSWLEKPEAGLLILDPYGGRMGSISPSATPFPHRKGNLYNLQYYSYWFENGTAALEKRMSWVRGLYEEMEPYVSKNPRTGYVNYRDLDLGTNELEDNVTSYARARIWGEKYFKGNFERLAAVKAMADPDDFFRNEQSIPPLPAAKGWGFI

SEQ ID NO: 4908 - protein, 339 aa, Zea mays subsp. mays
  peptide (1)..(339): Ceres Seq. ID no. 12349026
MRRYGLAADNVIDAVLVDADGRLLNRTTMGEDLFWAIRGGGGESFGVILSWKLRLVRVPETVTVFTVRRSINQSASQLITKWQAIAPALPSDLILRVAVRSQPARFEALFLGRCSRLLEHMRAHFPDLGVTQSDCEEISWIQSTVYFAFYSSSKPLELLLDRSGETPRYVKAKSDYVQEPIPRHVWERTWSWLEKPEAGLLILDPYGGRMGSISPSATPFPHRKGNLYNLQYYSYWFENGTAALEKRMSWVRGLYEEMEPYVSKNPRTGYVNYRDLDLGTNELEDNVTSYARARIWGEKYFKGNFERLAAVKAMADPDDFFRNEQSIPPLPAAKGWGFI

SEQ ID NO: 4909 - DNA, 1599 bp, Zea mays subsp. mays
  misc_feature (1)..(1599): Ceres Seq. ID no. 13498780
  misc_feature (1)..(1599): Ortholog of  Ceres SEQ ID NO 15168965 as cited in SEQ ID NO 20607
  misc_feature (1)..(1599): Ortholog of  Ceres SEQ ID NO 13597454 as cited in SEQ ID NO 64121
  misc_feature (1)..(1599): Ortholog of  Ceres SEQ ID NO 13623385 as cited in SEQ ID NO 0
ttgctgtcgcacggagaagaaaaaaaaaacaggcactgagctgagatggcgaagcacttggctgccatgtgcaggtgcagcctcctagtgcttgtactgctctgcttgggctcccagctggcccaatcccaggtcctcttccagggtttcaactgggagtcgtggaagaagcaaggtgggtggtacaactacctcctggggcgggtggacgacatcgccgcgacgggggccacgcacgtctggctcccgccgccgtcgcactcggtggcgccgcaggggtacatgcccggccggctctacgacctggacgcgtccaagtacggcacccacgcggagctcaagtcgctcaccgcggcgttccacgccaagggcgtcaagtgcgtcgccgacgtcgtgatcaaccaccgctgcgccgactacaaggacggccgcggcatctactgcgtcttcgagggcggcacgcccgacagccgcctcgactggggccccgacatgatctgcagcgacgacacgcagtactccaacgggcgcgggcaccgcgacacgggggccgacttcgccgccgcgcccgacatcgaccacctcaacccgcgcgtgcagcaggagctctcggactggctcaactggctcaagtccgacctcggcttcgacggctggcgcctcgacttcgccaagggctactccgccgccgtcgccaaggtgtacgtcgacagcaccgcccccaccttcgtcgtcgccgagatatggagctccctccactacgacggcaacggcgagccgtccagcaaccaggacgccgacaggcaggagctggtcaactgggcgcaggcggtgggcggccccgccgcggcgttcgacttcaccaccaagggcgtgctgcaggcggccgtccagggcgagctgtggcgcatgaaggacggcaacggcaaggcgcccgggatgatcggctggctgccggagaaggccgtcacgttcgtcgacaaccacgacaccggctccacgcagaactcgtggccattcccctccgacaaggtcatgcagggctacgcctatatcctcacgcacccaggaactccatgcatcttctacgaccacgttttcgactggaacctgaagcaggagatcagcgcgctgtctgcggtgaggtcaagaaacgggatccacccggggagcgagctgaacatcctcgccgccgacggggatctctacgtcgccaagattgacgacaaggtcatcgtgaagatcgggtcacggtacgacgtcgggaacctgatcccctcagacttccacgccgttgcccatggcaacaactactgcgtttgggagaagcacggtctgagagttccagcggggcggcaccactagactagacccattccgcccagcaacccctacagataattctcttttcaggtccattttgaacctggaaaagaaatttaagagaggctaaataaccggaatacgattgtgtactgagcttctttcacgtaattattgaaagaagattataatgtttggatgcactattaattatgttggcatggggatttttgtaacctcttaaaacgaggaaataaagactgttcttattaagcc

SEQ ID NO: 4910 - protein, 439 aa, Zea mays subsp. mays
  peptide (1)..(439): Ceres Seq. ID no. 13498781
MAKHLAAMCRCSLLVLVLLCLGSQLAQSQVLFQGFNWESWKKQGGWYNYLLGRVDDIAATGATHVWLPPPSHSVAPQGYMPGRLYDLDASKYGTHAELKSLTAAFHAKGVKCVADVVINHRCADYKDGRGIYCVFEGGTPDSRLDWGPDMICSDDTQYSNGRGHRDTGADFAAAPDIDHLNPRVQQELSDWLNWLKSDLGFDGWRLDFAKGYSAAVAKVYVDSTAPTFVVAEIWSSLHYDGNGEPSSNQDADRQELVNWAQAVGGPAAAFDFTTKGVLQAAVQGELWRMKDGNGKAPGMIGWLPEKAVTFVDNHDTGSTQNSWPFPSDKVMQGYAYILTHPGTPCIFYDHVFDWNLKQEISALSAVRSRNGIHPGSELNILAADGDLYVAKIDDKVIVKIGSRYDVGNLIPSDFHAVAHGNNYCVWEKHGLRVPAGRHH

SEQ ID NO: 4911 - protein, 432 aa, Zea mays subsp. mays
  peptide (1)..(432): Ceres Seq. ID no. 13498782
MCRCSLLVLVLLCLGSQLAQSQVLFQGFNWESWKKQGGWYNYLLGRVDDIAATGATHVWLPPPSHSVAPQGYMPGRLYDLDASKYGTHAELKSLTAAFHAKGVKCVADVVINHRCADYKDGRGIYCVFEGGTPDSRLDWGPDMICSDDTQYSNGRGHRDTGADFAAAPDIDHLNPRVQQELSDWLNWLKSDLGFDGWRLDFAKGYSAAVAKVYVDSTAPTFVVAEIWSSLHYDGNGEPSSNQDADRQELVNWAQAVGGPAAAFDFTTKGVLQAAVQGELWRMKDGNGKAPGMIGWLPEKAVTFVDNHDTGSTQNSWPFPSDKVMQGYAYILTHPGTPCIFYDHVFDWNLKQEISALSAVRSRNGIHPGSELNILAADGDLYVAKIDDKVIVKIGSRYDVGNLIPSDFHAVAHGNNYCVWEKHGLRVPAGRHH

SEQ ID NO: 4912 - protein, 360 aa, Zea mays subsp. mays
  peptide (1)..(360): Ceres Seq. ID no. 13498783
MPGRLYDLDASKYGTHAELKSLTAAFHAKGVKCVADVVINHRCADYKDGRGIYCVFEGGTPDSRLDWGPDMICSDDTQYSNGRGHRDTGADFAAAPDIDHLNPRVQQELSDWLNWLKSDLGFDGWRLDFAKGYSAAVAKVYVDSTAPTFVVAEIWSSLHYDGNGEPSSNQDADRQELVNWAQAVGGPAAAFDFTTKGVLQAAVQGELWRMKDGNGKAPGMIGWLPEKAVTFVDNHDTGSTQNSWPFPSDKVMQGYAYILTHPGTPCIFYDHVFDWNLKQEISALSAVRSRNGIHPGSELNILAADGDLYVAKIDDKVIVKIGSRYDVGNLIPSDFHAVAHGNNYCVWEKHGLRVPAGRHH

SEQ ID NO: 4913 - DNA, 1212 bp, Zea mays subsp. mays
  misc_feature (1)..(1212): Ceres Seq. ID no. 12353792
  misc_feature (1)..(1212): Ortholog of  Ceres SEQ ID NO 13639250 as cited in SEQ ID NO 56555
  misc_feature (1)..(1212): Ortholog of  Ceres SEQ ID NO 15177034 as cited in SEQ ID NO 60024
  misc_feature (1)..(1212): Ortholog of  Ceres SEQ ID NO 13598257 as cited in SEQ ID NO 63008
  misc_feature (1)..(1212): Ortholog of  Ceres SEQ ID NO 13597309 as cited in SEQ ID NO 63851
  misc_feature (1)..(1212): Ortholog of  Ceres SEQ ID NO 12599167 as cited in SEQ ID NO 64443
attacgcaccttcacataacactgcaaaagcactcctctcttcgtcctccccctcccacctccatcccatcacataccataccattccataccaccagagaagaaccagtctcgctcgctcccaactcccaagccaagccggatcccaaatcggcacagcgcacccactccgctcggtcccttcgttcacccccatcatccatccatccatccagccatgggcggcaaggactgcggcaaccacggcgaggacgacctgcggcggtcgtgccggcgcctgctagcgatcctcctagtcctggccctgatcgtgggcgtgatcgcgctgatcatctacctggtggtccggcccacgcacccgcgcttctacctacaggacgcgtcgctccagcagctagacctgtccaactccaccaccgcctcctccccctccgcgtcctcgtccctcctctccacgacgctgcaggtgacgctggcctcgcgcaacccgaacgagcgcgtgggggtgtactacgaccggctggacgtgtacgcgtcgtacaagtaccagcaggtgacggtggccgcggcgctgccggccgtgtaccagggccacggcgacgtggacgtgtggtcgcccgtgctgtcgggcgggcccggcgtccccttcgcgccctacctcgccgacgcgctccgccaggactgccaggcgggctacctcgtcctccaggtcaaggtcgacggccgcgtgcggtggaaggtcggcagctggatctccggccactaccacctcttcgtcacctgccccgcgttcctcgtcaccgccggcggcaacggcgcccccggcgcttccgggttcaggttccagaccaccacctactgccacgtcgaagtttaatagattaggagcgagaggaggaggagggaggggaaggaagcanagagaccatggtccatggctctgctgctcctcctgctgccgttgcctggtgtggtaataactctctctatctctctctctgtccgctgctggcgttactgctgcagtgatgcgggatgtaaaggaggggtaaaaaagttcctttcgttttcgcctccctcttttttttttgttttttttttttttgcatcttctccttcacctttccatatactactagtatgctctgtcgactgttgttcaaaggaagcttccaattgtcaataaacattttggatcggaggatcaattgc

SEQ ID NO: 4914 - protein, 294 aa, Zea mays subsp. mays
  peptide (1)..(294): Ceres Seq. ID no. 12353793
ITHLHITLQKHSSLRPPPPTSIPSHTIPFHTTREEPVSLAPNSQAKPDPKSAQRTHSARSLRSPPSSIHPSSHGRQGLRQPRRGRPAAVVPAPASDPPSPGPDRGRDRADHLPGGPAHAPALLPTGRVAPAARPVQLHHRLLPLRVLVPPLHDAAGDAGLAQPERARGGVLRPAGRVRVVQVPAGDGGRGAAGRVPGPRRRGRVVARAVGRARRPLRALPRRRAPPGLPGGLPRPPGQGRRPRAVEGRQLDLRPLPPLRHLPRVPRHRRRQRRPRRFRVQVPDHHLLPRRSLID

SEQ ID NO: 4915 - protein, 219 aa, Zea mays subsp. mays
  peptide (1)..(219): Ceres Seq. ID no. 12353794
MGGKDCGNHGEDDLRRSCRRLLAILLVLALIVGVIALIIYLVVRPTHPRFYLQDASLQQLDLSNSTTASSPSASSSLLSTTLQVTLASRNPNERVGVYYDRLDVYASYKYQQVTVAAALPAVYQGHGDVDVWSPVLSGGPGVPFAPYLADALRQDCQAGYLVLQVKVDGRVRWKVGSWISGHYHLFVTCPAFLVTAGGNGAPGASGFRFQTTTYCHVEV

SEQ ID NO: 4916 - DNA, 1301 bp, Zea mays subsp. mays
  misc_feature (1)..(1301): Ceres Seq. ID no. 12372750
  misc_feature (1)..(1301): Ortholog of  Ceres SEQ ID NO 14307776 as cited in SEQ ID NO 59397
gcacgagaccattacctagaacatcctaatcgaaaaatctttgcgcttggggcaatgacgcagcttatgaggtcataccgaggcgcgtcaattgctggttgaaaactatttccaaaccccctctttggcccactgggccactgagaatttctggaagggctccttttcctcggataagttcctattgagatcatcgcatcatttaggagaatgaagaaactcgttcaagacctctcagtaattgaagctgcactcaggacatcatcaaagctggttgtaagttcaaatgggaaacgggtcaggaggttacatccattgccacacaaagaattgaaagattcaaagaaaagcactgttttggtcgaaaatctacctccagatttctcaatggagagtattcaggaaaaattcgcaacagtgggcaaagttgtgaacataacaattaatgatccagaatcagtgaaagaattttcaactgctaagaagcctgacttcaatttaagttttaaggctcatgtacttgttgaatatgaagcagtggaggctgctgagaaggctgttactgccctaagtgatgagagcaactggagaactgggatgaaagtcaggcttctgtctaaacaaagtgtaatgggaccaggaaagtataaaaaaccttctaaagaaaatcaagatgcagtttccaaaatgattgatcagaatcaacattcaaaagaagaccagcttaaaaccttggaaaagatctccggtgctgatgcagtggggattaccaaggacagagataatttgaaacctgtttttatcactgagactgagcaccaagatcagaagccaaatgctagaggacgaaaaggatggtacaaaggtcaaggtcagatgcagcaaaatgcaaacaaacaaggcagttgtggttccgagtcattaaacaagcctatttctggaccgaggatgccagatggaacaaggggcttcacactgggacgtggtagatctcttccactacagaagtctgagaaggctgaagagtagagctaccaaaaaaggcctgttaagaaccttatccaaagaagctgggtaaaatctaacagaaaacctttgcttttttttttttgaaacttaagatcatcgaagccgttctttgcatggaatgggacacagaagaaagggaatcttggaatggctttctctctgcaagaaatggaacacaaaagggaatctgggaatgacttgtacagaaacacaattgtctgggggtagttccgagttcactcgtatggaacacagtagaacctttgcatgtc

SEQ ID NO: 4917 - protein, 272 aa, Zea mays subsp. mays
  peptide (1)..(272): Ceres Seq. ID no. 12372751
MKKLVQDLSVIEAALRTSSKLVVSSNGKRVRRLHPLPHKELKDSKKSTVLVENLPPDFSMESIQEKFATVGKVVNITINDPESVKEFSTAKKPDFNLSFKAHVLVEYEAVEAAEKAVTALSDESNWRTGMKVRLLSKQSVMGPGKYKKPSKENQDAVSKMIDQNQHSKEDQLKTLEKISGADAVGITKDRDNLKPVFITETEHQDQKPNARGRKGWYKGQGQMQQNANKQGSCGSESLNKPISGPRMPDGTRGFTLGRGRSLPLQKSEKAEE

SEQ ID NO: 4918 - protein, 213 aa, Zea mays subsp. mays
  peptide (1)..(213): Ceres Seq. ID no. 12372752
MESIQEKFATVGKVVNITINDPESVKEFSTAKKPDFNLSFKAHVLVEYEAVEAAEKAVTALSDESNWRTGMKVRLLSKQSVMGPGKYKKPSKENQDAVSKMIDQNQHSKEDQLKTLEKISGADAVGITKDRDNLKPVFITETEHQDQKPNARGRKGWYKGQGQMQQNANKQGSCGSESLNKPISGPRMPDGTRGFTLGRGRSLPLQKSEKAEE

SEQ ID NO: 4919 - protein, 143 aa, Zea mays subsp. mays
  peptide (1)..(143): Ceres Seq. ID no. 12372753
MKVRLLSKQSVMGPGKYKKPSKENQDAVSKMIDQNQHSKEDQLKTLEKISGADAVGITKDRDNLKPVFITETEHQDQKPNARGRKGWYKGQGQMQQNANKQGSCGSESLNKPISGPRMPDGTRGFTLGRGRSLPLQKSEKAEE

SEQ ID NO: 4920 - DNA, 1315 bp, Zea mays subsp. mays
  misc_feature (1)..(1315): Ceres Seq. ID no. 12434961
  misc_feature (1)..(1315): Ortholog of  Ceres SEQ ID NO 13598368 as cited in SEQ ID NO 62140
aagcaggatcatcatcatcagaagcagcagcaaggcaacatgtctcagcacggcggcctcggcgacacggcccggcggtggcgcgagctccacggcgacggcggctgggcgggaacgctggacccgctggacctcgacctgcggcgcaccgtgctccgctacggcgagatggcgcaggcgacctacgacgccttcaacaacgagcgggcgtcgccgcacgcggggctgtcccgcttcgccagggcgcgcttcttcgaccgggtgcggctgccggcgcacgccgccgcgtaccgggtcaccaggttcctgtacgccacgtcgtcggtggccgtgccggacgccttcatcctcaggtccgtgtccaggtcgcgccggtgcagggagtccaactggatcggctacgtcgcggtggccaccgacgaagggaaggccgcgctcggccgccgcgacgtcgtggtcgcgtggcgcggcaccatgcgggcgctggagtgggccgacgacctcgagttccccatggtgccgacgggaggcctcctcggggacggcgacgccatggtgcaccgcggctggctgtccatgtacacctccagcgacccggcgtccagccacaaccaggacagcgcacggcatcaggcgctgggcgaggtgcggaggctggtggacgcgtacaggggcgaggagctgagcatcaccgtgacgggccacagcctcggcgcggcgctagccacgctcaacgcgttcgacatcgccgccaacggctacaacgtgacggccacgggcgcggccgcctgcccggtgacctcgttcgcgttcgccagcccgcgcgtcggcggcggcggcttcaagaagcggttcgacgccgtcccggggctgcggctcctccgcgtccgcaacgcccgcgacgtggttcccaagtacccggtcgtgttcctaccacgacgtaggcgcggagctcgcgatcgacacgggggagtcgccgtacctgagaagccccgggggcgagcagacctggcacaacctcgaggtgtacctgcacggcgtggcgggcacgcggggcgcgcgcggcgggttcgagctcgccgtggcgcgggacgtggcgctggtgaacaaggcgtacgacgccctgcgggaccaccacggggtgccgccagggtggtgggtgccgctgaacaggggaatggtggagggcgccgacgggcgctggagcttggtggattgcgaggaggacgaggatgatgagtagtagacagcagacggagtaaacacttggcatgctggcggcagacaacatctgtagctgcccttgtgcgtcgcc

SEQ ID NO: 4921 - protein, 411 aa, Zea mays subsp. mays
  peptide (1)..(411): Ceres Seq. ID no. 12434962
KQDHHHQKQQQGNMSQHGGLGDTARRWRELHGDGGWAGTLDPLDLDLRRTVLRYGEMAQATYDAFNNERASPHAGLSRFARARFFDRVRLPAHAAAYRVTRFLYATSSVAVPDAFILRSVSRSRRCRESNWIGYVAVATDEGKAALGRRDVVVAWRGTMRALEWADDLEFPMVPTGGLLGDGDAMVHRGWLSMYTSSDPASSHNQDSARHQALGEVRRLVDAYRGEELSITVTGHSLGAALATLNAFDIAANGYNVTATGAAACPVTSFAFASPRVGGGGFKKRFDAVPGLRLLRVRNARDVVPKYPVVFLPRRRRGARDRHGGVAVPEKPRGRADLAQPRGVPARRGGHAGRARRVRARRGAGRGAGEQGVRRPAGPPRGAARVVGAAEQGNGGGRRRALELGGLRGGRG

SEQ ID NO: 4922 - protein, 398 aa, Zea mays subsp. mays
  peptide (1)..(398): Ceres Seq. ID no. 12434963
MSQHGGLGDTARRWRELHGDGGWAGTLDPLDLDLRRTVLRYGEMAQATYDAFNNERASPHAGLSRFARARFFDRVRLPAHAAAYRVTRFLYATSSVAVPDAFILRSVSRSRRCRESNWIGYVAVATDEGKAALGRRDVVVAWRGTMRALEWADDLEFPMVPTGGLLGDGDAMVHRGWLSMYTSSDPASSHNQDSARHQALGEVRRLVDAYRGEELSITVTGHSLGAALATLNAFDIAANGYNVTATGAAACPVTSFAFASPRVGGGGFKKRFDAVPGLRLLRVRNARDVVPKYPVVFLPRRRRGARDRHGGVAVPEKPRGRADLAQPRGVPARRGGHAGRARRVRARRGAGRGAGEQGVRRPAGPPRGAARVVGAAEQGNGGGRRRALELGGLRGGRG

SEQ ID NO: 4923 - protein, 355 aa, Zea mays subsp. mays
  peptide (1)..(355): Ceres Seq. ID no. 12434964
MAQATYDAFNNERASPHAGLSRFARARFFDRVRLPAHAAAYRVTRFLYATSSVAVPDAFILRSVSRSRRCRESNWIGYVAVATDEGKAALGRRDVVVAWRGTMRALEWADDLEFPMVPTGGLLGDGDAMVHRGWLSMYTSSDPASSHNQDSARHQALGEVRRLVDAYRGEELSITVTGHSLGAALATLNAFDIAANGYNVTATGAAACPVTSFAFASPRVGGGGFKKRFDAVPGLRLLRVRNARDVVPKYPVVFLPRRRRGARDRHGGVAVPEKPRGRADLAQPRGVPARRGGHAGRARRVRARRGAGRGAGEQGVRRPAGPPRGAARVVGAAEQGNGGGRRRALELGGLRGGRG

SEQ ID NO: 4924 - DNA, 1013 bp, Zea mays subsp. mays
  misc_feature (1)..(1013): Ceres Seq. ID no. 13498777
  misc_feature (1)..(1013): Ortholog of  Ceres SEQ ID NO 13494980 as cited in SEQ ID NO 51049
gttcctgttcccctcggcgacgccagtacggcagtacgccacgccagtgcccagttgcattgactcctccccggtccccacatcttgccgccaatggatgtcgacgggcccgcccccgccgacgcctctgccaggcccgccaccaacggcgaggccccctccggcgcccgcgaggtcgacgtcggcgaggaggacacgctcgccggcgtcctccgcagcttcgtcgacggcgtctggtacccggacgagcctctgctccggcggctccgggcggcgtcctgcgacgccgcgccgcgcctgaggggggcgtcccggaactccgcgcgggacctgcttgagtggaccaggcggggcagcggcctccgcgccatcctcgtcatctcggtcgggacaatcacgcttatagcattgactggccttctgaccttcatgttcttcctattggttgccactgctaatgcgatcattgtctcagtcttgatgtcactggccgctgccggaggattcttggccatcttctttgcttgcttggttgcagtgtatattggagcagtatcagttgctatctttgtcatttctgcgactgttatctcagcagttgttggaattttggttgctaccggttgggttgggttcttctggattatctggttcaccgcaaggaagagcatggtcctgacgaagcactccttcggcatgacgagctcggcaatccaatcgtattccgcgtcccggcaagtgaagcagaagcctgtcgactgaggctagttggttgcgtcctgtatgaagcggatatatctatctatgtgaatcacggttttgctgtttgtttgtttgtaagagtgtagaagacagcttgcttgttgcggcagctctgtttctctcggtgactaggtgtataatgctagctctgaactttggcagcatgtacgttcggcatggcggtcaatgctgttatttaaaggatagtgagcagatgttaatgtttatagcaaataaaagcatgttaatgt

SEQ ID NO: 4925 - protein, 222 aa, Zea mays subsp. mays
  peptide (1)..(222): Ceres Seq. ID no. 13498778
MDVDGPAPADASARPATNGEAPSGAREVDVGEEDTLAGVLRSFVDGVWYPDEPLLRRLRAASCDAAPRLRGASRNSARDLLEWTRRGSGLRAILVISVGTITLIALTGLLTFMFFLLVATANAIIVSVLMSLAAAGGFLAIFFACLVAVYIGAVSVAIFVISATVISAVVGILVATGWVGFFWIIWFTARKSMVLTKHSFGMTSSAIQSYSASRQVKQKPVD

SEQ ID NO: 4926 - protein, 111 aa, Zea mays subsp. mays
  peptide (1)..(111): Ceres Seq. ID no. 13498779
SCSPRRRQYGSTPRQCPVALTPPRSPHLAANGCRRARPRRRLCQARHQRRGPLRRPRGRRRRGGHARRRPPQLRRRRLVPGRASAPAAPGGVLRRRAAPEGGVPELRAGPA

SEQ ID NO: 4927 - DNA, 1536 bp, Zea mays subsp. mays
  misc_feature (1)..(1536): Ceres Seq. ID no. 12407772
  misc_feature (1)..(1536): Ortholog of  Ceres SEQ ID NO 13638402 as cited in SEQ ID NO 60300
  misc_feature (1)..(1536): Ortholog of  Ceres SEQ ID NO 12618349 as cited in SEQ ID NO 64838
  misc_feature (1)..(1536): Ortholog of  Ceres SEQ ID NO 15176161 as cited in SEQ ID NO 0
aaacctaacagaagcaaccgaatatcccctcgcctttcaactcgtcttcctcctcatgtcgtcgcctcctatccctctatatcttctattctaagccacctcgatcggaccctagatagatgcaagaaaagaaaagagaagagcctctgtggatagtggtgggtgctggatcactgggcggagcagcttctcatatcggatcgatcgattaattaatatatactataaacatacaatcaattacatacatatacgccaagagaagaggaacgccggcccgtttcacttgtctccttcctccgatccctcccggcggccggccgggctcgggcgtttttccccttttgtttcccatggaggacgccaagatggggaacggcgccaccatccgcgcggtgctcgccatcctccagtggtggggattcaacgtcaccgtcatcatcatcaacaagtggatcttccagaaactggagttcaagttccccctgacggtgtcgtgcgtccacttcatatgttcctccatcggagcctacatcgcgatcaaagtcctgagaacgaagccgctgatcgaggtggcctcggaggaccggtggaggaggatattccccatgtcgttggtgttctgcgtcaacatcgtgctggggaacgtgagcctgaggtacataccagtgtcattcatgcagacgatcaagtcgttcactccggcaacgacagtggttcttcagtggctggtttggaggaaatactttgagtggcgcatctgggcgtccttggtgcccatcgttggaggaatccttgtcacctccgtgacggagctgagcttcaacacggctggcttctgcgccgcgctggtggggtgcctggccacgtccaccaagaccatcctggcagagtcgctgctccacggctacaagttcgacagcatcaacacggtgtactacatggctccgctggccacgctgatcctgtcggtgccggccgtggcgctggagggcggcgccgtgctggggtggctgcggacgcacgagtccgtgggaccggcgctggcggtcgtcgtcacctccggggtgctggccttctgcctcaacttctccatcttctacgtcatccactccacgacggcagtcaccttcaacgtggccggcaacctcaaggtggccgtggcggtgctggcgtcctggatggtgttccggaaccccatctccgccatgaacgcactcggctgcggcgtcacgctcgtcggatgcaccttctacggctacgtcaggcaccgactctcgcagaaccaggcgcccagagcccgcttggagatgctgccgctcaccgccgtcgacaagcaaggcgacaagatataaaaagtcttttcgaataaaccatctgattctttctgatccacctagcctaaccgccgatcgagaatgcatccaccatcagagatgacaggaaattattttttgttggcagccagattttgataatgagtcagttcagttgttgcttaaagagaaatgtcatgaggtctataaagtcttttgg

SEQ ID NO: 4928 - protein, 333 aa, Zea mays subsp. mays
  peptide (1)..(333): Ceres Seq. ID no. 12407773
MEDAKMGNGATIRAVLAILQWWGFNVTVIIINKWIFQKLEFKFPLTVSCVHFICSSIGAYIAIKVLRTKPLIEVASEDRWRRIFPMSLVFCVNIVLGNVSLRYIPVSFMQTIKSFTPATTVVLQWLVWRKYFEWRIWASLVPIVGGILVTSVTELSFNTAGFCAALVGCLATSTKTILAESLLHGYKFDSINTVYYMAPLATLILSVPAVALEGGAVLGWLRTHESVGPALAVVVTSGVLAFCLNFSIFYVIHSTTAVTFNVAGNLKVAVAVLASWMVFRNPISAMNALGCGVTLVGCTFYGYVRHRLSQNQAPRARLEMLPLTAVDKQGDKI

SEQ ID NO: 4929 - protein, 328 aa, Zea mays subsp. mays
  peptide (1)..(328): Ceres Seq. ID no. 12407774
MGNGATIRAVLAILQWWGFNVTVIIINKWIFQKLEFKFPLTVSCVHFICSSIGAYIAIKVLRTKPLIEVASEDRWRRIFPMSLVFCVNIVLGNVSLRYIPVSFMQTIKSFTPATTVVLQWLVWRKYFEWRIWASLVPIVGGILVTSVTELSFNTAGFCAALVGCLATSTKTILAESLLHGYKFDSINTVYYMAPLATLILSVPAVALEGGAVLGWLRTHESVGPALAVVVTSGVLAFCLNFSIFYVIHSTTAVTFNVAGNLKVAVAVLASWMVFRNPISAMNALGCGVTLVGCTFYGYVRHRLSQNQAPRARLEMLPLTAVDKQGDKI

SEQ ID NO: 4930 - protein, 248 aa, Zea mays subsp. mays
  peptide (1)..(248): Ceres Seq. ID no. 12407775
MSLVFCVNIVLGNVSLRYIPVSFMQTIKSFTPATTVVLQWLVWRKYFEWRIWASLVPIVGGILVTSVTELSFNTAGFCAALVGCLATSTKTILAESLLHGYKFDSINTVYYMAPLATLILSVPAVALEGGAVLGWLRTHESVGPALAVVVTSGVLAFCLNFSIFYVIHSTTAVTFNVAGNLKVAVAVLASWMVFRNPISAMNALGCGVTLVGCTFYGYVRHRLSQNQAPRARLEMLPLTAVDKQGDKI

SEQ ID NO: 4931 - DNA, 1161 bp, Zea mays subsp. mays
  misc_feature (1)..(1161): Ceres Seq. ID no. 12435127
  misc_feature (1)..(1161): Ortholog of  Ceres SEQ ID NO 15172792 as cited in SEQ ID NO 52134
  misc_feature (1)..(1161): Ortholog of  Ceres SEQ ID NO 13502622 as cited in SEQ ID NO 56443
  misc_feature (1)..(1161): Ortholog of  Ceres SEQ ID NO 12624901 as cited in SEQ ID NO 62597
acctctaaaatcccccagcggcccaaccgaacccgcctagggattcctaccgagggaggccgcacgcagccatggatttcctgcaggagcaaagcgtcgagaccacagtggccgtcgccgtcgctgtcgccgccgtcgccgcaggcggcgccttcctcctccttcgatccaggaagcccaagggctgcttggatcctgagaacttcaggaagttcaaacttgttgaaaagaagcaaataagtcataatgttgccaggttcaagttcgctcttccaactccaacttctgtattgggccttccaatcggtcaacatatcagctgcagaggacaagacgctacaggtgaagaagtaatcaagccttatacccctactacattggattctgatcttggatattttgagcttgtcataaagatgtatccccaagggagaatgtcccatcatttccgcgagatgaaagttggtgattatttgtctgtgaagggacctaagggccgattcaagtaccacgttggccaagtgagggcatttggaatgctggctggtggatcaggcattactccaatgtttcaagttgccagagcaattcttgagaaccctaatgacaacaccaaggttcacttaatttatgctaatgtcacatatgaagacattcttctgaaggatgagctggacgacatggccaaaacctatcctggccgctttaagatctactatgtgttgaatcagcctcctgagaactggaacggtggtgttgggtttgtgtctaaggaaatgatccaatctcattgtccagcgcctgctgaggacattcagatcctgagatgtggtcctcctccgatgaacaaggccatggctgcacaccttgacgagctcaactacacaaaggagatgcagttccagttctaagcaatgttaagtttgcaaataataattagtgaccgacatggttcttcggtcacaggaatagtacctgactctgctcgttagctgatatcaggaggaattcaggatcacatgatgattagtagtgcgccagcattttttgcaatctctatttttgaggtcaaatgatatctacctccacataaatccacattggcagagacaacattttgttactatcattattgattttaaatgtggaccattggatgcg

SEQ ID NO: 4932 - protein, 279 aa, Zea mays subsp. mays
  peptide (1)..(279): Ceres Seq. ID no. 12435128
MDFLQEQSVETTVAVAVAVAAVAAGGAFLLLRSRKPKGCLDPENFRKFKLVEKKQISHNVARFKFALPTPTSVLGLPIGQHISCRGQDATGEEVIKPYTPTTLDSDLGYFELVIKMYPQGRMSHHFREMKVGDYLSVKGPKGRFKYHVGQVRAFGMLAGGSGITPMFQVARAILENPNDNTKVHLIYANVTYEDILLKDELDDMAKTYPGRFKIYYVLNQPPENWNGGVGFVSKEMIQSHCPAPAEDIQILRCGPPPMNKAMAAHLDELNYTKEMQFQF

SEQ ID NO: 4933 - protein, 164 aa, Zea mays subsp. mays
  peptide (1)..(164): Ceres Seq. ID no. 12435129
MYPQGRMSHHFREMKVGDYLSVKGPKGRFKYHVGQVRAFGMLAGGSGITPMFQVARAILENPNDNTKVHLIYANVTYEDILLKDELDDMAKTYPGRFKIYYVLNQPPENWNGGVGFVSKEMIQSHCPAPAEDIQILRCGPPPMNKAMAAHLDELNYTKEMQFQF

SEQ ID NO: 4934 - protein, 158 aa, Zea mays subsp. mays
  peptide (1)..(158): Ceres Seq. ID no. 12435130
MSHHFREMKVGDYLSVKGPKGRFKYHVGQVRAFGMLAGGSGITPMFQVARAILENPNDNTKVHLIYANVTYEDILLKDELDDMAKTYPGRFKIYYVLNQPPENWNGGVGFVSKEMIQSHCPAPAEDIQILRCGPPPMNKAMAAHLDELNYTKEMQFQF

SEQ ID NO: 4935 - DNA, 1102 bp, Zea mays subsp. mays
  misc_feature (1)..(1102): Ceres Seq. ID no. 12349061
  misc_feature (1)..(1102): Ortholog of  Ceres SEQ ID NO 15173146 as cited in SEQ ID NO 61836
  misc_feature (1)..(1102): Ortholog of  Ceres SEQ ID NO 14309121 as cited in SEQ ID NO 0
aaaggagtatcacgagcgtcgaggtcgagcgaacccaacgcatctccgcagttagcagcacgcacccagagcaagcccaagtgcccaatcaacaaacccagaccgccagacggcaaccgttgtcatccctcactccacggcgccggccatcgtcactcacacgcccagcaccgcagcacgacaccatcgcgccctggccatcctcccgttcacgtgcacctaccgcacgcaccaccgcggaaagtaaccccgagatccagcgccatcggcacgaccaggcctgtccagggatggggcggagaggggagccctactacgtcgaagcggcgccgccggtggacgtgaacaagaacacagagtggttcatgtacccgggcgtctggaccacctacatcctcctgctcttcttcgcttggctcctcgtcctctccgtctctggttgctcccccggagcagcctggaccgtcgtaaacctcgcgcacttcgccatcacttaccacttcttccattggaagaaaggaaccccttttgctgctgatgaccaaggcatctacagcagattgacatggtgggagcaaattgacaatggtcagcagcttactcggaacagaaagtttttgactgtggtacctgtggtgctgtatctgatcgcatcgcacttgactgactacaagcagccgatgtttttcctcaatacaatggcagtttttgtgctagttgtggcaaaattgccaaacatgcacaaggtccgcatatttggaatcaatggagacatctgaggaccactgcaggaagtacatggatgcaatgccatgatgtgatgaagagctaaacagaacaagcagtgtgtttctcaaacttgacacaactgtctgtaatatatgtacaggtttaggaagaactgtaaatgttactctaccatagaagctttgccagcggactggcctgtgttgttgccgttgctgctttcttttgagtttcactggaaggggaaacggtaactccggtaaacaaccaccagcatgtggataagaaataaggaagtgtgtagcagatgctatttggtatctggttcgattgaaccaagaaatcagttaagttc

SEQ ID NO: 4936 - protein, 258 aa, Zea mays subsp. mays
  peptide (1)..(258): Ceres Seq. ID no. 12349062
RSITSVEVERTQRISAVSSTHPEQAQVPNQQTQTARRQPLSSLTPRRRPSSLTRPAPQHDTIAPWPSSRSRAPTARTTAESNPEIQRHRHDQACPGMGRRGEPYYVEAAPPVDVNKNTEWFMYPGVWTTYILLLFFAWLLVLSVSGCSPGAAWTVVNLAHFAITYHFFHWKKGTPFAADDQGIYSRLTWWEQIDNGQQLTRNRKFLTVVPVVLYLIASHLTDYKQPMFFLNTMAVFVLVVAKLPNMHKVRIFGINGDI

SEQ ID NO: 4937 - protein, 162 aa, Zea mays subsp. mays
  peptide (1)..(162): Ceres Seq. ID no. 12349063
MGRRGEPYYVEAAPPVDVNKNTEWFMYPGVWTTYILLLFFAWLLVLSVSGCSPGAAWTVVNLAHFAITYHFFHWKKGTPFAADDQGIYSRLTWWEQIDNGQQLTRNRKFLTVVPVVLYLIASHLTDYKQPMFFLNTMAVFVLVVAKLPNMHKVRIFGINGDI

SEQ ID NO: 4938 - protein, 137 aa, Zea mays subsp. mays
  peptide (1)..(137): Ceres Seq. ID no. 12349064
MYPGVWTTYILLLFFAWLLVLSVSGCSPGAAWTVVNLAHFAITYHFFHWKKGTPFAADDQGIYSRLTWWEQIDNGQQLTRNRKFLTVVPVVLYLIASHLTDYKQPMFFLNTMAVFVLVVAKLPNMHKVRIFGINGDI

SEQ ID NO: 4939 - DNA, 1794 bp, Zea mays subsp. mays
  misc_feature (1)..(1794): Ceres Seq. ID no. 12413946
  misc_feature (1)..(1794): Ortholog of  Ceres SEQ ID NO 14311922 as cited in SEQ ID NO 51539
agagctgccagcctgccactgagtgaggaaccctaagcggcgcactgtgcaggcgacggccgacgggggatacggcgacatcgtccccctcgacccctcctccatccccgacgcggcggcgccagcctgcagccctgcaggtgctggactagagtcgaatgctaggcggatgctagctgctaggtgttgaatgctgatttgttgtggcctgttacgtcttcaccagttcatatattaaacttgaagaaccacgtggttgaagaaaagcccactgaaaatgagtaatacatcatcttcgtcaagtgggatgtgatatatgctgatattccaaagctcattccatttattgatctgttgggctgttccctccctaaaccccagcgtcgcctccgacaagtcaccgctccgtcggctgcttgctgcagtccaggccacgcgctacgccgtcacggtcgctcctcccgtgacgcagccgtcgctaggcgccgcctatttctcggacaaagtcgctcgccaccatggtggcagcgtccgctgccgcagaagccagcggcgagagtaaaaacgaattcctcatacgcgacgacgcgccggggctactcgccgctctcaaggagatgaaggatggactggacctcgtcaggggcaaggttgaggccatcacgcggaaggtcaaggcgaaccagttgccggcggccaacgggatcgggtacctagaagcgaagaaccacctgctccttggctattgccaggacatcgtctactacctgctccgcaaggccaaggggctctcggtggatggccaccccgtcgtacggagccttgtcgagattaggctgtttctggagaagattcgtccgattgacaagaaggcagagtaccaaatccagaagctcaccgatgccgctgacaatgccactgttcgagagaaatcaggaaatgcagaggcgaaggggaaggacgggcattcggatgaggaagacctcctgaagtataggccaaacccagatatgatggacacaaagcctggtcctgatgggcaggatactgatggtgtttaccgccctccgaaatttatgcctactagcatggatgatgaagagaaacgtcgtaaaaaagattcaaggagagataaagcgatagcccgagtggcaatagaaaacccttatattaaagagataatcgatgatgctgcggacagacctgaagagtggaaggaaacagtgggcgatgaaagcagagaatttgggaggtacatgcgacagagagaagagcaagagaagcaggaagaggagttgttcactcgggctcctgtaaccaaacgtgataagcagatcgagaagcgcataaggagacaacttcatgggctaggaggcttaactgatggtttcgaccttgggatgaacatgctgttgggaggagacaaggaagatgatggcggttcaagcaagtcgcatggcaagagcggaaaccgaaagaagcacctgaagagcagcaagaagaggaagaggcattagctctggacccacactgctgtagcacttcaacataccgatacagcctagagacggttcaagcaatccacacggaaagttgaagctggagaaaataccaagaaaccaagtagagaaaaaaactttggttcctgtaggaaagttgaagctggagaaaataccaagaaaccaagtagagaaaaaaagctttggttcctgtaggcgtattatttctgaaacagaaaacttgatctgaacgactgatcctgagccaatggaacagtatgaattatatggcttg

SEQ ID NO: 4940 - protein, 332 aa, Zea mays subsp. mays
  peptide (1)..(332): Ceres Seq. ID no. 12413947
MVAASAAAEASGESKNEFLIRDDAPGLLAALKEMKDGLDLVRGKVEAITRKVKANQLPAANGIGYLEAKNHLLLGYCQDIVYYLLRKAKGLSVDGHPVVRSLVEIRLFLEKIRPIDKKAEYQIQKLTDAADNATVREKSGNAEAKGKDGHSDEEDLLKYRPNPDMMDTKPGPDGQDTDGVYRPPKFMPTSMDDEEKRRKKDSRRDKAIARVAIENPYIKEIIDDAADRPEEWKETVGDESREFGRYMRQREEQEKQEEELFTRAPVTKRDKQIEKRIRRQLHGLGGLTDGFDLGMNMLLGGDKEDDGGSSKSHGKSGNRKKHLKSSKKRKRH

SEQ ID NO: 4941 - protein, 299 aa, Zea mays subsp. mays
  peptide (1)..(299): Ceres Seq. ID no. 12413948
MKDGLDLVRGKVEAITRKVKANQLPAANGIGYLEAKNHLLLGYCQDIVYYLLRKAKGLSVDGHPVVRSLVEIRLFLEKIRPIDKKAEYQIQKLTDAADNATVREKSGNAEAKGKDGHSDEEDLLKYRPNPDMMDTKPGPDGQDTDGVYRPPKFMPTSMDDEEKRRKKDSRRDKAIARVAIENPYIKEIIDDAADRPEEWKETVGDESREFGRYMRQREEQEKQEEELFTRAPVTKRDKQIEKRIRRQLHGLGGLTDGFDLGMNMLLGGDKEDDGGSSKSHGKSGNRKKHLKSSKKRKRH

SEQ ID NO: 4942 - protein, 168 aa, Zea mays subsp. mays
  peptide (1)..(168): Ceres Seq. ID no. 12413949
MMDTKPGPDGQDTDGVYRPPKFMPTSMDDEEKRRKKDSRRDKAIARVAIENPYIKEIIDDAADRPEEWKETVGDESREFGRYMRQREEQEKQEEELFTRAPVTKRDKQIEKRIRRQLHGLGGLTDGFDLGMNMLLGGDKEDDGGSSKSHGKSGNRKKHLKSSKKRKRH

SEQ ID NO: 4943 - DNA, 1718 bp, Zea mays subsp. mays
  misc_feature (1)..(1718): Ceres Seq. ID no. 12391349
  misc_feature (1)..(1718): Ortholog of  Ceres SEQ ID NO 15171805 as cited in SEQ ID NO 57433
  misc_feature (1)..(1718): Ortholog of  Ceres SEQ ID NO 13596743 as cited in SEQ ID NO 62731
aaaaaaactcacatcgttccctacaccctactccctccgtcagccagcgaagttccttcagtcactcaacaccttacgtccctagccatcctccgccgcctccgtctctgcttccctagagccgtcgcgatggcagcagcccctgccggtgcccctgcaatcaccgcatcctcctcctttgtttcttcgtctccgttctgtctcaaggcatcgatgaccagccagcgccgacccgcggggagagtctccatcgtcatccgctgcgtcagtagcccgccggccgtcgacacatctttcaagactaatgtcccgcgcaatgctaatatggccaaactccaagcaggatatttgtttcctgagattgccaggagaagagccgctcatttgctgaagtttccagatgccaaaattataagccttggaataggcgacactaccgagcccattccaaatgtcataacaaatgccatggcagagagagcacatgccttgtcaacaattgatggctacagcggttatggagctgagcaaggtgaaaagaaactcagagcagcaattgctgcaacctactatgcggaccttggtattgaagattcagacatatttgtctctgatggtgccaaatgtgacatatctcgcttgcaggtcctttttggatctaatgtgacaattgcggtccaagatccatcataccctgcatatgttgattcaagtgttatcatggggcaaactgatttatatcagcaagacgttcagaagtatggaaacattgagtacatgagatgcggtccagaaaatggattttttcctgatctgtcaactgtccctaggacagatattattttcttttgttcacccaacaatcctactggtgctgctgcatctcgggaccaactaaccaaattagtaaaatttgcaaaggacaacgggtccatcatagtctatgattctgcttatgcaatgtacatatcagatgacagcccaaagtctatctttgaaattcctggagcaaaggaggttgctattgagacagcctcattctcgaaatacgctgggttcacaggtgtccgtntaggttggactgttgtccccaaggagctccttttctcggatggacatccagttgctaaagatttcaatcgcatagtttgcacttgcttcaatggtgcatcaaacattgcgcaagctggtggtttagcctgcctctctccagacggtctaaaggctatgcaagatgttgttggcttctacaaggagaacactgaaataatcgttgagacatttacatcactcggattcaacgtgtatggcgccaagaacgctccatacgtatgggtgcacttccctggccgcaattcgtgggatgtgttcgctgagatcctggagaaggccaatgtggtcactactcctggcactggatttggaccgggtggcgaaggctttgtgagggtcagcgcgttcgggcacagagagaacatcattgaagccgcaaggaggttaaagcagctgtataagtgagcaccgatgcagcttctgtgccctcctagacagatgtatcaataagaacacatcagggcaccaaaaatcgcttggtgaagctgccagaagatgttagattttgaacttttttttttaattctcgtgcggtgtctacattcaaaccatttcgaactctagacaatgcttgttgtaatcctgagacccttcattcactggtg

SEQ ID NO: 4944 - protein, 505 aa, Zea mays subsp. mays
  peptide (1)..(505): Ceres Seq. ID no. 12391350
  misc_feature (358)..(358): Xaa is any aa, unknown or other
KKTHIVPYTLLPPSASEVPSVTQHLTSLAILRRLRLCFPRAVAMAAAPAGAPAITASSSFVSSSPFCLKASMTSQRRPAGRVSIVIRCVSSPPAVDTSFKTNVPRNANMAKLQAGYLFPEIARRRAAHLLKFPDAKIISLGIGDTTEPIPNVITNAMAERAHALSTIDGYSGYGAEQGEKKLRAAIAATYYADLGIEDSDIFVSDGAKCDISRLQVLFGSNVTIAVQDPSYPAYVDSSVIMGQTDLYQQDVQKYGNIEYMRCGPENGFFPDLSTVPRTDIIFFCSPNNPTGAAASRDQLTKLVKFAKDNGSIIVYDSAYAMYISDDSPKSIFEIPGAKEVAIETASFSKYAGFTGVRXGWTVVPKELLFSDGHPVAKDFNRIVCTCFNGASNIAQAGGLACLSPDGLKAMQDVVGFYKENTEIIVETFTSLGFNVYGAKNAPYVWVHFPGRNSWDVFAEILEKANVVTTPGTGFGPGGEGFVRVSAFGHRENIIEAARRLKQLYK

SEQ ID NO: 4945 - protein, 462 aa, Zea mays subsp. mays
  peptide (1)..(462): Ceres Seq. ID no. 12391351
  misc_feature (315)..(315): Xaa is any aa, unknown or other
MAAAPAGAPAITASSSFVSSSPFCLKASMTSQRRPAGRVSIVIRCVSSPPAVDTSFKTNVPRNANMAKLQAGYLFPEIARRRAAHLLKFPDAKIISLGIGDTTEPIPNVITNAMAERAHALSTIDGYSGYGAEQGEKKLRAAIAATYYADLGIEDSDIFVSDGAKCDISRLQVLFGSNVTIAVQDPSYPAYVDSSVIMGQTDLYQQDVQKYGNIEYMRCGPENGFFPDLSTVPRTDIIFFCSPNNPTGAAASRDQLTKLVKFAKDNGSIIVYDSAYAMYISDDSPKSIFEIPGAKEVAIETASFSKYAGFTGVRXGWTVVPKELLFSDGHPVAKDFNRIVCTCFNGASNIAQAGGLACLSPDGLKAMQDVVGFYKENTEIIVETFTSLGFNVYGAKNAPYVWVHFPGRNSWDVFAEILEKANVVTTPGTGFGPGGEGFVRVSAFGHRENIIEAARRLKQLYK

SEQ ID NO: 4946 - protein, 434 aa, Zea mays subsp. mays
  peptide (1)..(434): Ceres Seq. ID no. 12391352
  misc_feature (287)..(287): Xaa is any aa, unknown or other
MTSQRRPAGRVSIVIRCVSSPPAVDTSFKTNVPRNANMAKLQAGYLFPEIARRRAAHLLKFPDAKIISLGIGDTTEPIPNVITNAMAERAHALSTIDGYSGYGAEQGEKKLRAAIAATYYADLGIEDSDIFVSDGAKCDISRLQVLFGSNVTIAVQDPSYPAYVDSSVIMGQTDLYQQDVQKYGNIEYMRCGPENGFFPDLSTVPRTDIIFFCSPNNPTGAAASRDQLTKLVKFAKDNGSIIVYDSAYAMYISDDSPKSIFEIPGAKEVAIETASFSKYAGFTGVRXGWTVVPKELLFSDGHPVAKDFNRIVCTCFNGASNIAQAGGLACLSPDGLKAMQDVVGFYKENTEIIVETFTSLGFNVYGAKNAPYVWVHFPGRNSWDVFAEILEKANVVTTPGTGFGPGGEGFVRVSAFGHRENIIEAARRLKQLYK

SEQ ID NO: 4947 - DNA, 1447 bp, Zea mays subsp. mays
  misc_feature (1)..(1447): Ceres Seq. ID no. 12344064
  misc_feature (1)..(1447): Ortholog of  Ceres SEQ ID NO 15170501 as cited in SEQ ID NO 52774
  misc_feature (1)..(1447): Ortholog of  Ceres SEQ ID NO 14314168 as cited in SEQ ID NO 59439
gaccaaacccttctccctctcacaaaaccctagctttccctcctcccctgttttgcggcgcgccacgaactcgcgacgctctcgagagatccatggatcgggcgcaagggcggcaaccgcgacgccaacggcagcctggtcgaggccacggcgtcgcggctgagggtcgaatccgacgaggaggcggaagaggtggggatggaggtggaagagagcttcgacgcgggggtggaagacgagcaggcggcggcggaggtgattggaagcgaaaagaccagcgccgactactacttcgactcctactcccacttcggtattcatgaagaaatgctaaaagatgtcgttcggacaaaaacatatcaaaatgttatcacccagagtagctttcttatcaagaacaaagtagtccttgatgttggtgctggaactggaattctttctcttttctgtgcaaaagcaggagctaaacatgtctatgcgattgaatgttcccagatggcagacatggcacaggaaattgtaaaatcaaatggatattcagatgtcataactgtaataaaagggaaagtggaagaaatagaacttccagtcccaaaagtagatgtcatcatctcagagtggatgggctatttcctcctgttcgagaatatgttgaacactgtcctatatgcacgtgataaatggcttgctgatggtggtgtggtcctgccagacaggacttctttgcgtcttactgcgattgaagacgcagaatataaggaagacaaaattgaattttggaataatgtatatggatttgatatgagctgcataaagaaacaggcgatgatggagccactggtagatacagtggatgcaaatcagattgtcactaactgccagttactgaagacaatggatatctccaaaatgaccccaggtgacgcgtcctttactgtaccattcaagctggtagcagagcggaatgattacattcatgctcttgtcgcatactttgacgtgtcgttcaccaaatgccataagctgatgggcttctcaacaggcccgagatcgaaagccactcactggaagcaaactgttctctacctggaggatgttataactatctgtcagggggaaagcctgagtggttccatgacagtcacacccaataagagtaaccctcgagatatcgacattaagctcaagtactccataaatgggcataggtgtcaggtatcaagaacacagttctacaagatgcggtgacaatggaacaaacaagagttgcttcaaatctcattaaattttgtttaacgagtatcttgtttgacagaaattgtgctatttttattgttcatgtactatgcatcaaatattagattctttggaatctagcaaaagtagggagtagattaaactggtctgctgatatgagattgatgtagtgcaaaactgtcatattgcc

SEQ ID NO: 4948 - protein, 349 aa, Zea mays subsp. mays
  peptide (1)..(349): Ceres Seq. ID no. 12344065
MEVEESFDAGVEDEQAAAEVIGSEKTSADYYFDSYSHFGIHEEMLKDVVRTKTYQNVITQSSFLIKNKVVLDVGAGTGILSLFCAKAGAKHVYAIECSQMADMAQEIVKSNGYSDVITVIKGKVEEIELPVPKVDVIISEWMGYFLLFENMLNTVLYARDKWLADGGVVLPDRTSLRLTAIEDAEYKEDKIEFWNNVYGFDMSCIKKQAMMEPLVDTVDANQIVTNCQLLKTMDISKMTPGDASFTVPFKLVAERNDYIHALVAYFDVSFTKCHKLMGFSTGPRSKATHWKQTVLYLEDVITICQGESLSGSMTVTPNKSNPRDIDIKLKYSINGHRCQVSRTQFYKMR

SEQ ID NO: 4949 - protein, 306 aa, Zea mays subsp. mays
  peptide (1)..(306): Ceres Seq. ID no. 12344066
MLKDVVRTKTYQNVITQSSFLIKNKVVLDVGAGTGILSLFCAKAGAKHVYAIECSQMADMAQEIVKSNGYSDVITVIKGKVEEIELPVPKVDVIISEWMGYFLLFENMLNTVLYARDKWLADGGVVLPDRTSLRLTAIEDAEYKEDKIEFWNNVYGFDMSCIKKQAMMEPLVDTVDANQIVTNCQLLKTMDISKMTPGDASFTVPFKLVAERNDYIHALVAYFDVSFTKCHKLMGFSTGPRSKATHWKQTVLYLEDVITICQGESLSGSMTVTPNKSNPRDIDIKLKYSINGHRCQVSRTQFYKMR

SEQ ID NO: 4950 - protein, 250 aa, Zea mays subsp. mays
  peptide (1)..(250): Ceres Seq. ID no. 12344067
MADMAQEIVKSNGYSDVITVIKGKVEEIELPVPKVDVIISEWMGYFLLFENMLNTVLYARDKWLADGGVVLPDRTSLRLTAIEDAEYKEDKIEFWNNVYGFDMSCIKKQAMMEPLVDTVDANQIVTNCQLLKTMDISKMTPGDASFTVPFKLVAERNDYIHALVAYFDVSFTKCHKLMGFSTGPRSKATHWKQTVLYLEDVITICQGESLSGSMTVTPNKSNPRDIDIKLKYSINGHRCQVSRTQFYKMR

SEQ ID NO: 4951 - DNA, 1545 bp, Zea mays subsp. mays
  misc_feature (1)..(1545): Ceres Seq. ID no. 12364513
  misc_feature (1)..(1545): Ortholog of  Ceres SEQ ID NO 14316550 as cited in SEQ ID NO 57662
  misc_feature (1)..(1545): Ortholog of  Ceres SEQ ID NO 14302333 as cited in SEQ ID NO 63121
  misc_feature (1)..(1545): Ortholog of  Ceres SEQ ID NO 13596976 as cited in SEQ ID NO 63125
  misc_feature (1)..(1545): Ortholog of  Ceres SEQ ID NO 15179988 as cited in SEQ ID NO 0
gcacgagaccattacctagaacatcctaatcgaaaaactgaatctggttgtgaaccaaacacacctcagctgctctgtccaaacgcaccctgacttccgagttccgacccccactgctttgcttgctctgcactccgctaattccttccgcggcgatcccgagcaagaaacccagcagcgcggcggatctcgccgggcggcggccgccactatgatgagcggtagctcgcctccgccgccctcgcttcctgccgggagtggaggcttcttcaggggatacacaaagctgtgcaagggcctcgccgtcatattgctcattgtgcaccttgtagtccagttgtttccgtccgccgtcacctatctcgcgcttatccctggaagaacgatcccttttgcttggaacctgataactgcaggctatgtcgagcaaacaattccagggatggttgtcagcatcattggccttcttttatttgggaagttgttagaacctctatggggttcaaaagagttatcaaagttcatttttattgtcaacctttcaacttctgcttgtgttttcatgactgctattgtgctgtactatataactcagcaagagatctacctctatactcctttttctggattttatggggttctatcaggattgttggtgggcattaaacagcttttacctgatcaagagcttaatctttttgtgctaaaaattaaggcaaagtggattccatctcttgttgcattgatatccattcttggaagcatcttcatatacgactttatgtcttacctcccagttctgttgtttggcatgtatatgagttggatctacctccgttactttcaaaagagacttgagaccagcctgaaaggggatccaagtgaggagttctctttctcaagcttcttccctgaatttgtaagaccatttctcgacccaatagcatctgtattccataggttactttgtggaagatctgatgccaggggagaaacattagacacctcaccattacctggttcagattcgtttgaggcaaacaggaggagagagaggggtcaacgggcactggagcaaagattagctgagaagctggctgcagtcaggagttcagagggcggcacatcactggatgccgctgacaaagtttgagtcttctatgcaacgaacaacgagctgtgcggtgcagtttgtgatttcctggcaatttgtttctatgtgatttcctgaaggattgaacggacgcgaatgtttcatgtaccttcaccagccccagcctcaccgccgagtgcttcattttttttatggtttctcatcctaatcatcatcgggaaccaactaatgaagcactgcgccccattttccccatggtttttctgtaatcaactagaagtgatcaagtaccaagcagtgtacaatgcgatgctccgtaggacaagaactcatctatgttcggtttcctgtttttttccttccaaatggtgaggttgatacttgatagtagttgacacttgacaggaacaaaattatttttgtaacctttt

SEQ ID NO: 4952 - protein, 313 aa, Zea mays subsp. mays
  peptide (1)..(313): Ceres Seq. ID no. 12364514
MMSGSSPPPPSLPAGSGGFFRGYTKLCKGLAVILLIVHLVVQLFPSAVTYLALIPGRTIPFAWNLITAGYVEQTIPGMVVSIIGLLLFGKLLEPLWGSKELSKFIFIVNLSTSACVFMTAIVLYYITQQEIYLYTPFSGFYGVLSGLLVGIKQLLPDQELNLFVLKIKAKWIPSLVALISILGSIFIYDFMSYLPVLLFGMYMSWIYLRYFQKRLETSLKGDPSEEFSFSSFFPEFVRPFLDPIASVFHRLLCGRSDARGETLDTSPLPGSDSFEANRRRERGQRALEQRLAEKLAAVRSSEGGTSLDAADKV

SEQ ID NO: 4953 - protein, 312 aa, Zea mays subsp. mays
  peptide (1)..(312): Ceres Seq. ID no. 12364515
MSGSSPPPPSLPAGSGGFFRGYTKLCKGLAVILLIVHLVVQLFPSAVTYLALIPGRTIPFAWNLITAGYVEQTIPGMVVSIIGLLLFGKLLEPLWGSKELSKFIFIVNLSTSACVFMTAIVLYYITQQEIYLYTPFSGFYGVLSGLLVGIKQLLPDQELNLFVLKIKAKWIPSLVALISILGSIFIYDFMSYLPVLLFGMYMSWIYLRYFQKRLETSLKGDPSEEFSFSSFFPEFVRPFLDPIASVFHRLLCGRSDARGETLDTSPLPGSDSFEANRRRERGQRALEQRLAEKLAAVRSSEGGTSLDAADKV

SEQ ID NO: 4954 - protein, 236 aa, Zea mays subsp. mays
  peptide (1)..(236): Ceres Seq. ID no. 12364516
MVVSIIGLLLFGKLLEPLWGSKELSKFIFIVNLSTSACVFMTAIVLYYITQQEIYLYTPFSGFYGVLSGLLVGIKQLLPDQELNLFVLKIKAKWIPSLVALISILGSIFIYDFMSYLPVLLFGMYMSWIYLRYFQKRLETSLKGDPSEEFSFSSFFPEFVRPFLDPIASVFHRLLCGRSDARGETLDTSPLPGSDSFEANRRRERGQRALEQRLAEKLAAVRSSEGGTSLDAADKV

SEQ ID NO: 4955 - DNA, 1332 bp, Zea mays subsp. mays
  misc_feature (1)..(1332): Ceres Seq. ID no. 12362166
  misc_feature (1)..(1332): Ortholog of  Ceres SEQ ID NO 13654868 as cited in SEQ ID NO 62704
atcctcctctcgctctcaggcgcatcattcttctcgcctcgtgtcgctgacttccccaagctttgctgggttgccttcgagcaggagacaggctgtgtagtgtagtctagtgctaccaggatcggatcagcggctgctgcgcttcagttgccgccggcggcatgagggtggtggtgacgggcgcgacggggtacctgggaggccgcctgtgcgcggcgctggccggcgcgggccacgccgtgcgcgcgctcgtccgccactccagcgacgtctccggcctgccccgcgacatcgagatgacctacggcgacgtcaccgacgccgagtccctcgccgtggccttcgacggctgcgacgtcgtgttccacgtcgccgcggccgttgagccgtggttgcccgacccctccgttttcttcaaagttaatgtaggtggacttgagaatgtgttgaaggctgtcaagagaacaccaactgtgaagaagataatctacacatcttctttctttgcaattggtccaactgatggttatgttgcagatgagacacagatgcatcgagggaaggaattttgtactgaatatgagaaatcgaagtttcttgcagatagaatcgcactgcaggcagcagcagataaggtgccaatcaccattgtctacccaggtgttctctacggccctggaaaacttacgactggaaatcttgtctcacgcattctaatagagaggtttaatgggcgcttgcctggttacataggagatgggtatgatagagaatcgttctgccatgttgatgatgttgttaacgggcacatagcagctatggagaagggcagagtgggccaacggtatctcctcactggtgaaaacatgtcgttcgtgctgatttttaacatggttgctaatatcacaaacacaagggctcccatgttccacgtacctctctggttgattgaagcgtatgggtggatttcagtttttgtttctcgcatcactggaaaactcccacttatcagttaccctactgtgcgtgttctgagacatcagtgggcatactcgtgtgacaaagcaaagatggagctgggctataccccaagaaacttgaccgaaggtttgtcggagatgctcctgtggctcaaggaagaaaaactaatcaagttttagcgttctctactacacaccacatcacatatttaatgtacaccgatacattggggatgtgctggggattttgaagtgtatatgcttcggcattgcatcacgtcgtattatgctagaggaaatctaagatgttgacgtgtgatactgatgttggcaacaaagagagaaattatgc

SEQ ID NO: 4956 - protein, 332 aa, Zea mays subsp. mays
  peptide (1)..(332): Ceres Seq. ID no. 12362167
MRVVVTGATGYLGGRLCAALAGAGHAVRALVRHSSDVSGLPRDIEMTYGDVTDAESLAVAFDGCDVVFHVAAAVEPWLPDPSVFFKVNVGGLENVLKAVKRTPTVKKIIYTSSFFAIGPTDGYVADETQMHRGKEFCTEYEKSKFLADRIALQAAADKVPITIVYPGVLYGPGKLTTGNLVSRILIERFNGRLPGYIGDGYDRESFCHVDDVVNGHIAAMEKGRVGQRYLLTGENMSFVLIFNMVANITNTRAPMFHVPLWLIEAYGWISVFVSRITGKLPLISYPTVRVLRHQWAYSCDKAKMELGYTPRNLTEGLSEMLLWLKEEKLIKF

SEQ ID NO: 4957 - protein, 287 aa, Zea mays subsp. mays
  peptide (1)..(287): Ceres Seq. ID no. 12362168
MTYGDVTDAESLAVAFDGCDVVFHVAAAVEPWLPDPSVFFKVNVGGLENVLKAVKRTPTVKKIIYTSSFFAIGPTDGYVADETQMHRGKEFCTEYEKSKFLADRIALQAAADKVPITIVYPGVLYGPGKLTTGNLVSRILIERFNGRLPGYIGDGYDRESFCHVDDVVNGHIAAMEKGRVGQRYLLTGENMSFVLIFNMVANITNTRAPMFHVPLWLIEAYGWISVFVSRITGKLPLISYPTVRVLRHQWAYSCDKAKMELGYTPRNLTEGLSEMLLWLKEEKLIKF

SEQ ID NO: 4958 - protein, 203 aa, Zea mays subsp. mays
  peptide (1)..(203): Ceres Seq. ID no. 12362169
MHRGKEFCTEYEKSKFLADRIALQAAADKVPITIVYPGVLYGPGKLTTGNLVSRILIERFNGRLPGYIGDGYDRESFCHVDDVVNGHIAAMEKGRVGQRYLLTGENMSFVLIFNMVANITNTRAPMFHVPLWLIEAYGWISVFVSRITGKLPLISYPTVRVLRHQWAYSCDKAKMELGYTPRNLTEGLSEMLLWLKEEKLIKF

SEQ ID NO: 4959 - DNA, 1001 bp, Zea mays subsp. mays
  misc_feature (1)..(1001): Ceres Seq. ID no. 12405116
  misc_feature (1)..(1001): Ortholog of  Ceres SEQ ID NO 13596185 as cited in SEQ ID NO 67997
acgcgcgaagtcattctcgtccaaaatggcgcacaagcactgtttcgtccttcttcgtattccctccctatagccgcccgcatggcgaaccgaagcgaagccaaaacgcccattccccttcgccctcttcgaccctagcaagaagacggcggcggagatggtgtactacgcgcttttggtgggcgcagagctggacggcctcaccaacctgcagcccagcggcggctgcgacgaccccagcttcccctactacctcaagctcaagtgcgagaactgcggggaggtcaccgccaagtccacctacgtcactctcagcgagcaagtcgacctgcccaagggacatggcaccgctcacctcgtccagaagtgcaagctttgcgggagagatggaacaattgtgatgattcctggtcaggggacgccacttactattgagcagagccagaaagaagagaagacttgtttgatggtgtttgactgcagaggctatgaacctgttgagttttcttttggagctggctggaaggctgaatctgtgcatgggactccttttgaaattgactgctctgaagatgaattttctgagtatgatgagaagggagaatgcccggttgagctaagcaagctgcagtcaacattcaaagtggtgaagaagcatgagaagggtggtaagacaagatttgtctagatccagtgacttggagtctgtcgggtattggaatcgaaggtgtataaatggtacatttgggctaaaaggttgtgcgtaatcagacgtcccttttctgtctattgattctgtggatgccgtgaaccatgtgaagctttcggtgacagtgtccacagaggcatttgccctggaccgattgctattgttctgtggtctgaggccatcggaaccgatctttttatcttgtgctaatgcttgaacatgctgctgatttttttagcattgtgactgatggctctgaagacatctcacgaattggaggctccgaaccatt

SEQ ID NO: 4960 - protein, 176 aa, Zea mays subsp. mays
  peptide (1)..(176): Ceres Seq. ID no. 12405117
MVYYALLVGAELDGLTNLQPSGGCDDPSFPYYLKLKCENCGEVTAKSTYVTLSEQVDLPKGHGTAHLVQKCKLCGRDGTIVMIPGQGTPLTIEQSQKEEKTCLMVFDCRGYEPVEFSFGAGWKAESVHGTPFEIDCSEDEFSEYDEKGECPVELSKLQSTFKVVKKHEKGGKTRFV

SEQ ID NO: 4961 - protein, 132 aa, Zea mays subsp. mays
  peptide (1)..(132): Ceres Seq. ID no. 12405118
ARSHSRPKWRTSTVSSFFVFPPYSRPHGEPKRSQNAHSPSPSSTLARRRRRRWCTTRFWWAQSWTASPTCSPAAAATTPASPTTSSSSARTAGRSPPSPPTSLSASKSTCPRDMAPLTSSRSASFAGEMEQL

SEQ ID NO: 4962 - protein, 95 aa, Zea mays subsp. mays
  peptide (1)..(95): Ceres Seq. ID no. 12405119
MIPGQGTPLTIEQSQKEEKTCLMVFDCRGYEPVEFSFGAGWKAESVHGTPFEIDCSEDEFSEYDEKGECPVELSKLQSTFKVVKKHEKGGKTRFV

SEQ ID NO: 4963 - DNA, 1674 bp, Zea mays subsp. mays
  misc_feature (1)..(1674): Ceres Seq. ID no. 12409778
  misc_feature (1)..(1674): Ortholog of  Ceres SEQ ID NO 13596497 as cited in SEQ ID NO 68669
atcacataacatcacatgtttttcgtcgtgacgtctcacactcccactagttgattgaggaagagacctgctcgcttctccctctccccgagtcgatcggtccagtccgagggaagaaggcaagaagctcccggcgcgcgcgcgcaagcgagaggaaatggcgaccagcaacggctcaggggtcgcgcagggggaggaggggaagacgccaccgcctgcggggtcgatcggcgggtacgagtccctgcacaggctcctggaggccaacctttcccccgatctattccaggaagcaagtcgattgctgctgggactgaattgtgcacgacctcttgaggctatctcactgcctgacgccacaaccactcttgcggaaacacacagttttgatttgcaggcattccgttttagtgcagacaaagagtttctgaggcaatcaagagttgttcgagtaggtctaattcagaactcaattgctgttcccactacttgtcactttgctgaccaaaagaaggcaatcatggacaaaataaaacctctaattgatgcagccggcgcttctggtgtcaatattatgtgcttacaagaagcctggacaatgccttttgccttctgcacacgcgagaaaagatggtgtgaatttgctgaaccagttgatggagaatctactcaattccttcaggaacttgcacagaagtataacatggtaatagtgagcccaatccttgaaagggatataaaccatggggagactatttggaatactgctgttgttattggaaacaacggcaacataattggcattcatcgaaagaatcacattccaagagttggtgatttcaatgagagcacatactacatggagggtaacactgggcatccagtgtttgaaacagcttatggcaaaataggagtgaacatttgttatggaagacatcatccccttaattggcttgcgtttggtctcaatggagctgaaatagtgttcaacccatctgcgactgttggtgaactgagtgaaccaatgtggcccattgaggcaaggaacgccgcaattgcaaacagctacttcgttggatcaattaatcgggttggcacagaagtgttccctaatcctttcacatccggtgatgggaaaccgcaacacgcagactttggccatttctatggatctagccatttctcagcacctgatgcctcctgcaccccatctctatcacgctaccgagatggcttgatcatctccgatatggacctcaacctatgccgccagatcaaagacaagtgggccttccgcatgactgctcgctatgagatgtatgcatccttgctctcagagtacttgaagccagatttcaaacctcaagtcattgttgatcccttgattaataagaaggcataaaaactgaggtatgctggatacttgggcttaaaaggaggtcatttgtgtattgacatgaacaggaaaaggtttaccatttagcagaataatgtctacgatgaagatgcaaaatggaggaagtttctttctttttttttcctttacatttccacatactgtaaaaatgtgtttggtgtagtttgagcttcttttactcaatattcgaaacagtaatgcttgttttgttgtataatttgctagagatttttcgatgaagaaattcaacaatcttt

SEQ ID NO: 4964 - protein, 414 aa, Zea mays subsp. mays
  peptide (1)..(414): Ceres Seq. ID no. 12409779
MATSNGSGVAQGEEGKTPPPAGSIGGYESLHRLLEANLSPDLFQEASRLLLGLNCARPLEAISLPDATTTLAETHSFDLQAFRFSADKEFLRQSRVVRVGLIQNSIAVPTTCHFADQKKAIMDKIKPLIDAAGASGVNIMCLQEAWTMPFAFCTREKRWCEFAEPVDGESTQFLQELAQKYNMVIVSPILERDINHGETIWNTAVVIGNNGNIIGIHRKNHIPRVGDFNESTYYMEGNTGHPVFETAYGKIGVNICYGRHHPLNWLAFGLNGAEIVFNPSATVGELSEPMWPIEARNAAIANSYFVGSINRVGTEVFPNPFTSGDGKPQHADFGHFYGSSHFSAPDASCTPSLSRYRDGLIISDMDLNLCRQIKDKWAFRMTARYEMYASLLSEYLKPDFKPQVIVDPLINKKA

SEQ ID NO: 4965 - protein, 293 aa, Zea mays subsp. mays
  peptide (1)..(293): Ceres Seq. ID no. 12409780
MDKIKPLIDAAGASGVNIMCLQEAWTMPFAFCTREKRWCEFAEPVDGESTQFLQELAQKYNMVIVSPILERDINHGETIWNTAVVIGNNGNIIGIHRKNHIPRVGDFNESTYYMEGNTGHPVFETAYGKIGVNICYGRHHPLNWLAFGLNGAEIVFNPSATVGELSEPMWPIEARNAAIANSYFVGSINRVGTEVFPNPFTSGDGKPQHADFGHFYGSSHFSAPDASCTPSLSRYRDGLIISDMDLNLCRQIKDKWAFRMTARYEMYASLLSEYLKPDFKPQVIVDPLINKKA

SEQ ID NO: 4966 - protein, 275 aa, Zea mays subsp. mays
  peptide (1)..(275): Ceres Seq. ID no. 12409781
MCLQEAWTMPFAFCTREKRWCEFAEPVDGESTQFLQELAQKYNMVIVSPILERDINHGETIWNTAVVIGNNGNIIGIHRKNHIPRVGDFNESTYYMEGNTGHPVFETAYGKIGVNICYGRHHPLNWLAFGLNGAEIVFNPSATVGELSEPMWPIEARNAAIANSYFVGSINRVGTEVFPNPFTSGDGKPQHADFGHFYGSSHFSAPDASCTPSLSRYRDGLIISDMDLNLCRQIKDKWAFRMTARYEMYASLLSEYLKPDFKPQVIVDPLINKKA

SEQ ID NO: 4967 - DNA, 2088 bp, Zea mays subsp. mays
  misc_feature (1)..(2088): Ceres Seq. ID no. 12409774
  misc_feature (1)..(2088): Ortholog of  Ceres SEQ ID NO 14313147 as cited in SEQ ID NO 54166
  misc_feature (1)..(2088): Ortholog of  Ceres SEQ ID NO 13598882 as cited in SEQ ID NO 0
gaccggccactcgtctgacgctacgctgcctactatctatctacctctaccctccctcatcacttgttccactacgaccggccacctagctcgccgcgcgcgcaagcctgcgccaccacccactctactagcttagtctcccctcgtgcagcgcgacgacagccagcaatggccgccgcccagtgaggcagggtcgcagtgacggcacgagacgcacacccacgggcgctggcggcatgccgggcgacgcctacgacctcctgtgcgccgaggacgacgccgccggcagcgccctgctgtgcaccaccgacgacgacgacgggtgctgctccgctgtcgaggaggactcggcggcggcggcggcctccatcgccgagctcatcggcggcgaggcccagtactcgcccaggccggactaccccgacaggctccgctccaggtccatcgacccggccgcccgcgccgagtcggtcgcatggattctcaaggtgcaagaatactatgggtttcttccattgacagcctacctcgccgtcaactacatggaccggttcctctctctccaccgtttgccgcaggaggacgggtgggcgatgcagctgctggccgtgacctgcctctccctcgctgccaagatggaggagaccctcgtgccctccctcctggacctgcaggttgagggcaccagcagatacgactgcttcgagcctgggacggtcggccggatggagctcctcgtcctgatggcgctcaactggcggctccgctcggttactcccttcaccttcgtcgacttcttcgcgtgcaaggtcgacccaggagggaggcacaccaggtgcctcattgcccgggccacgcaagtcattctggctgcgatgcatgacgtcgagttcttggaccactgcccgtcatcaatggcggcagcggccgtgctctgcgccatcggtgagacgccgtcactggagtcggtcagccctggggctgccgtcagctggtgcatcggccttgcagaggaagggatcagcagctgctacagactgatgcagcggctggtgataggcaacgtccggacaagggtcgccagcacgacgaccatggcagcagtgaacctgtgctgctcggatgaggcgctgtcctcgcattcctccgccacctcctcgccacccccggccaagaggaggaagaggtcgccgacggccacgtgaaaactgaagaacgcaagtagataggattatttatacgcttttggggggcagattaacagggtttgatcgatttctttgcagtttgtttgtcgttttttcttctttgtgattctttctcctttttcccccttttgccatttatttgttctgttcttttgggttggatctctactcctcggtggggggattctgcctgcctgctcgaccggcccagtcatcatggcggcctctggcctctgcaccgccagccagtatgtgaaggcgacgagactcgagagagagaaagaaagacagctactacgtataacagacacatctgtgtttctctgtgcaacactctgtggggcttcttcaaccccgacgcagagctgcagagagggaccattgattggtgagcgagggcagccatggcggcagatggagatggagagggaggggggaagaggcaatgagttgcggtggatggatgatgattggtagggttaaatgaggtggtcaaagggccgggcggtcagtgctcctgccaagatgcagccctgcctgcaaagtttctgttcatattcatgagggcaaaaattgtttgtttccgagtggtttgtttgtattttgttgatgccgctgaggcgagggcgtcagagagagagaaagaggggcatgctttgctttgctgtgatgggagtcacatggatatgccctactgtggtggtgctctggagggaaatatttgtccatctccagagctaacagtgtccaagcatggggcttttgggggcccttgctgattgtttgtatctcttttttcttgcttgtgtatcaatgaagattttgccatttgaattggcctgagaagagagtacaagctgaagagagagtttctgtgttc

SEQ ID NO: 4968 - protein, 322 aa, Zea mays subsp. mays
  peptide (1)..(322): Ceres Seq. ID no. 12409775
MPGDAYDLLCAEDDAAGSALLCTTDDDDGCCSAVEEDSAAAAASIAELIGGEAQYSPRPDYPDRLRSRSIDPAARAESVAWILKVQEYYGFLPLTAYLAVNYMDRFLSLHRLPQEDGWAMQLLAVTCLSLAAKMEETLVPSLLDLQVEGTSRYDCFEPGTVGRMELLVLMALNWRLRSVTPFTFVDFFACKVDPGGRHTRCLIARATQVILAAMHDVEFLDHCPSSMAAAAVLCAIGETPSLESVSPGAAVSWCIGLAEEGISSCYRLMQRLVIGNVRTRVASTTTMAAVNLCCSDEALSSHSSATSSPPPAKRRKRSPTAT

SEQ ID NO: 4969 - protein, 220 aa, Zea mays subsp. mays
  peptide (1)..(220): Ceres Seq. ID no. 12409776
MDRFLSLHRLPQEDGWAMQLLAVTCLSLAAKMEETLVPSLLDLQVEGTSRYDCFEPGTVGRMELLVLMALNWRLRSVTPFTFVDFFACKVDPGGRHTRCLIARATQVILAAMHDVEFLDHCPSSMAAAAVLCAIGETPSLESVSPGAAVSWCIGLAEEGISSCYRLMQRLVIGNVRTRVASTTTMAAVNLCCSDEALSSHSSATSSPPPAKRRKRSPTAT

SEQ ID NO: 4970 - protein, 203 aa, Zea mays subsp. mays
  peptide (1)..(203): Ceres Seq. ID no. 12409777
MQLLAVTCLSLAAKMEETLVPSLLDLQVEGTSRYDCFEPGTVGRMELLVLMALNWRLRSVTPFTFVDFFACKVDPGGRHTRCLIARATQVILAAMHDVEFLDHCPSSMAAAAVLCAIGETPSLESVSPGAAVSWCIGLAEEGISSCYRLMQRLVIGNVRTRVASTTTMAAVNLCCSDEALSSHSSATSSPPPAKRRKRSPTAT

SEQ ID NO: 4971 - DNA, 1624 bp, Zea mays subsp. mays
  misc_feature (1)..(1624): Ceres Seq. ID no. 12407768
  misc_feature (1)..(1624): Ortholog of  Ceres SEQ ID NO 13596816 as cited in SEQ ID NO 62287
atataattgcagatgagcatgtggccgtcgccgagtccctgtcgatcggcgtcaactacgggcagatcgccaacaacctgccatcgccggcgcaggtatcgtggctgctccggtcgatgcgggtcagcaaggtgaagctgtacgacgccgaccccaacgtcctgcgcgcgttcctcggcacgggcgtcgagttcgtagtcggcatcggcaacgagtacgtgccggcgatggtgagccccgcggcggcgcaggcgtggctgcagcagcacgtggtgccgtacctccgctcgggcgcgcgcatcacctgcgtcaccgtgggcaacgaggtgttcaagggcaacgacaccgccctccaggcggcggtgcttcccgccatgcagtccgtgcacagggccctgggcgcgctcggcctccagggccgcatcaacgtcaccacggcgcactcgctggacgtcatgggcgtctccttcccgccctccgccggcgccttcgcccccgcggcgctggcgcacctgcagccgttcctgagctttctgtcggcgacgcggtcgccgttcctcatcaactgctacccctacttcgcgtacaaggacgacccggcgcgggtgccgccggactacgtgctcttccgtcccaacgccggtgtcgccgacgcccgcacggggctccgctacgacaacatgctgtacgcgcaggtgtggacgccgtgtacgcggccatccaggggctcgggtacacggacgtggaggtcaaggtgtcggagaccgggtggccgtcgcgaggcgacgccgacgaacccggcgccacgcccgagtacgcggggacctacatccggaacctgctgcagcggatcgagatgaagcagggcacgccgctgcgcccggcgacgcccgtcgacgtctacgtgttcgcgctcttcaacgagaacctcaagccagggccggcgtcggagaggaactacggcctcttctaccccgacggcacaccggtgtacaacgtcggcctgcacggatacctcccgccgatgctggtgtcgtcgactgcagcacgacagctgattcgttattttgcactagtcgccatcgcgtccgtcgcatattcgtctgtcttatcctgacagtgtagcctaccgacggagcactaaacagctaagcatctcatgctactcacgactcaaggaacttctgagtaatctgctggccatctcaacttgggtacctttactgcatttcggatagcgatcacaagctcttactgtacacatactgacaataaggtagaactgactgaagcatatgcagcatccattcatcacagcttacattttgacccaaaaaggaaaggtacaaacagtagggagagctgcatggacagcacctattttgttgttcactccttttcaaatgctatgaatcaagaacaagtcaacacaattattaaagattaagggtcttcgtcttccgaagtattatctccacaagaagataatattcatcagacgaagaccatttgagacgaacattcattatttaatatgtcaatgggaatgcaaaagggtagagatggaactggatcttcattaattcatttatattcatgtcccacaaaatataaatgaatattc

SEQ ID NO: 4972 - protein, 285 aa, Zea mays subsp. mays
  peptide (1)..(285): Ceres Seq. ID no. 12407769
IIADEHVAVAESLSIGVNYGQIANNLPSPAQVSWLLRSMRVSKVKLYDADPNVLRAFLGTGVEFVVGIGNEYVPAMVSPAAAQAWLQQHVVPYLRSGARITCVTVGNEVFKGNDTALQAAVLPAMQSVHRALGALGLQGRINVTTAHSLDVMGVSFPPSAGAFAPAALAHLQPFLSFLSATRSPFLINCYPYFAYKDDPARVPPDYVLFRPNAGVADARTGLRYDNMLYAQVWTPCTRPSRGSGTRTWRSRCRRPGGRREATPTNPAPRPSTRGPTSGTCCSGSR

SEQ ID NO: 4973 - protein, 247 aa, Zea mays subsp. mays
  peptide (1)..(247): Ceres Seq. ID no. 12407770
MRVSKVKLYDADPNVLRAFLGTGVEFVVGIGNEYVPAMVSPAAAQAWLQQHVVPYLRSGARITCVTVGNEVFKGNDTALQAAVLPAMQSVHRALGALGLQGRINVTTAHSLDVMGVSFPPSAGAFAPAALAHLQPFLSFLSATRSPFLINCYPYFAYKDDPARVPPDYVLFRPNAGVADARTGLRYDNMLYAQVWTPCTRPSRGSGTRTWRSRCRRPGGRREATPTNPAPRPSTRGPTSGTCCSGSR

SEQ ID NO: 4974 - protein, 210 aa, Zea mays subsp. mays
  peptide (1)..(210): Ceres Seq. ID no. 12407771
MVSPAAAQAWLQQHVVPYLRSGARITCVTVGNEVFKGNDTALQAAVLPAMQSVHRALGALGLQGRINVTTAHSLDVMGVSFPPSAGAFAPAALAHLQPFLSFLSATRSPFLINCYPYFAYKDDPARVPPDYVLFRPNAGVADARTGLRYDNMLYAQVWTPCTRPSRGSGTRTWRSRCRRPGGRREATPTNPAPRPSTRGPTSGTCCSGSR

SEQ ID NO: 4975 - DNA, 1701 bp, Zea mays subsp. mays
  misc_feature (1)..(1701): Ceres Seq. ID no. 12344072
  misc_feature (1)..(1701): Ortholog of  Ceres SEQ ID NO 14310740 as cited in SEQ ID NO 53755
  misc_feature (1)..(1701): Ortholog of  Ceres SEQ ID NO 13596202 as cited in SEQ ID NO 68492
ctacaaaaagaggagacgcgcgcacgcaaacccggaggccgggaggcggagggcagaggcagcaccgtcccgtccacctgaccacctccaccattttttcctcttcctcctcgcctccaccccttcccttccatctcttctcacctggccactcctctccctctctcccgcgccgatcgattggcccacccatcgatcgagcacgggaagaagattccagtccggagaggtctcaattcgatcgggctcgttctggtgtgggtgggcaccatggcggccacagaggcctcggcagacaagaacgccgtcttccgcaagcttcgcaccaaatcagacaacaagatgtgcttcgattgtaacgccaagaacccgacgtgggcgtccgtcacctacggtgtcttcctctgcatcgactgctcggcggtgcaccgcagcctcggcgtccacgtctccttcgtcaggtcaacaaatttggattcatggactccagaacagctgaaaatgatggtctatggaggaaacaaccgtgcacaagctttctttaagcagcatggttggacagatggtggaaaaattgaagcaaagtatacttcaagagcagctgacttgtaccggcagttgcttgctaaagaggtcgctaaaagcgccactgaagatggcaacaatagttggccatcttcaccagttgcagcttcccaggcttcggatcaaactgctgcgtttccagatcttaagctgacagaggtatcaaaagaaaatgtaagtgaaaaggaagactctgagattgttcgttcgcctagagttccaacccgttctatcaagaagccgattggtgctaaaaagcctggaaataagaccggcggacttggtgcacggaagcttacatcaaagccaaatgaaagcctgtatgagcagaagcccgaagaaacagctcctgtcctgccatcatcggtgattgcaagtactacagctaggagcaaaccccatacttcccgatttgagtatgtagaaaatgcacctgctcctaagactgggagcagctcagaaggcaatctcatgagtggacatgttgcacccccaaagtcatcgaacttctttgttgaatttgggatggacagtggatatcacaaaaaatctacatccagttcatccaaagtgcagattgaggaaagcagtgaagcaagacagaaattctcgaatgcaaaatcaatttcatcctctcagttttttggtgatcaggccagtttcgaaaaggacactcaagtctctctccaaaagttttctggttcctctgccatatcaagtgctgatctatttggccatccagcaaacaattctagcgtggatctcagtgcttcagatttgatcaacagaatatcattccaggccactcaagatctgtcttctctcaagaacatggcaggggaaactgggaaaaggttgacatcgatggcatccaacatcatcactgatcttcaggaccgcatcctctaagcttaagttacagcaaagtaaacttttacgttgcttcagtggctggtcccgtcaaccgggtgacagactggcctgccccgcagatctgtctaggagttcgagttcgtaggcgtctgaaaacttcctggcatatctgtctaggagttcggaagcatctgaaaaaagtgtaagctatttccttaatatgaaagcaggaaggattgccgc

SEQ ID NO: 4976 - protein, 407 aa, Zea mays subsp. mays
  peptide (1)..(407): Ceres Seq. ID no. 12344073
MAATEASADKNAVFRKLRTKSDNKMCFDCNAKNPTWASVTYGVFLCIDCSAVHRSLGVHVSFVRSTNLDSWTPEQLKMMVYGGNNRAQAFFKQHGWTDGGKIEAKYTSRAADLYRQLLAKEVAKSATEDGNNSWPSSPVAASQASDQTAAFPDLKLTEVSKENVSEKEDSEIVRSPRVPTRSIKKPIGAKKPGNKTGGLGARKLTSKPNESLYEQKPEETAPVLPSSVIASTTARSKPHTSRFEYVENAPAPKTGSSSEGNLMSGHVAPPKSSNFFVEFGMDSGYHKKSTSSSSKVQIEESSEARQKFSNAKSISSSQFFGDQASFEKDTQVSLQKFSGSSAISSADLFGHPANNSSVDLSASDLINRISFQATQDLSSLKNMAGETGKRLTSMASNIITDLQDRIL

SEQ ID NO: 4977 - protein, 383 aa, Zea mays subsp. mays
  peptide (1)..(383): Ceres Seq. ID no. 12344074
MCFDCNAKNPTWASVTYGVFLCIDCSAVHRSLGVHVSFVRSTNLDSWTPEQLKMMVYGGNNRAQAFFKQHGWTDGGKIEAKYTSRAADLYRQLLAKEVAKSATEDGNNSWPSSPVAASQASDQTAAFPDLKLTEVSKENVSEKEDSEIVRSPRVPTRSIKKPIGAKKPGNKTGGLGARKLTSKPNESLYEQKPEETAPVLPSSVIASTTARSKPHTSRFEYVENAPAPKTGSSSEGNLMSGHVAPPKSSNFFVEFGMDSGYHKKSTSSSSKVQIEESSEARQKFSNAKSISSSQFFGDQASFEKDTQVSLQKFSGSSAISSADLFGHPANNSSVDLSASDLINRISFQATQDLSSLKNMAGETGKRLTSMASNIITDLQDRIL

SEQ ID NO: 4978 - protein, 330 aa, Zea mays subsp. mays
  peptide (1)..(330): Ceres Seq. ID no. 12344075
MMVYGGNNRAQAFFKQHGWTDGGKIEAKYTSRAADLYRQLLAKEVAKSATEDGNNSWPSSPVAASQASDQTAAFPDLKLTEVSKENVSEKEDSEIVRSPRVPTRSIKKPIGAKKPGNKTGGLGARKLTSKPNESLYEQKPEETAPVLPSSVIASTTARSKPHTSRFEYVENAPAPKTGSSSEGNLMSGHVAPPKSSNFFVEFGMDSGYHKKSTSSSSKVQIEESSEARQKFSNAKSISSSQFFGDQASFEKDTQVSLQKFSGSSAISSADLFGHPANNSSVDLSASDLINRISFQATQDLSSLKNMAGETGKRLTSMASNIITDLQDRIL

SEQ ID NO: 4979 - DNA, 1273 bp, Zea mays subsp. mays
  misc_feature (1)..(1273): Ceres Seq. ID no. 12374425
  misc_feature (1)..(1273): Ortholog of  Ceres SEQ ID NO 15171228 as cited in SEQ ID NO 56948
acgccacgctcccgtcctctccgctggcctcgtgccccctcgtcccaactcccaactgccgatggggaaggagcaatccggtgtgcgcgcgcgggcgcggaagtgaaccccggttgagtagtaggtgggagatcgaggtcgcgcccttgccccacacgccactaaaggccgcgccgacgggctcatcagacgctttggagtttggacgggctcgcctcggccgctctggcgcttgtgcggtgggtgaagcgcgggtgctggtgcgggaagcctcgccagacctagcgctgccgactgccgagctgggtgcgggcgcgaggagtcgacgggaagacaagggtgaggaattatgagtgaaacagggcacactgtacaagtcactaacctctcgagcagagtatctgaaagtgatcttcatgagttcttttcgttctctggtcctattgagcatatagaacttatcagatcagaaggatacggtgccactgcttatgtgacattcaaggaacgctttgccttggaaactgcagtattgctcagtggggctactattgtggatcagccagtatgcataacctattggggacaacctgagggaacttttaatttctgggacaggccaacttgggaggttgaagaggaaatcgaatacaggaactaccaaacatgccagtacaacactactccgcaggaagcttttacagtggctcaagatatcatgaagacgatgctagaaaaggggtacgtgctcagcaaggatgctttggctaaggctagagcctttgatgagtcctatggattaacagctgcagcagcagccagggctgcagagctgagcaagagaattggtttaactgatagggtcaatgctggtgttggtgcaatgcgatcagtcgatgagacatatcgcgtaagagagacaaccaagacggttgctactgccactggaagaacggcagcaaaggtggtaaatggcatcgtcaccagcagctacttctctgcaggagccatgatcttgtctgatgctcttactagggctgccaaggccgcggcagatctggccgctcatggtaggcagaattaagtgaaaaatagacataaagttcatccttgcagttactaaacatgaggacgaacaccttcaagtgatgttgcttgatgtatatttatgacacaacagtgtcgtaaattaaaaggagacgatcactgcgtttggaacaaattgtttgctctgataagtttgattattgcaaatgtagtcaagtgatcgtgc

SEQ ID NO: 4980 - protein, 244 aa, Zea mays subsp. mays
  peptide (1)..(244): Ceres Seq. ID no. 12374426
MSETGHTVQVTNLSSRVSESDLHEFFSFSGPIEHIELIRSEGYGATAYVTFKERFALETAVLLSGATIVDQPVCITYWGQPEGTFNFWDRPTWEVEEEIEYRNYQTCQYNTTPQEAFTVAQDIMKTMLEKGYVLSKDALAKARAFDESYGLTAAAAARAAELSKRIGLTDRVNAGVGAMRSVDETYRVRETTKTVATATGRTAAKVVNGIVTSSYFSAGAMILSDALTRAAKAAADLAAHGRQN

SEQ ID NO: 4981 - DNA, 1855 bp, Zea mays subsp. mays
  misc_feature (1)..(1855): Ceres Seq. ID no. 12566608
  misc_feature (1)..(1855): Ortholog of  Ceres SEQ ID NO 12613725 as cited in SEQ ID NO 68196
gactcggatcagccgcagttgatctggaggcgcgggccggccatggaggagggtggcgagcacacgagtcttctggtcaaggatgatgcatcatgtcatggcgaggaaacacagagtctattggaagcaaatctagggccacagctgaaaagtaaatgctctgattggagagcaccggcactcatcctgggattggaatgcttggagagcatggctttcaatggcattgccacaaacctagttgtgtatctccgttcagttctccatgggggtattgcttccagtgcagcaactgtatctctttggtatgggacaagcttctttgtgccaattcttggagccgccatagcagatacttgcttgggaaattataagaccatcttgatctcccttatcatgtacctatttggaatagtactaattacagttgcaacattcatgccttctacttcagtcttgtgcgacgtcagttcatgcttgtcatcaaatggaactcaaaccatgattttctttgctggtttgtatctcactgctgttggatgtggaggagtaagatctgcattgcttccgtttggtgctaaccagttcaacaacgagaacagtctagacataaaaaagagaagaaatttcttcagcttgttctatatatgtgtcatctttggtgtgattacttctgggacaatcatagtttgggttcaggaaaatgttagctgggctattggatatggagtcgccactacatgcataggtcttgctttgataggatttctggtgggaacaccaatattccaagaagatgagccttgtggttctccagtgaagagtattttccaggttattgttgcctcttttaggaacatgagcttggaagtacctgctgatagctgtcttctgtatgaggtcgggagcaaccacatacaaaggacaaaacttgctcactctgatgattttaggttcttagataaggcggcagttatttctgatccaagcctggtgtatggaggctgtcgaagctcatggagcatatgtacagttactgaagttgaggaactgaaaatacttatccgcttgctcccaatatgggtgactggaatattctttggtgctgcgatctcgcaaatgcacaccacttttattcagcagggaactgtgatggacaccaagatcggttccctgtccattccaccagcatccttatactcatttgaagtgatatgtgtcacgctttgggtacttgctgtcaacaaagtgcttgtgccggcaatccgaacgtattttgcaaatggggtagagctcacacagttacagaggattgggatcggtcgtttcctgatgatctttgccatggcaatggcagcacttctagaaaccaagaggctgcatattgttcaggagggggaactgctaagcattgtatggcagcttccacagtacttcgtcattgctggggctgagtgcttcggtatcatcactcagctggagttctttcatggccaggcgccagactccatgaagagcattttaacggcatttgcattgctcaccactgcccttgggaattacttgagctcagctatcatcaccctcattgcaggggtgaccagggtatggcatagccctggttggataccagatgatctgaacaaaggacaccttgactactactactggtgtcttactaccctctcattggtgaattttgttgtgtatctgtattttgctagtaaatacaaattgaagaaagttgtttgttaatactaccaaacactaatgaaatatctttacgtgtaacatatgaaatataacgtttcaaatgtttatgtttattaatataaggtttcaaatgtttatgttt

SEQ ID NO: 4982 - protein, 584 aa, Zea mays subsp. mays
  peptide (1)..(584): Ceres Seq. ID no. 12566609
DSDQPQLIWRRGPAMEEGGEHTSLLVKDDASCHGEETQSLLEANLGPQLKSKCSDWRAPALILGLECLESMAFNGIATNLVVYLRSVLHGGIASSAATVSLWYGTSFFVPILGAAIADTCLGNYKTILISLIMYLFGIVLITVATFMPSTSVLCDVSSCLSSNGTQTMIFFAGLYLTAVGCGGVRSALLPFGANQFNNENSLDIKKRRNFFSLFYICVIFGVITSGTIIVWVQENVSWAIGYGVATTCIGLALIGFLVGTPIFQEDEPCGSPVKSIFQVIVASFRNMSLEVPADSCLLYEVGSNHIQRTKLAHSDDFRFLDKAAVISDPSLVYGGCRSSWSICTVTEVEELKILIRLLPIWVTGIFFGAAISQMHTTFIQQGTVMDTKIGSLSIPPASLYSFEVICVTLWVLAVNKVLVPAIRTYFANGVELTQLQRIGIGRFLMIFAMAMAALLETKRLHIVQEGELLSIVWQLPQYFVIAGAECFGIITQLEFFHGQAPDSMKSILTAFALLTTALGNYLSSAIITLIAGVTRVWHSPGWIPDDLNKGHLDYYYWCLTTLSLVNFVVYLYFASKYKLKKVVC

SEQ ID NO: 4983 - protein, 570 aa, Zea mays subsp. mays
  peptide (1)..(570): Ceres Seq. ID no. 12566610
MEEGGEHTSLLVKDDASCHGEETQSLLEANLGPQLKSKCSDWRAPALILGLECLESMAFNGIATNLVVYLRSVLHGGIASSAATVSLWYGTSFFVPILGAAIADTCLGNYKTILISLIMYLFGIVLITVATFMPSTSVLCDVSSCLSSNGTQTMIFFAGLYLTAVGCGGVRSALLPFGANQFNNENSLDIKKRRNFFSLFYICVIFGVITSGTIIVWVQENVSWAIGYGVATTCIGLALIGFLVGTPIFQEDEPCGSPVKSIFQVIVASFRNMSLEVPADSCLLYEVGSNHIQRTKLAHSDDFRFLDKAAVISDPSLVYGGCRSSWSICTVTEVEELKILIRLLPIWVTGIFFGAAISQMHTTFIQQGTVMDTKIGSLSIPPASLYSFEVICVTLWVLAVNKVLVPAIRTYFANGVELTQLQRIGIGRFLMIFAMAMAALLETKRLHIVQEGELLSIVWQLPQYFVIAGAECFGIITQLEFFHGQAPDSMKSILTAFALLTTALGNYLSSAIITLIAGVTRVWHSPGWIPDDLNKGHLDYYYWCLTTLSLVNFVVYLYFASKYKLKKVVC

SEQ ID NO: 4984 - protein, 514 aa, Zea mays subsp. mays
  peptide (1)..(514): Ceres Seq. ID no. 12566611
MAFNGIATNLVVYLRSVLHGGIASSAATVSLWYGTSFFVPILGAAIADTCLGNYKTILISLIMYLFGIVLITVATFMPSTSVLCDVSSCLSSNGTQTMIFFAGLYLTAVGCGGVRSALLPFGANQFNNENSLDIKKRRNFFSLFYICVIFGVITSGTIIVWVQENVSWAIGYGVATTCIGLALIGFLVGTPIFQEDEPCGSPVKSIFQVIVASFRNMSLEVPADSCLLYEVGSNHIQRTKLAHSDDFRFLDKAAVISDPSLVYGGCRSSWSICTVTEVEELKILIRLLPIWVTGIFFGAAISQMHTTFIQQGTVMDTKIGSLSIPPASLYSFEVICVTLWVLAVNKVLVPAIRTYFANGVELTQLQRIGIGRFLMIFAMAMAALLETKRLHIVQEGELLSIVWQLPQYFVIAGAECFGIITQLEFFHGQAPDSMKSILTAFALLTTALGNYLSSAIITLIAGVTRVWHSPGWIPDDLNKGHLDYYYWCLTTLSLVNFVVYLYFASKYKLKKVVC

SEQ ID NO: 4985 - DNA, 1968 bp, Zea mays subsp. mays
  misc_feature (1)..(1968): Ceres Seq. ID no. 12409766
  misc_feature (1)..(1968): Ortholog of  Ceres SEQ ID NO 14312212 as cited in SEQ ID NO 54399
  misc_feature (1)..(1968): Ortholog of  Ceres SEQ ID NO 15225341 as cited in SEQ ID NO 55222
  misc_feature (1)..(1968): Ortholog of  Ceres SEQ ID NO 14311755 as cited in SEQ ID NO 57271
  misc_feature (1)..(1968): Ortholog of  Ceres SEQ ID NO 15171156 as cited in SEQ ID NO 58259
  misc_feature (1)..(1968): Ortholog of  Ceres SEQ ID NO 14302212 as cited in SEQ ID NO 66507
  misc_feature (1)..(1968): Ortholog of  Ceres SEQ ID NO 13653980 as cited in SEQ ID NO 69253
ataaaacacgcaccggcacctaccagccgccaccttcccggctcctttactcgccggaggcgaaccagaactcgtgccacctcctcctgttccttgccatctccgaattcccatctgagattccaagggccgcgccgtgcaatcgaggctctccccgctcaccatatatcggaggctccgcccccgcgcctcgaatccttcgcgagaggtgctgttgtttgccgtgatttgagccgggtggaggtgtctcgcttcttgatcttgagaggtgttcctagttgattgttgggagcgaagaaggcatgataccttctgtgaggatctctcctggctctgcagccttctctggctccagcctacgcttaaaattacattcaattccatccatctctagtctcaaaccctccaaatatgtggtctcctcgctgaaaccactctacctagcaccgctagatggtccacacacttctgagcttaagtcttggagacaaccacttgagttccgttgtgctgcttctgctgccgatgacaaggagtcaaagactcaggtggtgccagttcagttggaaggcgcacagaggttaaagatctccatctatttcgcgacctggtgggcgcttaatgtgatatttaacatttacaacaagaaggttctcaatgctttcccttacccctggctcacctccacactctcccttgcctgcggctctgcgatgatgcttttctcgtgggccactcgtcttgttgaggcccccaagaccgacctagacttctggaaagtccttttcccggttgctgtggcacatacaattggccatgttgctgcgacagtgagcatgtctaaggtggcagtgtcattcacacacataattaaaagtgcagaacctgcattcactgttttggtgtcaaagttcctccttggggagacgtttccagttccagtctatctttctcttcttccaatcattggtggttgtgctctagctgctgtcacagagctgaactttaatatggttggatttatgggtgctatgatgtccaaccttgcatttgttttccgcaacatcttctcgaagaggggcatgaaggggaagtccgtcagtggcatgaattactatgcttgcctgtcaataatgtcgctggtcatactgactccatttgctatagctatggaaggtcctcagatgtgggctgctggttggcaaaaggctgttgcagaagttggacccaatgttgtctggtggatcgctgcacagagcgtgttctatcacttatataaccaggtgtcctacatgtctctcgatcagatctctccattgacgtttagcattggcaatacaatgaaacgtatatcagtgattgtttcatctataattatcttccacacgcctgtccgccctgtcaatgcactgggagctgccattgccatccttggcacattcctgtactctcaggcaaaggcgtgaggctaaagctttggccaaaggatcggagccagtagcaggcactggatccagttttgcttgttggagtggcatgtagatataaggttcggttttcgtgagagagagggtaataatggatcagtggctctgctgttccgttcttgtttgttgaccagattgaaatgcacaggccgtgacatgaaccgtcgtcaagtgtacctgaataacaccgtaacgaaattcaccgatgctgtttctttatggtattttagcagagctaagctgcgagccatgaccatgaccatgagcgcttgaacctccctacctttctggcgtttgagcatcatcagaagttagcttgaacaagcaagagtgaagatttcgaaggcttgaagaatgttctctgcatcagtgtacaaatatattgcagggctagtacaacaaagtagaatgtgatgttatgtttagctgcattgtgattgctttgccagtttacatgtaacaaaaagatagctgggacgtg

SEQ ID NO: 4986 - protein, 387 aa, Zea mays subsp. mays
  peptide (1)..(387): Ceres Seq. ID no. 12409767
MIPSVRISPGSAAFSGSSLRLKLHSIPSISSLKPSKYVVSSLKPLYLAPLDGPHTSELKSWRQPLEFRCAASAADDKESKTQVVPVQLEGAQRLKISIYFATWWALNVIFNIYNKKVLNAFPYPWLTSTLSLACGSAMMLFSWATRLVEAPKTDLDFWKVLFPVAVAHTIGHVAATVSMSKVAVSFTHIIKSAEPAFTVLVSKFLLGETFPVPVYLSLLPIIGGCALAAVTELNFNMVGFMGAMMSNLAFVFRNIFSKRGMKGKSVSGMNYYACLSIMSLVILTPFAIAMEGPQMWAAGWQKAVAEVGPNVVWWIAAQSVFYHLYNQVSYMSLDQISPLTFSIGNTMKRISVIVSSIIIFHTPVRPVNALGAAIAILGTFLYSQAKA

SEQ ID NO: 4987 - protein, 250 aa, Zea mays subsp. mays
  peptide (1)..(250): Ceres Seq. ID no. 12409768
MMLFSWATRLVEAPKTDLDFWKVLFPVAVAHTIGHVAATVSMSKVAVSFTHIIKSAEPAFTVLVSKFLLGETFPVPVYLSLLPIIGGCALAAVTELNFNMVGFMGAMMSNLAFVFRNIFSKRGMKGKSVSGMNYYACLSIMSLVILTPFAIAMEGPQMWAAGWQKAVAEVGPNVVWWIAAQSVFYHLYNQVSYMSLDQISPLTFSIGNTMKRISVIVSSIIIFHTPVRPVNALGAAIAILGTFLYSQAKA

SEQ ID NO: 4988 - protein, 249 aa, Zea mays subsp. mays
  peptide (1)..(249): Ceres Seq. ID no. 12409769
MLFSWATRLVEAPKTDLDFWKVLFPVAVAHTIGHVAATVSMSKVAVSFTHIIKSAEPAFTVLVSKFLLGETFPVPVYLSLLPIIGGCALAAVTELNFNMVGFMGAMMSNLAFVFRNIFSKRGMKGKSVSGMNYYACLSIMSLVILTPFAIAMEGPQMWAAGWQKAVAEVGPNVVWWIAAQSVFYHLYNQVSYMSLDQISPLTFSIGNTMKRISVIVSSIIIFHTPVRPVNALGAAIAILGTFLYSQAKA

SEQ ID NO: 4989 - DNA, 1346 bp, Zea mays subsp. mays
  misc_feature (1)..(1346): Ceres Seq. ID no. 12379321
  misc_feature (1)..(1346): Ortholog of  Ceres SEQ ID NO 14314174 as cited in SEQ ID NO 54350
  misc_feature (1)..(1346): Ortholog of  Ceres SEQ ID NO 15224566 as cited in SEQ ID NO 55626
  misc_feature (1)..(1346): Ortholog of  Ceres SEQ ID NO 13502979 as cited in SEQ ID NO 69150
gcacgagaccattacctagaacatcctaatccaaaagttttaacccaaagtaaccgtcccgtgtttccgtttgcttcgcctggtcaccttccgtggtgcctgtggctgtgtacgcggtcgtctccatccgacccatcgatcatccaaaaactaaaccaaatcttccccatcgatcccaacttccagtcgatctcctcgctcggctgttgcctcccaaagccgcgccttacaacgagattcctcccctcctctctccaataaccctagcctcctccgccgccggcgacgaatccggcgttttgagtttctgttgccagcgtagccatgtccatgttcaataggatcttcgggaagcccaaggagcaggccaactccaatgccttggccactctggacaagttaaatgagactcttgatatgctggagaagaaagaaaaggtgctggagaaaaaagcagccgctgagctggagagagccaaggagttctcaaaagctaagaataaaagagcggctatccaatccttgaagaggaaaaaactttatgagcaacaaattgagcagcttggaaattttcagttgagaatccatgatcagatgatcatgttagaagcagctaaagctacaacagagactgttgatgcattgagaactggagctgcagctatgaaagcaatgcaaaaagcaacaaacattgatgatgtagacaagaccatggatgaaattaatgaacagactgaaaatatgaaacaaattcaggatgctttgtcagctcctctcggagcttctgctgatttcgatgaggatgaactggaagccgaacttgaagaactggagggagcagagttggaatctcagcttctggagcctgttgcagctcctccggtgcatccagtgcatgccccagccaacaagcaaccagcgcgccctgctccacagaaagctacagctgaagatgatgagcttgctgcactgcaagctgaaatggcattgtgatcaggtttccaatgaagaggtggaatgtgtatatgaatggcgttatgctaccaagatgaaagttgagtcaggatttattatatttgccatgtgtataatcttgggggatatttggcaagcagaaaaaaagctgctccaggcagtgtttgtttcagtgattttgggctctgttttccacaaacagtttaatgtcgcccggttagctctaagctaactattcaggtcaccaacgtgcattgtttgtcacagtatttttcatttacccatattgtctggagccatgtaagagtgttggaacgtataaagcctcagggtacacatttgatgtgccggtttgcagctatttcgacctc

SEQ ID NO: 4990 - protein, 222 aa, Zea mays subsp. mays
  peptide (1)..(222): Ceres Seq. ID no. 12379322
MSMFNRIFGKPKEQANSNALATLDKLNETLDMLEKKEKVLEKKAAAELERAKEFSKAKNKRAAIQSLKRKKLYEQQIEQLGNFQLRIHDQMIMLEAAKATTETVDALRTGAAAMKAMQKATNIDDVDKTMDEINEQTENMKQIQDALSAPLGASADFDEDELEAELEELEGAELESQLLEPVAAPPVHPVHAPANKQPARPAPQKATAEDDELAALQAEMAL

SEQ ID NO: 4991 - protein, 220 aa, Zea mays subsp. mays
  peptide (1)..(220): Ceres Seq. ID no. 12379323
MFNRIFGKPKEQANSNALATLDKLNETLDMLEKKEKVLEKKAAAELERAKEFSKAKNKRAAIQSLKRKKLYEQQIEQLGNFQLRIHDQMIMLEAAKATTETVDALRTGAAAMKAMQKATNIDDVDKTMDEINEQTENMKQIQDALSAPLGASADFDEDELEAELEELEGAELESQLLEPVAAPPVHPVHAPANKQPARPAPQKATAEDDELAALQAEMAL

SEQ ID NO: 4992 - protein, 191 aa, Zea mays subsp. mays
  peptide (1)..(191): Ceres Seq. ID no. 12379324
MLEKKEKVLEKKAAAELERAKEFSKAKNKRAAIQSLKRKKLYEQQIEQLGNFQLRIHDQMIMLEAAKATTETVDALRTGAAAMKAMQKATNIDDVDKTMDEINEQTENMKQIQDALSAPLGASADFDEDELEAELEELEGAELESQLLEPVAAPPVHPVHAPANKQPARPAPQKATAEDDELAALQAEMAL

SEQ ID NO: 4993 - DNA, 1321 bp, Zea mays subsp. mays
  misc_feature (1)..(1321): Ceres Seq. ID no. 12363181
  misc_feature (1)..(1321): Ortholog of  Ceres SEQ ID NO 15170659 as cited in SEQ ID NO 67270
  misc_feature (1)..(1321): Ortholog of  Ceres SEQ ID NO 15177722 as cited in SEQ ID NO 0
tcttcctcgtcgtcggcgactgcctccttgttggtctccagcccatcctagtgttcatgtcaaaggttgatgggaagtttcagttcagtcccatcagtgttaactttctgacggaggttatgaaagtcatctttgctgtcgtcatgctcataattcagtctagaaagcaaaaggttggagaaaagccacttttggcacgttcaaccttcatacaggcagcccgtaataatgtacttctagctgttcctgctcttctatatgcaatcaacaattacctaaaattcatcatgcagttgtacttcaatcctgcaactgtgaaaatgctaagtaacctaaaggtactggttatagcttttcttctgaaatttataatgagaaggagattctcagttattcagtgggaagctcttgctctattgcttattggaatcagcatcaatcaactccgaactgtacctgtgggcaacacagcatttggtcttcctgtcactgctattgcgtacatatatacattgatttttgtaactgttccttcagtggcttctgtctacaatgaatatgccttgaaaagtcaatatgacactagcatctatctccagaacttgtttctgtacggatatggagcaatattcaacttgcttggcattcttgggactgtcctattccaagggccagagagttttaatattcttcgaggccattcaagggccacaatatttctcatatgtaacaatgctgcacaaggcattctatcttcattcttctttaagtatgcagacacaattttgaagaaatattcgtcaactgttgccacaatatttactggcctagcttctgctgcatttttggggcattccttgaccattaattttctcctgggcatatcagtggtgtttatttcaatgcaccagttcttctctccgcttgcaaaagtcaaagatgacaaaccagctgactcaatagagttggaagatacacaaaatgaccgcccatctgaatcttcttttgtaaatatgactgctggtgccgctgatgatgcaagccatcggattggaactgatgagaggcagccgctattgcctatatgaacttgtttgttgaggtaggacagaagagaggggatagaagaagaggctcctttttgccgtgtgagcaacagatttgatgtagcattgttaggcgaataaacagctattgtacactgtagaggcaaaagaaacaaataaacgtggtttccattttctttaaattttttggggataccttgggagcggcagaaatcatacattttgatagacataattcaatagggatttctagg

SEQ ID NO: 4994 - protein, 361 aa, Zea mays subsp. mays
  peptide (1)..(361): Ceres Seq. ID no. 12363182
FLVVGDCLLVGLQPILVFMSKVDGKFQFSPISVNFLTEVMKVIFAVVMLIIQSRKQKVGEKPLLARSTFIQAARNNVLLAVPALLYAINNYLKFIMQLYFNPATVKMLSNLKVLVIAFLLKFIMRRRFSVIQWEALALLLIGISINQLRTVPVGNTAFGLPVTAIAYIYTLIFVTVPSVASVYNEYALKSQYDTSIYLQNLFLYGYGAIFNLLGILGTVLFQGPESFNILRGHSRATIFLICNNAAQGILSSFFFKYADTILKKYSSTVATIFTGLASAAFLGHSLTINFLLGISVVFISMHQFFSPLAKVKDDKPADSIELEDTQNDRPSESSFVNMTAGAADDASHRIGTDERQPLLPI

SEQ ID NO: 4995 - protein, 343 aa, Zea mays subsp. mays
  peptide (1)..(343): Ceres Seq. ID no. 12363183
MSKVDGKFQFSPISVNFLTEVMKVIFAVVMLIIQSRKQKVGEKPLLARSTFIQAARNNVLLAVPALLYAINNYLKFIMQLYFNPATVKMLSNLKVLVIAFLLKFIMRRRFSVIQWEALALLLIGISINQLRTVPVGNTAFGLPVTAIAYIYTLIFVTVPSVASVYNEYALKSQYDTSIYLQNLFLYGYGAIFNLLGILGTVLFQGPESFNILRGHSRATIFLICNNAAQGILSSFFFKYADTILKKYSSTVATIFTGLASAAFLGHSLTINFLLGISVVFISMHQFFSPLAKVKDDKPADSIELEDTQNDRPSESSFVNMTAGAADDASHRIGTDERQPLLPI

SEQ ID NO: 4996 - protein, 322 aa, Zea mays subsp. mays
  peptide (1)..(322): Ceres Seq. ID no. 12363184
MKVIFAVVMLIIQSRKQKVGEKPLLARSTFIQAARNNVLLAVPALLYAINNYLKFIMQLYFNPATVKMLSNLKVLVIAFLLKFIMRRRFSVIQWEALALLLIGISINQLRTVPVGNTAFGLPVTAIAYIYTLIFVTVPSVASVYNEYALKSQYDTSIYLQNLFLYGYGAIFNLLGILGTVLFQGPESFNILRGHSRATIFLICNNAAQGILSSFFFKYADTILKKYSSTVATIFTGLASAAFLGHSLTINFLLGISVVFISMHQFFSPLAKVKDDKPADSIELEDTQNDRPSESSFVNMTAGAADDASHRIGTDERQPLLPI

SEQ ID NO: 4997 - DNA, 1678 bp, Zea mays subsp. mays
  misc_feature (1)..(1678): Ceres Seq. ID no. 13498837
  misc_feature (1)..(1678): Ortholog of  Ceres SEQ ID NO 15170127 as cited in SEQ ID NO 62181
atctcgcaagcagcagcagagcagaaactgagggaagcgagggacggcgatggcgggtgcggaggggagagggccgagacggagccgcgtggcgttcgtgctggtggacgggatcggggacgtgagcgttccgtcgctgggcgggcgcacgccgctggacgcggcgtgcgcgccgcggctggacgcggtggcggcggccggggtgaccgggctcatggaccccgtggagccggggcttgcatgcggcagcgacacggcgcacctatccctcctcgggtacgacccacgggagtactaccgcggccgcggcgcgttcgaatccatgggtgccgggctcgccatggcgcctggcgacatcgccttcaagtcgaacttcgctacactggatgagaacactggagttatcatcagcaggagggcagatcggcactttgaagaggaaggccctatactctgtgctgcgttggatgggatgaaacttcggtcgtttcctgagtatgaagtcagagtaagatatgctaccgagcatagatgtggtgtggttgtcaaaggaccaaagctgagtgggaacatttctggaactgatcccttgaaggacaaccgcttgcatctgaaggctgaaccgttggatggctcagaagaagctaaaaacactgcagctgtggtcaatgagctttctatggagattacgcgcatactggtttctcaccccatcaacgcaaagcgtgcagctgaggggaagaacatcgcaaatgttgtgttgctgcgaggttgtggtattcggattgaggtgcctgcctttgaaaccaaacatggacttgcaccttgcatggttgctcctaccaagatcatagctggcctgggactgtcactggggattgatatccttgaagcacctggagcaactggagattatcgtactctcttaacttctaaagctaaagccatagccaaggcactctctgcccctatggatacaccacctcgtgtttttgtgcctggagaggatggatacaaggctggaaaagaaaatggatatgactttgggttcctgcacataaaggccattgatgatgctggtcatgacaaggctgtcaagttgaaagtacggggtctagaagctgttgatcgagctattggtcagcttgcgaggcttctttgggaagctgaaaaggccggacactatcagtactttctttgngtcactggagaccattctactcctgttgaatatggtgatcatagcttcgaacccgtcccgtttgcaatatgcagactgagagattatgcaggagccattggggaggataatattatgaatacacagctcgacgattttcccctcccttcggtaaaatccggagaagatttgctcgacagtatagaatcactggagcacaagcctggtcaacttaaagctttcagtggcgacagtgtgtgtgagttcaacgagatcgccgctgcgaggggctgccttggacgattcccaggaagcgagatgatgggcatcattaagaagtttatcaaggccaagaatgattaatgctggttgaaatgctaacctttagcgtaatatattggccataaggtttattatcaatgtaataaactaataatgacagaatggagcaatatggaagaaccgtcttgattggagatgaataagagataccttggc

SEQ ID NO: 4998 - protein, 497 aa, Zea mays subsp. mays
  peptide (1)..(497): Ceres Seq. ID no. 13498838
  misc_feature (384)..(384): Xaa is any aa, unknown or other
MAGAEGRGPRRSRVAFVLVDGIGDVSVPSLGGRTPLDAACAPRLDAVAAAGVTGLMDPVEPGLACGSDTAHLSLLGYDPREYYRGRGAFESMGAGLAMAPGDIAFKSNFATLDENTGVIISRRADRHFEEEGPILCAALDGMKLRSFPEYEVRVRYATEHRCGVVVKGPKLSGNISGTDPLKDNRLHLKAEPLDGSEEAKNTAAVVNELSMEITRILVSHPINAKRAAEGKNIANVVLLRGCGIRIEVPAFETKHGLAPCMVAPTKIIAGLGLSLGIDILEAPGATGDYRTLLTSKAKAIAKALSAPMDTPPRVFVPGEDGYKAGKENGYDFGFLHIKAIDDAGHDKAVKLKVRGLEAVDRAIGQLARLLWEAEKAGHYQYFLXVTGDHSTPVEYGDHSFEPVPFAICRLRDYAGAIGEDNIMNTQLDDFPLPSVKSGEDLLDSIESLEHKPGQLKAFSGDSVCEFNEIAAARGCLGRFPGSEMMGIIKKFIKAKND

SEQ ID NO: 4999 - protein, 442 aa, Zea mays subsp. mays
  peptide (1)..(442): Ceres Seq. ID no. 13498839
  misc_feature (329)..(329): Xaa is any aa, unknown or other
MDPVEPGLACGSDTAHLSLLGYDPREYYRGRGAFESMGAGLAMAPGDIAFKSNFATLDENTGVIISRRADRHFEEEGPILCAALDGMKLRSFPEYEVRVRYATEHRCGVVVKGPKLSGNISGTDPLKDNRLHLKAEPLDGSEEAKNTAAVVNELSMEITRILVSHPINAKRAAEGKNIANVVLLRGCGIRIEVPAFETKHGLAPCMVAPTKIIAGLGLSLGIDILEAPGATGDYRTLLTSKAKAIAKALSAPMDTPPRVFVPGEDGYKAGKENGYDFGFLHIKAIDDAGHDKAVKLKVRGLEAVDRAIGQLARLLWEAEKAGHYQYFLXVTGDHSTPVEYGDHSFEPVPFAICRLRDYAGAIGEDNIMNTQLDDFPLPSVKSGEDLLDSIESLEHKPGQLKAFSGDSVCEFNEIAAARGCLGRFPGSEMMGIIKKFIKAKND

SEQ ID NO: 5000 - protein, 406 aa, Zea mays subsp. mays
  peptide (1)..(406): Ceres Seq. ID no. 13498840
  misc_feature (293)..(293): Xaa is any aa, unknown or other
MGAGLAMAPGDIAFKSNFATLDENTGVIISRRADRHFEEEGPILCAALDGMKLRSFPEYEVRVRYATEHRCGVVVKGPKLSGNISGTDPLKDNRLHLKAEPLDGSEEAKNTAAVVNELSMEITRILVSHPINAKRAAEGKNIANVVLLRGCGIRIEVPAFETKHGLAPCMVAPTKIIAGLGLSLGIDILEAPGATGDYRTLLTSKAKAIAKALSAPMDTPPRVFVPGEDGYKAGKENGYDFGFLHIKAIDDAGHDKAVKLKVRGLEAVDRAIGQLARLLWEAEKAGHYQYFLXVTGDHSTPVEYGDHSFEPVPFAICRLRDYAGAIGEDNIMNTQLDDFPLPSVKSGEDLLDSIESLEHKPGQLKAFSGDSVCEFNEIAAARGCLGRFPGSEMMGIIKKFIKAKND

SEQ ID NO: 5001 - DNA, 1097 bp, Zea mays subsp. mays
  misc_feature (1)..(1097): Ceres Seq. ID no. 12409745
  misc_feature (1)..(1097): Ortholog of  Ceres SEQ ID NO 12583280 as cited in SEQ ID NO 56136
  misc_feature (1)..(1097): Ortholog of  Ceres SEQ ID NO 13595979 as cited in SEQ ID NO 68468
  misc_feature (1)..(1097): Ortholog of  Ceres SEQ ID NO 13654715 as cited in SEQ ID NO 68676
atcaacccacactccagcacacagcaatggcgttcacgcggcggcgtccgtgcggcatcctcctcctctccctgctggcggcatccggctcgctgtcgctggccgccaccggcccgggcgacgtggccgtcttctggggccggaacaaggacgagggcacgctgcgcgaaggcctgcgacacgggcacctacaccaccgtcatcatctccttcctccgcggcttcggccacggcgccgcctactactcgctcgacctctcgggccacccgctcgcgggcgtcggcgccgacgtcaagcactgccaggccaagggcatcctcgtgctcctctccatcggcgggccgcccaacaccaacaccggcgccggcgccggctactccctcccgtccgcgcgggcggcggcggacctcgccgcgtacctgtgggacgcctacctgggcggctcgcgcgcggggctgcgccgcccgttcggcgacgcggcgctggacggcgtcgacctgtacatcgaccagggcggcgccggcgtcgacggccactacgacgagctggccaggcgcctctacgcctacaacaggagctaccgcggcaggctcggggtgacgctgacggccacggtgcggtgcgcgtacccggacccgcgcgcgcaggcggcgctcgccacggggctcgtctcccgcgtccacgtccgcctgtaacggcgacctcaagtgcacctggtccgaccgggaggcgtgggagaagtgggccgcggcgtacccggccagccgcgtgttcgtcggcgtcgtggcgtcgcccgaggcggacaaggacgcctacatgttccagaaggacctctactacaacgtgctgcagttcgcccagaaggcgcccaactacggtggcctcatgatctgggataggtactacgacaagatgaaccactacatcagcagcagctaataattaagcttcccatccacatccatccacatccacccggtttatcacctaatatataatagtattattgtatttttcttcttaactttataatacactgtaatgtaataatgtgatgatctgatgatccaccaacggaataaaatggtcagcttcc

SEQ ID NO: 5002 - protein, 295 aa, Zea mays subsp. mays
  peptide (1)..(295): Ceres Seq. ID no. 12409746
QPTLQHTAMAFTRRRPCGILLLSLLAASGSLSLAATGPGDVAVFWGRNKDEGTLREGLRHGHLHHRHHLLPPRLRPRRRLLLARPLGPPARGRRRRRQALPGQGHPRAPLHRRAAQHQHRRRRRLLPPVRAGGGGPRRVPVGRLPGRLARGAAPPVRRRGAGRRRPVHRPGRRRRRRPLRRAGQAPLRLQQELPRQARGDADGHGAVRVPGPARAGGARHGARLPRPRPPVTATSSAPGPTGRRGRSGPRRTRPAACSSASWRRPRRTRTPTCSRRTSTTTCCSSPRRRPTTVAS

SEQ ID NO: 5003 - protein, 287 aa, Zea mays subsp. mays
  peptide (1)..(287): Ceres Seq. ID no. 12409747
MAFTRRRPCGILLLSLLAASGSLSLAATGPGDVAVFWGRNKDEGTLREGLRHGHLHHRHHLLPPRLRPRRRLLLARPLGPPARGRRRRRQALPGQGHPRAPLHRRAAQHQHRRRRRLLPPVRAGGGGPRRVPVGRLPGRLARGAAPPVRRRGAGRRRPVHRPGRRRRRRPLRRAGQAPLRLQQELPRQARGDADGHGAVRVPGPARAGGARHGARLPRPRPPVTATSSAPGPTGRRGRSGPRRTRPAACSSASWRRPRRTRTPTCSRRTSTTTCCSSPRRRPTTVAS

SEQ ID NO: 5004 - protein, 231 aa, Zea mays subsp. mays
  peptide (1)..(231): Ceres Seq. ID no. 12409748
INPHSSTQQWRSRGGVRAASSSSPCWRHPARCRWPPPARATWPSSGAGTRTRARCAKACDTGTYTTVIISFLRGFGHGAAYYSLDLSGHPLAGVGADVKHCQAKGILVLLSIGGPPNTNTGAGAGYSLPSARAAADLAAYLWDAYLGGSRAGLRRPFGDAALDGVDLYIDQGGAGVDGHYDELARRLYAYNRSYRGRLGVTLTATVRCAYPDPRAQAALATGLVSRVHVRL

SEQ ID NO: 5005 - DNA, 905 bp, Zea mays subsp. mays
  misc_feature (1)..(905): Ceres Seq. ID no. 12434941
  misc_feature (1)..(905): Ortholog of  Ceres SEQ ID NO 15175941 as cited in SEQ ID NO 1355
aaatcgaaaaccactcgaacacaaactcaggcaaggcaaaaggaacccgcaccatccgaggctcaagcagggaagtgatcatcatcatcatcagaagaagatgtgcccaaccaagaaggggatgaccggagagccgagctcgccatgcagctcggcatcagcctcgaccttaccggagcaccaccagacggtgtggacgtcgccgccgaagcggccagcggggcggaccaagttccgggagacgcggcacccggtgttccgcggcgtccggcgccggggcagcgccgggcggtgggtgtgcgaggtgcgcgtgccggggaggcgcggctgcaggctctggctcggcaccttcgacacggccgaggcggcggcccgcgcgcacgacgccgccatgctcgccctcgccggcgcgggcgcctgctgcctcaacttcgccgactcggcctggctcctcgcggtcccggcctcgtgcgccagcctcgccgaggtccgccacgcggtcgcggacgccgtggaggacttcctccgccatcaggtggtcccggaggacgacgccctcgcggccacgccgtcgtcgccttccagcgaagacggcagcacctctgatggcggggagtcctcctctgattcctctccgcccacacggggcctcgccgttcgaattggatgtgttcaacgacatgagctgggacctgcactacgcgagcttggcgcagggattgctcgtggagccaccgtccgcggtcacggcgctcatggacgaaggcttcgccgatgtgccgctctggagctactagagactctgaaattttccgtttctttgcttggcctctggtgcctaattttggcagtgtaaaacggtttcttcttttggtaatgagatggaatcatggaacaagtttgcg

SEQ ID NO: 5006 - protein, 284 aa, Zea mays subsp. mays
  peptide (1)..(284): Ceres Seq. ID no. 12434942
NRKPLEHKLRQGKRNPHHPRLKQGSDHHHHQKKMCPTKKGMTGEPSSPCSSASASTLPEHHQTVWTSPPKRPAGRTKFRETRHPVFRGVRRRGSAGRWVCEVRVPGRRGCRLWLGTFDTAEAAARAHDAAMLALAGAGACCLNFADSAWLLAVPASCASLAEVRHAVADAVEDFLRHQVVPEDDALAATPSSPSSEDGSTSDGGESSSDSSPPTRGLAVRIGCVQRHELGPALRELGAGIARGATVRGHGAHGRRLRRCAALELLETLKFSVSLLGLWCLILAV

SEQ ID NO: 5007 - protein, 251 aa, Zea mays subsp. mays
  peptide (1)..(251): Ceres Seq. ID no. 12434943
MCPTKKGMTGEPSSPCSSASASTLPEHHQTVWTSPPKRPAGRTKFRETRHPVFRGVRRRGSAGRWVCEVRVPGRRGCRLWLGTFDTAEAAARAHDAAMLALAGAGACCLNFADSAWLLAVPASCASLAEVRHAVADAVEDFLRHQVVPEDDALAATPSSPSSEDGSTSDGGESSSDSSPPTRGLAVRIGCVQRHELGPALRELGAGIARGATVRGHGAHGRRLRRCAALELLETLKFSVSLLGLWCLILAV

SEQ ID NO: 5008 - protein, 244 aa, Zea mays subsp. mays
  peptide (1)..(244): Ceres Seq. ID no. 12434944
MTGEPSSPCSSASASTLPEHHQTVWTSPPKRPAGRTKFRETRHPVFRGVRRRGSAGRWVCEVRVPGRRGCRLWLGTFDTAEAAARAHDAAMLALAGAGACCLNFADSAWLLAVPASCASLAEVRHAVADAVEDFLRHQVVPEDDALAATPSSPSSEDGSTSDGGESSSDSSPPTRGLAVRIGCVQRHELGPALRELGAGIARGATVRGHGAHGRRLRRCAALELLETLKFSVSLLGLWCLILAV

SEQ ID NO: 5009 - DNA, 1797 bp, Zea mays subsp. mays
  misc_feature (1)..(1797): Ceres Seq. ID no. 12349027
  misc_feature (1)..(1797): Ortholog of  Ceres SEQ ID NO 13599602 as cited in SEQ ID NO 0
actagagggtcatggcatggggcatggatggactggtgcgtgtgatcctgatcttgccgagtgcaatcgagatccgtgccagcccgtccatactgcggtggcgtggcggtgacgtgccggcgcggcgcggcgcggcgccgataagaggtagagagaggaaaaaaaagaacaatcaattctccagaccctccccggcaaccgcgtccggccgtccgcttccgtttccttggataaccacgacgcccgccggcaagcgaaagcgaagcgagccaacccagccatggagaaggcgatcgatcggcagcgggtcctcctggcgcacctcctcccctccccctccgccgcctcctcgcagcctcaccttgcggcgtcggcgtgcgcggccggggacagcgccgcctaccagaggtcctcctccttcggggacgatgtcgtcgtcgtcgctgcctacaggacgccgatatgcaaggccaagcgaggaggcttcaaggacacctacccagaggacctcctcactgttgttctcaaggctgttctggacaacactagaatcaatccagctgacatcggtgacatcgtcgttgggacggtgctcggccctggttcccagcgtgcaaacgagtgcaggatggctgcgttgtttgctggcttccctgaaaccgtccctgttagaactgtcaaccgccagtgttcatctgggctacaggcagtagccgatgtcgcagctgctataaaggctggttactatgacatagggattggtgctggtttggaatccatgtccataaattccattgcttgggaaggacaagttaacccaaaaataagcgcattccagaaagcacaggattgtcttctgcccatgggaattacgtctgaaaatgttgcccatcgatatggtgtaaccaggcaagagcaagatcaggccgccgctgagtctcataggagagctgctgcagccacggcctctggaaaattcaaggatgagatcgtcccggtgccaacaaagatcgttgatcctaaaactggagaggagaaggaagttgtgatatcagttgatgatgggattaggccagggaccacagcatctggattggcgaaactgaaaccagtttttaaaaaggatggaactacaactgcaggcaattccagtcaagtgagtgatggtgctggagctgttcttctcatgaaaagatctgtggctctgaagaaagggctgcccattcttggtgttttcaggagctttgcggctgttggagtggatccagctgttatgggtgttggtcctgctgtggccattcctgctgctgtgaagtctgcaggccttgagattggcgacattgatctgtttgaactgaatgaggccttcgcctctcagtttgtctattgctgcaacaagttggggctggaccgttctaaagtaaatgtaaatggaggcgcgattgcccttggacaccctctgggtgcaacaggtgcccggtgtgtggctactcttctaaatgaaatgaagcgccggggcagagactgcagatttggtgttgtcaccatgtgtatcggatctggaatgggggcagcagctgtgttcgagcggggagacgcggtggatggactctccaacgtgagggacatgcaggcacataattttctgtctaaggatgcgaagtagaggcgcagaaaaaccatccatcctagagcagcataagcctgctgcatttgtaatatattcgaaatccgtatcttttttcttcacaagcactactctatatacgatgaataaaagggcgacaatacagtgtc

SEQ ID NO: 5010 - protein, 461 aa, Zea mays subsp. mays
  peptide (1)..(461): Ceres Seq. ID no. 12349028
MEKAIDRQRVLLAHLLPSPSAASSQPHLAASACAAGDSAAYQRSSSFGDDVVVVAAYRTPICKAKRGGFKDTYPEDLLTVVLKAVLDNTRINPADIGDIVVGTVLGPGSQRANECRMAALFAGFPETVPVRTVNRQCSSGLQAVADVAAAIKAGYYDIGIGAGLESMSINSIAWEGQVNPKISAFQKAQDCLLPMGITSENVAHRYGVTRQEQDQAAAESHRRAAAATASGKFKDEIVPVPTKIVDPKTGEEKEVVISVDDGIRPGTTASGLAKLKPVFKKDGTTTAGNSSQVSDGAGAVLLMKRSVALKKGLPILGVFRSFAAVGVDPAVMGVGPAVAIPAAVKSAGLEIGDIDLFELNEAFASQFVYCCNKLGLDRSKVNVNGGAIALGHPLGATGARCVATLLNEMKRRGRDCRFGVVTMCIGSGMGAAAVFERGDAVDGLSNVRDMQAHNFLSKDAK

SEQ ID NO: 5011 - protein, 345 aa, Zea mays subsp. mays
  peptide (1)..(345): Ceres Seq. ID no. 12349029
MAALFAGFPETVPVRTVNRQCSSGLQAVADVAAAIKAGYYDIGIGAGLESMSINSIAWEGQVNPKISAFQKAQDCLLPMGITSENVAHRYGVTRQEQDQAAAESHRRAAAATASGKFKDEIVPVPTKIVDPKTGEEKEVVISVDDGIRPGTTASGLAKLKPVFKKDGTTTAGNSSQVSDGAGAVLLMKRSVALKKGLPILGVFRSFAAVGVDPAVMGVGPAVAIPAAVKSAGLEIGDIDLFELNEAFASQFVYCCNKLGLDRSKVNVNGGAIALGHPLGATGARCVATLLNEMKRRGRDCRFGVVTMCIGSGMGAAAVFERGDAVDGLSNVRDMQAHNFLSKDAK

SEQ ID NO: 5012 - protein, 295 aa, Zea mays subsp. mays
  peptide (1)..(295): Ceres Seq. ID no. 12349030
MSINSIAWEGQVNPKISAFQKAQDCLLPMGITSENVAHRYGVTRQEQDQAAAESHRRAAAATASGKFKDEIVPVPTKIVDPKTGEEKEVVISVDDGIRPGTTASGLAKLKPVFKKDGTTTAGNSSQVSDGAGAVLLMKRSVALKKGLPILGVFRSFAAVGVDPAVMGVGPAVAIPAAVKSAGLEIGDIDLFELNEAFASQFVYCCNKLGLDRSKVNVNGGAIALGHPLGATGARCVATLLNEMKRRGRDCRFGVVTMCIGSGMGAAAVFERGDAVDGLSNVRDMQAHNFLSKDAK

SEQ ID NO: 5013 - DNA, 1269 bp, Zea mays subsp. mays
  misc_feature (1)..(1269): Ceres Seq. ID no. 12406782
  misc_feature (1)..(1269): Ortholog of  Ceres SEQ ID NO 14301423 as cited in SEQ ID NO 52204
  misc_feature (1)..(1269): Ortholog of  Ceres SEQ ID NO 12621037 as cited in SEQ ID NO 66448
  misc_feature (1)..(1269): Ortholog of  Ceres SEQ ID NO 12635639 as cited in SEQ ID NO 0
  misc_feature (1)..(1269): Ortholog of  Ceres SEQ ID NO 14305144 as cited in SEQ ID NO 0
accattccgattcggcgatttgattcccagccttccccctgctctgcccacctcccatttcccgcccctctttcctactacaataaaaatatccaaaattcccgaacagagtcacccccgcttctcagaaacccaattcccgttcccgatcctcacctcaaccccgcgccgccccctccccaccaccctcgccatggtcagcgccgccgcctcgccgccgccgtccgggaagccgacgcaggacgagctgaagcgcttggcggcgcaccgcgcggtggagctcgtggagccctgcatgacgctgggcctgggcacgggctccacggcggcgcacgcgctggaccgcctgggcgacctcctccgcgcgggcgcgctgccgggggtgtccggcgtgccgacctcgctcaagacggaggcgcacgcggcgcgcgtcggcatcccgctgctcccgctcgacgccgccagcatcgcgctgtccatcgacggcgccgacgaggtcgacccggacctcaacctcgtcaagggccgcggcggctcgctgctccgcgagaagatggtcgagggcgccggcgcccgcttcgccgtcatcgtcgacgagtccaagctcgtgccgcgcctcggctgcaccggcgccgtccccgtcgaggtcgtcccgttcggcgcgccccacacgctgggcctcatccgcggcctcttccacggcctgcccggcttccacgccaggctcaggaccaccaccgtccccgagggggagcaaggctccgagcagcagcccttcgtcaccgacaacggcaactacatcgtcgagatgttcttcgacggcggcatccgcggcgacctgcgcgacatcagcgaccgcctgctccgcataaccggcgtcgtcgagcacggcatgttcctgggcatggccaccgtcgccattgtcgccaagaaggacggcacggtcgcagtcatggaaaggaagtagttagtctacaattcatcgaagcagccatcgcctgctccccatcaacagcgtgttcctctacgtggccatcatcaccaccgtcgccaacggcgacgacaataagtaataattctgcatgtagcctgtgtctgtgcaatatccagctactcttatctaaagttggagctgttgtcgtgtccgtgcgtcatcctcccatactatactgagtgtctgctgattactatggagtatgttaatcatcatcatcatccttatgttatcatcacaaaccttgttatcagtgattctcacgctattttact

SEQ ID NO: 5014 - protein, 390 aa, Zea mays subsp. mays
  peptide (1)..(390): Ceres Seq. ID no. 12406783
TIPIRRFDSQPSPCSAHLPFPAPLSYYNKNIQNSRTESPPLLRNPIPVPDPHLNPAPPPPHHPRHGQRRRLAAAVREADAGRAEALGGAPRGGARGALHDAGPGHGLHGGARAGPPGRPPPRGRAAGGVRRADLAQDGGARGARRHPAAPARRRQHRAVHRRRRRGRPGPQPRQGPRRLAAPREDGRGRRRPLRRHRRRVQARAAPRLHRRRPRRGRPVRRAPHAGPHPRPLPRPARLPRQAQDHHRPRGGARLRAAALRHRQRQLHRRDVLRRRHPRRPARHQRPPAPHNRRRRARHVPGHGHRRHCRQEGRHGRSHGKEVVSLQFIEAAIACSPSTACSSTWPSSPPSPTATTISNNSACSLCLCNIQLLLSKVGAVVVSVRHPPILY

SEQ ID NO: 5015 - protein, 321 aa, Zea mays subsp. mays
  peptide (1)..(321): Ceres Seq. ID no. 12406784
PFRFGDLIPSLPPALPTSHFPPLFPTTIKISKIPEQSHPRFSETQFPFPILTSTPRRPLPTTLAMVSAAASPPPSGKPTQDELKRLAAHRAVELVEPCMTLGLGTGSTAAHALDRLGDLLRAGALPGVSGVPTSLKTEAHAARVGIPLLPLDAASIALSIDGADEVDPDLNLVKGRGGSLLREKMVEGAGARFAVIVDESKLVPRLGCTGAVPVEVVPFGAPHTLGLIRGLFHGLPGFHARLRTTTVPEGEQGSEQQPFVTDNGNYIVEMFFDGGIRGDLRDISDRLLRITGVVEHGMFLGMATVAIVAKKDGTVAVMERK

SEQ ID NO: 5016 - protein, 257 aa, Zea mays subsp. mays
  peptide (1)..(257): Ceres Seq. ID no. 12406785
MVSAAASPPPSGKPTQDELKRLAAHRAVELVEPCMTLGLGTGSTAAHALDRLGDLLRAGALPGVSGVPTSLKTEAHAARVGIPLLPLDAASIALSIDGADEVDPDLNLVKGRGGSLLREKMVEGAGARFAVIVDESKLVPRLGCTGAVPVEVVPFGAPHTLGLIRGLFHGLPGFHARLRTTTVPEGEQGSEQQPFVTDNGNYIVEMFFDGGIRGDLRDISDRLLRITGVVEHGMFLGMATVAIVAKKDGTVAVMERK

SEQ ID NO: 5017 - DNA, 1482 bp, Zea mays subsp. mays
  misc_feature (1)..(1482): Ceres Seq. ID no. 12409738
  misc_feature (1)..(1482): Ortholog of  Ceres SEQ ID NO 13584612 as cited in SEQ ID NO 65223
cccaatccaagcatccattcctgaattcctccctggccagcggcgccgccaccgccatgaaccgcgttcacagcgaggctgccgctgctgcgaaggagcagcgcaagaacgacaagagggagaagaggaagaagcacaaggatgccaaggaggatgactgcggcgcctcgatggccgaggaagaagcacccaaagagaagaagcagaagcagaagcagaggaaggataaggacgagcgggaggagaagaaaaagctgaagccgacggttagcatagccgttgccggctccatcattgacaacgcccagtccctcgagctcgccaccctcctggctggtcagatcgctcgcgccgccaccgtctttcgcatagacgaggtcgtcgtctttgacagtactcccgcggcggagaacggcagcgccggtgatggtgaagagagcggcgcgcggttccttgttcggattttggagtatctggaaactccacagtacctccgccgccgcctctttccgatgcacaagaacctgaagtttgtgggactgcttccaccgctcgatgcaccacaccatgtgcgcaagcacgaatggtccgagtttcgtgaaggtgtaacattggaaagtgatccctcaaaggggactcttgttgatgtcggattaagtaagaatgttctggttgaacaaaaactagaaccaggcaaaagagttactgtagccatgggaacaaaccgtgacctaacgacagcttgcataaggaaagtcgtccccccttcgacacccagggaacagatgggatcttattggggctacaaagtccgttatacttcaaatttaagtggtgttttcaaaaattccccattcaaggaagaatacgaccacatcattggcacctcagagcatggacaaatagttaattcttccgagcttaccttacctacttttaggcacctactgattgcatttggtggacttgctggtttggaagaaagcattgaagaagatacaaacttgaagggtaaacgtgcagatgatgtattcacatcttatttcaatacatgccccaaccaagggagcagaacaataagaacagaggaggcacttctcatttcccttcaatacttccaagatcccattaggcgagcggaacagaaattgtagaagggaatacagaaaactgcaaatctagccatggccaacaagttccagttgtaatagtggagttttctcactgagtatcttgacccttcatgtatgcgttggtgtcattggagccaagaggttgtgagccatcgaggacattttgacacaaccatttcagtttagaaaatttgatgcggagctgacttcagtggaagagtgttagcttgccatttcagtgtatccaattgttgtccactgtagtctatatcggtgtttcatacctttgaccctgtactagaacgacacggaggatcactgttaacaccagagcgtcatgcatgccttg

SEQ ID NO: 5018 - protein, 383 aa, Zea mays subsp. mays
  peptide (1)..(383): Ceres Seq. ID no. 12409739
QSKHPFLNSSLASGAATAMNRVHSEAAAAAKEQRKNDKREKRKKHKDAKEDDCGASMAEEEAPKEKKQKQKQRKDKDEREEKKKLKPTVSIAVAGSIIDNAQSLELATLLAGQIARAATVFRIDEVVVFDSTPAAENGSAGDGEESGARFLVRILEYLETPQYLRRRLFPMHKNLKFVGLLPPLDAPHHVRKHEWSEFREGVTLESDPSKGTLVDVGLSKNVLVEQKLEPGKRVTVAMGTNRDLTTACIRKVVPPSTPREQMGSYWGYKVRYTSNLSGVFKNSPFKEEYDHIIGTSEHGQIVNSSELTLPTFRHLLIAFGGLAGLEESIEEDTNLKGKRADDVFTSYFNTCPNQGSRTIRTEEALLISLQYFQDPIRRAEQKL

SEQ ID NO: 5019 - protein, 365 aa, Zea mays subsp. mays
  peptide (1)..(365): Ceres Seq. ID no. 12409740
MNRVHSEAAAAAKEQRKNDKREKRKKHKDAKEDDCGASMAEEEAPKEKKQKQKQRKDKDEREEKKKLKPTVSIAVAGSIIDNAQSLELATLLAGQIARAATVFRIDEVVVFDSTPAAENGSAGDGEESGARFLVRILEYLETPQYLRRRLFPMHKNLKFVGLLPPLDAPHHVRKHEWSEFREGVTLESDPSKGTLVDVGLSKNVLVEQKLEPGKRVTVAMGTNRDLTTACIRKVVPPSTPREQMGSYWGYKVRYTSNLSGVFKNSPFKEEYDHIIGTSEHGQIVNSSELTLPTFRHLLIAFGGLAGLEESIEEDTNLKGKRADDVFTSYFNTCPNQGSRTIRTEEALLISLQYFQDPIRRAEQKL

SEQ ID NO: 5020 - protein, 327 aa, Zea mays subsp. mays
  peptide (1)..(327): Ceres Seq. ID no. 12409741
MAEEEAPKEKKQKQKQRKDKDEREEKKKLKPTVSIAVAGSIIDNAQSLELATLLAGQIARAATVFRIDEVVVFDSTPAAENGSAGDGEESGARFLVRILEYLETPQYLRRRLFPMHKNLKFVGLLPPLDAPHHVRKHEWSEFREGVTLESDPSKGTLVDVGLSKNVLVEQKLEPGKRVTVAMGTNRDLTTACIRKVVPPSTPREQMGSYWGYKVRYTSNLSGVFKNSPFKEEYDHIIGTSEHGQIVNSSELTLPTFRHLLIAFGGLAGLEESIEEDTNLKGKRADDVFTSYFNTCPNQGSRTIRTEEALLISLQYFQDPIRRAEQKL

SEQ ID NO: 5021 - DNA, 1426 bp, Zea mays subsp. mays
  misc_feature (1)..(1426): Ceres Seq. ID no. 12358815
  misc_feature (1)..(1426): Ortholog of  Ceres SEQ ID NO 13654209 as cited in SEQ ID NO 62121
  misc_feature (1)..(1426): Ortholog of  Ceres SEQ ID NO 13596965 as cited in SEQ ID NO 63363
aagacatcagcctctgttatcctggcccacacatcagcctccctggagtaagcgtggtagttgccactgccgtcccctccagaagtgcgatacagttcggattcagatcgcggccggtgcgaacccacgaaggcacgaacggtagaacccgaccgagcgcggcagcgcaaacctccgatccctgctgcgagcaagggatggcggcggcatgggcagtgctggcggcggtcctcgtcgcggcgcaggtggcgtctgcggcgccggtcacggcgccagcgttcctctgggcgcctaagaactacggattccgctctgatgatgctaaggaggtagtccattatcaaacaatctcaccaaagaacttagctaaatctgttcttgaggaaggtggctggtcaacctttatgtgttcaagggaggatactgagaagcatgttgatgttgccattgtttttattggctcaaagctacaatcatcagacatatcgaaagataagcaagttgatccagctttagcagatacattgaagctctccttcacagaatcagagttttctatggcattcccctacgtttccacatcagacgatgagaaactggaggagtcattgctatcaggcttcactgagaactgtaaaagtggttttggaagaaaccgtatcacctacacagacacgtgcgccgtgagtggccaagatctgaagacgtatcacaacatggatgctatcaatgacttggtagtgtcaggaagaaccaacccgagtggacagactgatgtaatcgtcttctgcagcggcgggttcgagaagttaggcaccacggaatcggaaggggagctgctttcccagcttgtcgacttgctgaagctgtctggggctagacacacgattctctacgcttcccagccatctggttatctactggagaacccttccggctcgccagtggctaggcaccttgcggagaggactaacggtacaaaaactggcctactgagcaaatgtgacggagagtgcctagtcaaatcaactcttcttgaaggaacctttgtcggaatagtgctccttatcatcttgatatcagggctcatgtgtatgatgggaatcgatactccctccaagtttgaagctccccaggagtcttgatctcccttcgaagcagaacccttgttttgttggtctgcactgtggatagatattattcagtttccccctttgaaagcgcctttcgtataattattattatttttttactgagccatctgttatttacgatgtgctcaaacttttgacaccaaacgaatgcatgtgtgtgaggcttgtgctgtgaccagacatagcattgcctccaggtgttttctgtgaataacctggaatttcaggtgggtactgtgcatcaaataaaaaagatgaaatcttgctgttgc

SEQ ID NO: 5022 - protein, 380 aa, Zea mays subsp. mays
  peptide (1)..(380): Ceres Seq. ID no. 12358816
DISLCYPGPHISLPGVSVVVATAVPSRSAIQFGFRSRPVRTHEGTNGRTRPSAAAQTSDPCCEQGMAAAWAVLAAVLVAAQVASAAPVTAPAFLWAPKNYGFRSDDAKEVVHYQTISPKNLAKSVLEEGGWSTFMCSREDTEKHVDVAIVFIGSKLQSSDISKDKQVDPALADTLKLSFTESEFSMAFPYVSTSDDEKLEESLLSGFTENCKSGFGRNRITYTDTCAVSGQDLKTYHNMDAINDLVVSGRTNPSGQTDVIVFCSGGFEKLGTTESEGELLSQLVDLLKLSGARHTILYASQPSGYLLENPSGSPVARHLAERTNGTKTGLLSKCDGECLVKSTLLEGTFVGIVLLIILISGLMCMMGIDTPSKFEAPQES

SEQ ID NO: 5023 - protein, 315 aa, Zea mays subsp. mays
  peptide (1)..(315): Ceres Seq. ID no. 12358817
MAAAWAVLAAVLVAAQVASAAPVTAPAFLWAPKNYGFRSDDAKEVVHYQTISPKNLAKSVLEEGGWSTFMCSREDTEKHVDVAIVFIGSKLQSSDISKDKQVDPALADTLKLSFTESEFSMAFPYVSTSDDEKLEESLLSGFTENCKSGFGRNRITYTDTCAVSGQDLKTYHNMDAINDLVVSGRTNPSGQTDVIVFCSGGFEKLGTTESEGELLSQLVDLLKLSGARHTILYASQPSGYLLENPSGSPVARHLAERTNGTKTGLLSKCDGECLVKSTLLEGTFVGIVLLIILISGLMCMMGIDTPSKFEAPQES

SEQ ID NO: 5024 - protein, 246 aa, Zea mays subsp. mays
  peptide (1)..(246): Ceres Seq. ID no. 12358818
MCSREDTEKHVDVAIVFIGSKLQSSDISKDKQVDPALADTLKLSFTESEFSMAFPYVSTSDDEKLEESLLSGFTENCKSGFGRNRITYTDTCAVSGQDLKTYHNMDAINDLVVSGRTNPSGQTDVIVFCSGGFEKLGTTESEGELLSQLVDLLKLSGARHTILYASQPSGYLLENPSGSPVARHLAERTNGTKTGLLSKCDGECLVKSTLLEGTFVGIVLLIILISGLMCMMGIDTPSKFEAPQES

SEQ ID NO: 5025 - DNA, 1323 bp, Zea mays subsp. mays
  misc_feature (1)..(1323): Ceres Seq. ID no. 12406959
  misc_feature (1)..(1323): Ortholog of  Ceres SEQ ID NO 13657822 as cited in SEQ ID NO 60754
ctcccgcggcctcggctgcaccgctctgcatactctccggtgaatcgctcccagtcccaagtccggatcgcaccgccaagcgttcagccatgagctccgctgcagccgccgccaatgtcgccgtcatcggaggcggaatatccggctccgtgtgcgcgtcgctcctcgccgcgcggggcgtggccgtgacgctcttcgactccggccgcggcgccggcggccgcatggcgcagcggagggaggtgatggaggatggctcggagctgcggttcgaccacggtgcgccctacttcaccgtcaccaacggcgaggttgcccgggtcgttggtgggtgggaggcgcgggggatcgtcgccgagtggaaggcaacgttcgcgtgcttcgatctggccaccggaaaatttacggacttcgagaaggagggaacagctaaaaagtatgtgggagtgccagccatgaactcgatatgcaaatcactctgtctagaggatggtgtggtggccaaatttggtgtcactgtgggcaagatggattggcttcaagatcggagttcgtggtcactagctagcctggatgggaaagatctaggctattttgattatgttgtggcgacagataagaacatagcgtcaccagcattttctgggttgactggaagaccgccacctcttgatttgtcgtcatttccacgcctgcctacagcacttcaagatatcccagttcgtccatgttttgctcttatggtagcattctcggagccattggctacggtacctgttcatggtttctctttcaacaattccaattctctgagctgggccttctgtaacagcagtaagccagggcgtgcttgcgtgcctcctaacagacaatcttgggtgctgcattcgacaactgagtacgcttccaaggtaataaataatattggtccacgcaaaccttcggcggaggcgcttgctaaggtggcagaggaattgttcagagaattccaggcgactggattaagcattccacggccaatttttatgaaagctcacagatggggtgctgctttcccagccattgcaattagtggagatgataagtgcgtttgggacaagagcacgaacttggcgatttgtggagatttctgtacaagcccaagtgtcgaaggagcagtccttagtgctacgagaggggtttccaaaatccttgaatgtttaaggtgcccctcaagtatctaacgttattgttaccatccccagggcccccctctctgtgattggttgtatttatgcctgcattctcttacacaaataaacaattcaagccttatttggaggc

SEQ ID NO: 5026 - protein, 406 aa, Zea mays subsp. mays
  peptide (1)..(406): Ceres Seq. ID no. 12406960
PAASAAPLCILSGESLPVPSPDRTAKRSAMSSAAAAANVAVIGGGISGSVCASLLAARGVAVTLFDSGRGAGGRMAQRREVMEDGSELRFDHGAPYFTVTNGEVARVVGGWEARGIVAEWKATFACFDLATGKFTDFEKEGTAKKYVGVPAMNSICKSLCLEDGVVAKFGVTVGKMDWLQDRSSWSLASLDGKDLGYFDYVVATDKNIASPAFSGLTGRPPPLDLSSFPRLPTALQDIPVRPCFALMVAFSEPLATVPVHGFSFNNSNSLSWAFCNSSKPGRACVPPNRQSWVLHSTTEYASKVINNIGPRKPSAEALAKVAEELFREFQATGLSIPRPIFMKAHRWGAAFPAIAISGDDKCVWDKSTNLAICGDFCTSPSVEGAVLSATRGVSKILECLRCPSSI

SEQ ID NO: 5027 - protein, 377 aa, Zea mays subsp. mays
  peptide (1)..(377): Ceres Seq. ID no. 12406961
MSSAAAAANVAVIGGGISGSVCASLLAARGVAVTLFDSGRGAGGRMAQRREVMEDGSELRFDHGAPYFTVTNGEVARVVGGWEARGIVAEWKATFACFDLATGKFTDFEKEGTAKKYVGVPAMNSICKSLCLEDGVVAKFGVTVGKMDWLQDRSSWSLASLDGKDLGYFDYVVATDKNIASPAFSGLTGRPPPLDLSSFPRLPTALQDIPVRPCFALMVAFSEPLATVPVHGFSFNNSNSLSWAFCNSSKPGRACVPPNRQSWVLHSTTEYASKVINNIGPRKPSAEALAKVAEELFREFQATGLSIPRPIFMKAHRWGAAFPAIAISGDDKCVWDKSTNLAICGDFCTSPSVEGAVLSATRGVSKILECLRCPSSI

SEQ ID NO: 5028 - protein, 332 aa, Zea mays subsp. mays
  peptide (1)..(332): Ceres Seq. ID no. 12406962
MAQRREVMEDGSELRFDHGAPYFTVTNGEVARVVGGWEARGIVAEWKATFACFDLATGKFTDFEKEGTAKKYVGVPAMNSICKSLCLEDGVVAKFGVTVGKMDWLQDRSSWSLASLDGKDLGYFDYVVATDKNIASPAFSGLTGRPPPLDLSSFPRLPTALQDIPVRPCFALMVAFSEPLATVPVHGFSFNNSNSLSWAFCNSSKPGRACVPPNRQSWVLHSTTEYASKVINNIGPRKPSAEALAKVAEELFREFQATGLSIPRPIFMKAHRWGAAFPAIAISGDDKCVWDKSTNLAICGDFCTSPSVEGAVLSATRGVSKILECLRCPSSI

SEQ ID NO: 5029 - DNA, 1624 bp, Zea mays subsp. mays
  misc_feature (1)..(1624): Ceres Seq. ID no. 12407075
  misc_feature (1)..(1624): Ortholog of  Ceres SEQ ID NO 13600071 as cited in SEQ ID NO 0
aaaaaatttccccatctccgacctcccccttcctctccccctgccgctccccgcgccgagaaggagaaccccagccgccgcgcagcgcgccgcccatggcctcctcgtcggagaacgcggctgtgccgccggaggaggagccccaggccccgccgccgccggacacagagcctaccgaggcggcgcccggcgaggcggaggatgagccgcaaaccctagagcgggcgcaggagctcttcgacaggggttccaaggccatcgaggatgaggacttcgtcgacgccgtagactgtctcagccgagcgctcgagatcagggcttcacattatggagatctcgcaccggagtgtgccagcacatacttcaaatatgcatgtgccctgctatacaaagctcaggaggagagtgatgttttgggaaatgttcccaagagcttgccaaatgaagactcagtgaagagtacagctactaaagatgacagtggaacctcaaaggtctctggtaccgatgcggaggatgctgcgtcatcagaaaaagttgatgctgaagaaggtcacaactcaaatggcaaaaatcaggagaatgggaatggtgaagttgagaaagatgatgacgacgtcgacgatgatgagaagatgggagatgaagaggataatgatttggatctttcttggaaaatgttggacattgctagggcaatagttgagaagagccaagataacactatggagaaagtaaaaatatattctgctcttgctgaagtggcaacggaaagagaggacatggacaactcactcagtgactatatgaaagctttatccatgttggagcatttggttgagcctgaccatcgtcgagttgtggaattaaacttccgcatttgtttggtttatgaactagtttccaagatcggagaagcaatttcatactgtgcaaaagcaatttcgctatgcaagtcacgcatacagagcctgaaaagttccaaggatgctttgttggctggtatagatggtgatgcatctgctgctgaagctgaaggaggctcagaaaaatctgccattgaaaaagagctagagcagcttactagcatattgcctgatcttgagaagaagcttgaggacctgtctgaagcaaacccaagcgctgacatggatgagatggtgaaggcaatcgtgtccagggtaactgatgtgatgccaaaagctgcatcttttacttcttcccagatggcaacctcaagcaatggattcgactcctcggttatgtctacggcagcgacaaccggaagctctggaagcaccgtgactgaccttggggttgtaggcagaggcgtcaaacgagctagcatcaagccgatctctgctgaacctgctgctaagaaacctgcacttgattcaccatctcaacaaggtgacagcagcatcaactctgaggttgttcctgcaacgcagactggagacgagtcagtatctaagtaaattacaatttcattagccctactgtaatgttaacttgctggaacatattagctgctatgtaaacgcttaagaagggactgctggggccatagactcatcgtgagctgaccattgaaatgttaaattgctgagatcatcatggcggt

SEQ ID NO: 5030 - protein, 491 aa, Zea mays subsp. mays
  peptide (1)..(491): Ceres Seq. ID no. 12407076
KISPSPTSPFLSPCRSPRREGEPQPPRSAPPMASSSENAAVPPEEEPQAPPPPDTEPTEAAPGEAEDEPQTLERAQELFDRGSKAIEDEDFVDAVDCLSRALEIRASHYGDLAPECASTYFKYACALLYKAQEESDVLGNVPKSLPNEDSVKSTATKDDSGTSKVSGTDAEDAASSEKVDAEEGHNSNGKNQENGNGEVEKDDDDVDDDEKMGDEEDNDLDLSWKMLDIARAIVEKSQDNTMEKVKIYSALAEVATEREDMDNSLSDYMKALSMLEHLVEPDHRRVVELNFRICLVYELVSKIGEAISYCAKAISLCKSRIQSLKSSKDALLAGIDGDASAAEAEGGSEKSAIEKELEQLTSILPDLEKKLEDLSEANPSADMDEMVKAIVSRVTDVMPKAASFTSSQMATSSNGFDSSVMSTAATTGSSGSTVTDLGVVGRGVKRASIKPISAEPAAKKPALDSPSQQGDSSINSEVVPATQTGDESVSK

SEQ ID NO: 5031 - protein, 460 aa, Zea mays subsp. mays
  peptide (1)..(460): Ceres Seq. ID no. 12407077
MASSSENAAVPPEEEPQAPPPPDTEPTEAAPGEAEDEPQTLERAQELFDRGSKAIEDEDFVDAVDCLSRALEIRASHYGDLAPECASTYFKYACALLYKAQEESDVLGNVPKSLPNEDSVKSTATKDDSGTSKVSGTDAEDAASSEKVDAEEGHNSNGKNQENGNGEVEKDDDDVDDDEKMGDEEDNDLDLSWKMLDIARAIVEKSQDNTMEKVKIYSALAEVATEREDMDNSLSDYMKALSMLEHLVEPDHRRVVELNFRICLVYELVSKIGEAISYCAKAISLCKSRIQSLKSSKDALLAGIDGDASAAEAEGGSEKSAIEKELEQLTSILPDLEKKLEDLSEANPSADMDEMVKAIVSRVTDVMPKAASFTSSQMATSSNGFDSSVMSTAATTGSSGSTVTDLGVVGRGVKRASIKPISAEPAAKKPALDSPSQQGDSSINSEVVPATQTGDESVSK

SEQ ID NO: 5032 - protein, 280 aa, Zea mays subsp. mays; identical to SEQ ID NO: 2639
  peptide (1)..(280): Ceres Seq. ID no. 12407078

SEQ ID NO: 5033 - DNA, 1249 bp, Zea mays subsp. mays
  misc_feature (1)..(1249): Ceres Seq. ID no. 12343376
  misc_feature (1)..(1249): Ortholog of  Ceres SEQ ID NO 15225131 as cited in SEQ ID NO 65974
aaccccagcgtagcggagccggcagccaagcagaaaaatacgagtatcgcacgcgcaaggcgattccgtccccattctccacccaatagggagctagagctacgagagggggaaacggggggacgggaataggcgtcgtcggccatgtcgtcgtcgtggaactcggtgggtctggcgatcctgtaccaggtgctgggctgggtcgccttcgccgcgtggtccttcagcttctacccgcaggtcctcctcaactacaagcgcaagagtgttgtgggcctgaatttcgattttctggtgttgaacttgacaaagcactcgtcctacctcatatacaatgctgctctcttcttcagcccattcattcagcaacagtatcatgacaaatatggtgacaaagagatgattccagttgctgcaaatgatgttgctttttcactgcatgctgtagcattgacagcctttaccgtttttcaagtattcatatatgagcgaggaacacagaaagtctccaaagtttgcatatcaatttctgctattgtctggatcgcggctcttgtttgcctcattattgcttggccaaaaagtgactggctttggcttattgatgtattcaattcaatacaagttggcatgacagcaatcaagtacatccctcaggccatcatgaacttcaggcggaagagcacaattggttggagcgttggcaatatattacttgatctcacaggaggggtgctgaatttttgtcagatgggtgtgcagtctatagatcaacatactttggtgaatttctatggaaacattgggaaaacccttctttcattggagacggttttctttgatgtcctgttcattatccaacactacgtgttgtaccctgtcaagaaggacgagaatggtaaggcaatcatttctgaaagggtagccccccttatcaggccttcggacaagcctgaagaagataacgtatgatctagctgtagttatattgcgcacattgcattcacgcgctgtttgcacacaggccacacacgcatgcgaattatttgttcaaaaggaattgctagcgcgtcttgattatattgctacttataacttttactacttggtgcactggcgagagatgtctcatataccaggttgcgggtttcaagtggccccgtttttattatcgtgatttgtgaaggttattagatatcatctcggccaacatttacgatcaatgctcatgtaaatatttggttgcatt

SEQ ID NO: 5034 - protein, 275 aa, Zea mays subsp. mays
  peptide (1)..(275): Ceres Seq. ID no. 12343377
MSSSWNSVGLAILYQVLGWVAFAAWSFSFYPQVLLNYKRKSVVGLNFDFLVLNLTKHSSYLIYNAALFFSPFIQQQYHDKYGDKEMIPVAANDVAFSLHAVALTAFTVFQVFIYERGTQKVSKVCISISAIVWIAALVCLIIAWPKSDWLWLIDVFNSIQVGMTAIKYIPQAIMNFRRKSTIGWSVGNILLDLTGGVLNFCQMGVQSIDQHTLVNFYGNIGKTLLSLETVFFDVLFIIQHYVLYPVKKDENGKAIISERVAPLIRPSDKPEEDNV

SEQ ID NO: 5035 - protein, 190 aa, Zea mays subsp. mays
  peptide (1)..(190): Ceres Seq. ID no. 12343378
MIPVAANDVAFSLHAVALTAFTVFQVFIYERGTQKVSKVCISISAIVWIAALVCLIIAWPKSDWLWLIDVFNSIQVGMTAIKYIPQAIMNFRRKSTIGWSVGNILLDLTGGVLNFCQMGVQSIDQHTLVNFYGNIGKTLLSLETVFFDVLFIIQHYVLYPVKKDENGKAIISERVAPLIRPSDKPEEDNV

SEQ ID NO: 5036 - DNA, 1567 bp, Zea mays subsp. mays
  misc_feature (1)..(1567): Ceres Seq. ID no. 12373692
  misc_feature (1)..(1567): Ortholog of  Ceres SEQ ID NO 15177328 as cited in SEQ ID NO 52523
  misc_feature (1)..(1567): Ortholog of  Ceres SEQ ID NO 13655881 as cited in SEQ ID NO 64426
accagttccgcagaataaacgagcgtgcaagcgctgctgggctggtgtcagtcacctgagcaaggaagagagatggccacgctgcctcgcgagggcgccgcggcggcggactccgaccagcttttggtagaagcacatggctctacacgaacgctgattttgaataggccaaagcagctcaatgcactctcctctgaaatgattaaaggtctcctatggtatttcacagcttttgagaaagatgatggagtcagattgttgattatgaaggggaatagaagagtattttgctctggaggtgatattgctcaatgtgcccggtgtttatataatggaaactggaaatgggtcgatgatttcttccaaaatgaatatttgctaaattacatcattgcgacttacataaaacctcaggtttccattcttagtggaattgtcatgggtggaggagctggtgtttcaatacatggaagatttcgagttgccactgataacacgatttttgcaatgccagaaacagctctaggcctctttccagatgtaggggcctcttattttctatctcggctaccagggttctatggagaatatgttggtctaactggtgccagattggatggtgcggaaatgcttgcctgtggcctggcaactcattttgtcccgtcaaagaggttgccattgcttgaggaatcgcttaaaaagctggacacgtccagtacttttgctgtgtcgggtattatcgaccagttttcacagaggccattagtgaaagatagcagctctttaaataggatggaaaccatcaacaaatgcttctccaaaaggacagttgaagaaatcatagatgctcttgaacaagaaatctcaaatgtttcagacaaatgggttgctgcaacaatcaagtccctgaaaaaggcttcccccaccagcctaaaaatttctctgagatcgataagagaagggagaacacaaactcttggggagtgcctgcgtcgggaatatagagtggtttgccatgtcctgcgtggcaccttcagccgagacttgtctgagggatttagggctgtgctactagaaaaagacaacaagccagagtggattcctccaaggttggaacaagttcctgacgaggcagttgagcaatatttcttgagaattgatgatccccagtgcaagatctgaacctgcctgcgagacttccccaccgaagaaatattgagtccaagatttgattgaggtcttggacgaagagtgagcctcggtcaggataactcgtcaactcatgtttgaagttgtgtgcggaatgttgacgacgattgataaataataaacgcggactgaatatatgtcttataagttcacatttatcgctaaataatttttgttgcttttgtgtgaagttgtacctgttagccttgttcggttacagggatgaaattctaccatagatataattcgggtctagattggatgaatcgatacctcacccaatcatatggtaagattaaatccatcatttaatacatacacctcccaaaactagttattcttttcatttatggattcc

SEQ ID NO: 5037 - protein, 369 aa, Zea mays subsp. mays
  peptide (1)..(369): Ceres Seq. ID no. 12373693
MATLPREGAAAADSDQLLVEAHGSTRTLILNRPKQLNALSSEMIKGLLWYFTAFEKDDGVRLLIMKGNRRVFCSGGDIAQCARCLYNGNWKWVDDFFQNEYLLNYIIATYIKPQVSILSGIVMGGGAGVSIHGRFRVATDNTIFAMPETALGLFPDVGASYFLSRLPGFYGEYVGLTGARLDGAEMLACGLATHFVPSKRLPLLEESLKKLDTSSTFAVSGIIDQFSQRPLVKDSSSLNRMETINKCFSKRTVEEIIDALEQEISNVSDKWVAATIKSLKKASPTSLKISLRSIREGRTQTLGECLRREYRVVCHVLRGTFSRDLSEGFRAVLLEKDNKPEWIPPRLEQVPDEAVEQYFLRIDDPQCKI

SEQ ID NO: 5038 - protein, 327 aa, Zea mays subsp. mays
  peptide (1)..(327): Ceres Seq. ID no. 12373694
MIKGLLWYFTAFEKDDGVRLLIMKGNRRVFCSGGDIAQCARCLYNGNWKWVDDFFQNEYLLNYIIATYIKPQVSILSGIVMGGGAGVSIHGRFRVATDNTIFAMPETALGLFPDVGASYFLSRLPGFYGEYVGLTGARLDGAEMLACGLATHFVPSKRLPLLEESLKKLDTSSTFAVSGIIDQFSQRPLVKDSSSLNRMETINKCFSKRTVEEIIDALEQEISNVSDKWVAATIKSLKKASPTSLKISLRSIREGRTQTLGECLRREYRVVCHVLRGTFSRDLSEGFRAVLLEKDNKPEWIPPRLEQVPDEAVEQYFLRIDDPQCKI

SEQ ID NO: 5039 - protein, 305 aa, Zea mays subsp. mays
  peptide (1)..(305): Ceres Seq. ID no. 12373695
MKGNRRVFCSGGDIAQCARCLYNGNWKWVDDFFQNEYLLNYIIATYIKPQVSILSGIVMGGGAGVSIHGRFRVATDNTIFAMPETALGLFPDVGASYFLSRLPGFYGEYVGLTGARLDGAEMLACGLATHFVPSKRLPLLEESLKKLDTSSTFAVSGIIDQFSQRPLVKDSSSLNRMETINKCFSKRTVEEIIDALEQEISNVSDKWVAATIKSLKKASPTSLKISLRSIREGRTQTLGECLRREYRVVCHVLRGTFSRDLSEGFRAVLLEKDNKPEWIPPRLEQVPDEAVEQYFLRIDDPQCKI

SEQ ID NO: 5040 - DNA, 1317 bp, Zea mays subsp. mays
  misc_feature (1)..(1317): Ceres Seq. ID no. 12349036
  misc_feature (1)..(1317): Ortholog of  Ceres SEQ ID NO 14308107 as cited in SEQ ID NO 59030
  misc_feature (1)..(1317): Ortholog of  Ceres SEQ ID NO 15226612 as cited in SEQ ID NO 62700
aatttttcctcacgtattatcctcttgcttgttcgtccggttcttcgccctcgccgcgcgggactaccaatccaaactggcgacgaccctgctgccaccccacagcagatttgaggagcggacgcccgtttaaatggctattggagtcccatccatggagctccaccgctcctcaccgttgctctcgggtggccgaggaggaaatacatgcctacagaagaagcccttctttgtccaagcaaagagactagtggggatggagaaagcaagtacgaggccaggaacacaagagtctggacagacaaagaaaagagcacccctggttcgtggaactgttagcccacctcttccagtaccaggaaacatacctcggcctccttatgtcggcacagaatatgtaccagagatagcaaaagagatacaaatgcatgacaaagagggcattgtccacatgagagctgcttgcgagctcgcggctcgtgttcttgactatgcaggaacgttagtgaaaccctctgtaacaacagacgaaattgataaagcagtgcacaagatgatcatcgatgctggagcctatccatcaccacttggatatggtgggtttccaaaaagtgtatgcacctcagtgaatgagtgcatgtgccatggaattcctgattcacgcgagctacaggatggagacataattaacattgatgtcactgtctacttgaatggttatcatggggatacctcaaaaacatttctttgtggagaagtcgatgaagccagtaaacgacttgtgaaggttactgaagagtgcttgctcaggggcatatcaacatgcaaacatggtaccagctttaagaagattggcagaagaataagtgagcatgctgagaggaacggttttggtgttgtggagtgttttgttgggcatggagtcggcagggtatttcactcagaaccaattatctatcaccagaggaacaacagaccgggccagatgattgaagggcagactttcacaatagagccgatcatatcgatggggagcatcgagtgcgacatgtgggacgacggctggactgccgtgacgacggacggcagcttggcggcgcagttcgagcacaccatactgatcaccaggaccggagccgagatcctcaccaagtgctaggaggaaaggaaatcgcatgtgcccgatagccgacggtaggtaatctgtattcgtgaggtggtgaggatgcttgaggtgacctattttgtctcgcaaaatgggcgtgctacagaatagtgaagaaaagggttgagagattgcaaatggcaggtttggcc

SEQ ID NO: 5041 - protein, 341 aa, Zea mays subsp. mays
  peptide (1)..(341): Ceres Seq. ID no. 12349037
MAIGVPSMELHRSSPLLSGGRGGNTCLQKKPFFVQAKRLVGMEKASTRPGTQESGQTKKRAPLVRGTVSPPLPVPGNIPRPPYVGTEYVPEIAKEIQMHDKEGIVHMRAACELAARVLDYAGTLVKPSVTTDEIDKAVHKMIIDAGAYPSPLGYGGFPKSVCTSVNECMCHGIPDSRELQDGDIINIDVTVYLNGYHGDTSKTFLCGEVDEASKRLVKVTEECLLRGISTCKHGTSFKKIGRRISEHAERNGFGVVECFVGHGVGRVFHSEPIIYHQRNNRPGQMIEGQTFTIEPIISMGSIECDMWDDGWTAVTTDGSLAAQFEHTILITRTGAEILTKC

SEQ ID NO: 5042 - protein, 334 aa, Zea mays subsp. mays
  peptide (1)..(334): Ceres Seq. ID no. 12349038
MELHRSSPLLSGGRGGNTCLQKKPFFVQAKRLVGMEKASTRPGTQESGQTKKRAPLVRGTVSPPLPVPGNIPRPPYVGTEYVPEIAKEIQMHDKEGIVHMRAACELAARVLDYAGTLVKPSVTTDEIDKAVHKMIIDAGAYPSPLGYGGFPKSVCTSVNECMCHGIPDSRELQDGDIINIDVTVYLNGYHGDTSKTFLCGEVDEASKRLVKVTEECLLRGISTCKHGTSFKKIGRRISEHAERNGFGVVECFVGHGVGRVFHSEPIIYHQRNNRPGQMIEGQTFTIEPIISMGSIECDMWDDGWTAVTTDGSLAAQFEHTILITRTGAEILTKC

SEQ ID NO: 5043 - protein, 300 aa, Zea mays subsp. mays
  peptide (1)..(300): Ceres Seq. ID no. 12349039
MEKASTRPGTQESGQTKKRAPLVRGTVSPPLPVPGNIPRPPYVGTEYVPEIAKEIQMHDKEGIVHMRAACELAARVLDYAGTLVKPSVTTDEIDKAVHKMIIDAGAYPSPLGYGGFPKSVCTSVNECMCHGIPDSRELQDGDIINIDVTVYLNGYHGDTSKTFLCGEVDEASKRLVKVTEECLLRGISTCKHGTSFKKIGRRISEHAERNGFGVVECFVGHGVGRVFHSEPIIYHQRNNRPGQMIEGQTFTIEPIISMGSIECDMWDDGWTAVTTDGSLAAQFEHTILITRTGAEILTKC

SEQ ID NO: 5044 - DNA, 717 bp, Zea mays subsp. mays
  misc_feature (1)..(717): Ceres Seq. ID no. 13493634
  misc_feature (1)..(717): Ortholog of  Ceres SEQ ID NO 12784326 as cited in SEQ ID NO 61717
taatcgaaaagcacacactactacactaggctacacactgtacgtacacttctctccctcccctccccctttcccggagcctttgcttcactcgcgtcgccgagctggctagcgacaagcgcgacaccgtcggcggcggcgacgccggcccgcgcctcgatgacggcgaggactcgtccgccgtgagcagcaaggcggtggtcgaggagctgtaccgcgcgctggagcgcggcgacgtggacgccgtgcgccgcctgctgaacccggacgtggactggtggttccacggcccgcgcgcgcaccagcacctggtgctcatgcgcctgctcaccggcaccggcgccggcgccggcctcccgttcaagatccggtccctggacgccttcgggccgacggtgctggccgagggcgccgacgcgacgggcgcgctctactgggtgcacgcgtggaccgtgggccccggcggccgcgtcaccggggtgcgcgagtactgcaacaccgcgctcgtcgtcgccgtcgaagcaggtgtggcagagccggctgcccgaccgggctcgcaggaacctccctggcctcgtgcttgcgatctgaccggatcggatgcgaatcatgcgacatataggttgttgcccagccaactggcggtgtggcttattatgcttgtgcatgtctgcaatgtggttacaattggacatgaatgaatcaaatgcgccacac

SEQ ID NO: 5045 - protein, 127 aa, Zea mays subsp. mays
  peptide (1)..(127): Ceres Seq. ID no. 13493635
MRLLTGTGAGAGLPFKIRSLDAFGPTVLAEGADATGALYWVHAWTVGPGGRVTGVREYCNTALVVAVEAGVAEPAARPGSQEPPWPRACDLTGSDANHATYRLLPSQLAVWLIMLVHVCNVVTIGHE

SEQ ID NO: 5046 - DNA, 1447 bp, Zea mays subsp. mays
  misc_feature (1)..(1447): Ceres Seq. ID no. 12407271
  misc_feature (1)..(1447): Ortholog of  Ceres SEQ ID NO 15225613 as cited in SEQ ID NO 649
  misc_feature (1)..(1447): Ortholog of  Ceres SEQ ID NO 13647762 as cited in SEQ ID NO 20426
aagaactaaggcttgtccctttccctctcctctcctcccctcccctccgtctccaactcccatcttctctcctggaagccgcctcggtcggacccggacaagatggccgccttcttcggtgctgcaccgccgccggctctcgcttcgttccgccacgaggaggaggagcagcagcatcaggacgccgccgaggaggtgtaccacgtggacgatgtcgacgagggcagcggtgacggccgtggccacggcggcgccggccaggggaagctgtgcgccaggggccactggcgccccgccgaggacgccaagctcaaggagctcgtcgcgcagttcgggccccagaactggaacctcatcgccgagaggctggacggcagatcagggaagagctgccgcctgcggtggttcaaccagctggacccgcggatcaaccggcgcgccttctcggaggaggaggaggagcggctcctggcggcgcaccgcgcgtacggcaacaagtgggctctcatcgcgcgcctcttcccgggccgcaccgacaacgccgtcaagaaccactggcacgtcctcatggcgcgcaggcagcgggagcactcgggcgcgctccgccgccgcaagccctcctcgacctcgccctcgccggcgccggcgccggcgccgcacctggcgcccgtcgtcgtcctccaccaccaccaccactacgccggcggctcccctcccatgccgccgttgcacgccgccgacgcccacacgcagtacacggcagcggcggcggcagcggacacccgcgcgcacagcggcggcgagtccgacgagaccgcctccacgtgcaccaccgacctctccctcgcttccgccgccccctgcttctaccagagtggctacgacgtggccccgccgcgccgcggcgttcgcaccgagcgcgcgctccgccttctccgcgccgccggcgacggcgcgctccgacgacaaggtctcgctgcccttcttcgacttcctcggcgtcggcgcggcgtgatgggggggccggcccgggccggccaggcggcggtgtacaggagggcggaggcggtcaaaggacgagagccccggcggcggtgaatccgtgcccgcgcgtagtttagctttagagcccgagttaaatcatcgagaacagaacatggcctgagcctgagagaggaggagaatggcgatccaccattgaactggtgcccgtggcattgcagactaacagctccgcatccgttcggctgctgatgttgctagtagtaatggtacggtgattactctctgctttgggttgggagagacgagtttgcaagcaccaccagaccaagcaagggcgacgatgggtatgggtggatgtttgcagaagaagaaaaaaccgcttgtaacacaaactgcaggacaaaggcagatcagagatcctctgctaactctctttttaccc

SEQ ID NO: 5047 - protein, 337 aa, Zea mays subsp. mays
  peptide (1)..(337): Ceres Seq. ID no. 12407272
RTKACPFPSPLLPSPPSPTPIFSPGSRLGRTRTRWPPSSVLHRRRLSLRSATRRRSSSIRTPPRRCTTWTMSTRAAVTAVATAAPARGSCAPGATGAPPRTPSSRSSSRSSGPRTGTSSPRGWTADQGRAAACGGSTSWTRGSTGAPSRRRRRSGSWRRTARTATSGLSSRASSRAAPTTPSRTTGTSSWRAGSGSTRARSAAASPPRPRPRRRRRRRRTWRPSSSSTTTTTTPAAPLPCRRCTPPTPTRSTRQRRRQRTPARTAAASPTRPPPRAPPTSPSLPPPPASTRVATTWPRRAAAFAPSARSAFSAPPATARSDDKVSLPFFDFLGVGAA

SEQ ID NO: 5048 - protein, 331 aa, Zea mays subsp. mays
  peptide (1)..(331): Ceres Seq. ID no. 12407273
MAAFFGAAPPPALASFRHEEEEQQHQDAAEEVYHVDDVDEGSGDGRGHGGAGQGKLCARGHWRPAEDAKLKELVAQFGPQNWNLIAERLDGRSGKSCRLRWFNQLDPRINRRAFSEEEEERLLAAHRAYGNKWALIARLFPGRTDNAVKNHWHVLMARRQREHSGALRRRKPSSTSPSPAPAPAPHLAPVVVLHHHHHYAGGSPPMPPLHAADAHTQYTAAAAAADTRAHSGGESDETASTCTTDLSLASAAPCFYQSGYDVAPPRRGVRTERALRLLRAAGDGALRRQGLAALLRLPRRRRGVMGGPARAGQAAVYRRAEAVKGREPRRR

SEQ ID NO: 5049 - protein, 267 aa, Zea mays subsp. mays
  peptide (1)..(267): Ceres Seq. ID no. 12407274
MSTRAAVTAVATAAPARGSCAPGATGAPPRTPSSRSSSRSSGPRTGTSSPRGWTADQGRAAACGGSTSWTRGSTGAPSRRRRRSGSWRRTARTATSGLSSRASSRAAPTTPSRTTGTSSWRAGSGSTRARSAAASPPRPRPRRRRRRRRTWRPSSSSTTTTTTPAAPLPCRRCTPPTPTRSTRQRRRQRTPARTAAASPTRPPPRAPPTSPSLPPPPASTRVATTWPRRAAAFAPSARSAFSAPPATARSDDKVSLPFFDFLGVGAA

SEQ ID NO: 5050 - DNA, 1892 bp, Zea mays subsp. mays
  misc_feature (1)..(1892): Ceres Seq. ID no. 12344080
  misc_feature (1)..(1892): Ortholog of  Ceres SEQ ID NO 14315146 as cited in SEQ ID NO 52929
  misc_feature (1)..(1892): Ortholog of  Ceres SEQ ID NO 14302263 as cited in SEQ ID NO 64701
  misc_feature (1)..(1892): Ortholog of  Ceres SEQ ID NO 13584538 as cited in SEQ ID NO 64739
  misc_feature (1)..(1892): Ortholog of  Ceres SEQ ID NO 15169643 as cited in SEQ ID NO 64826
  misc_feature (1)..(1892): Ortholog of  Ceres SEQ ID NO 15169647 as cited in SEQ ID NO 64930
aaagcaacggacccccattcgcatccgcctccttttccttggagccgaagaagagggaaaggaagggaggacagccgccgccgccgccatcaccaccgtcaggatgcattccacgaacctcctgctcgaggagcccatccggatggcctccatcctcgagccctccaagcccagctacttcccggcgatgaccaagatcgtcggcactctcggccccaagtcgcgctccgtcgacacgatctccgcctgcctcaaggccggcatgtccgtcgcccggttcgatttctcgtggggggacgccgcgtaccaccaggagacgctggagaacctcaagctctccatcaagtccaccaagaagctctgcgcgtgtcatgctcgacaccgtgggcccggagctgcaggtggtgaacaagagcgagaccccgatctccctcgaggagaatggcacggtcgttctcacccctcaccgggggccaagacgcctcctccagcttgctgcccatcaacttctctggactcgccaaggcggtgacaccaggggcaacaatattcgtgggacaatacttgttcactggcagtgagaccacctcagtttggttggaggtttctgaagtgaaaggagatgatgtggtgtgtataatcaagaacacagccaccttggctgggtcactgttcacgctgcattgctcccagattcacattgacttgcccaccctgtctgatgaggataaggatgtcattagaaaatggggtactcccaataagattgacttcctttctctgtcctacacaagacatgcagaggatgtgcgccaggcacgggaattcctgtcaaaattgggcgatctaagccagactctgatttttgccaaaattgagaatgtcgagggcctgaaccaatttgatgaaatactggctgaggcagatggtatcattttatcaagagggaacctgggaattgatcttccacctgagaaggtctttttgtttcaaaaatctgctcttcacaagtgcaacatggctggaaagcctgctgttgtcactcgtgttgtggacagtatgactgacaacctcaggcctactcgggcggaggcaactgatgtggccaatgcagtacttgacgggagtgatgccattctccttggtgctgagactcttcgaggtttatatccagttgagactatttcgacagtgggcagaatttgtgctgaggctgagaaggtattcaaccaagatttatacttcaagcaaactgtgaaatatgtcggagaacccatgacccacttggagtccattgcttcctcagcggtgcgagctgctatcaaagttaaggcttcggtgatcatttgcttcacctcttctgggagggctgcaaggctcatcgccaagtacaggcccaccatgcctgttctttctgttgtcattcctcgtctgaagacaaaccaactgagatggagtttcactggtgcttttgaggcaagacagtcgctgatagttagaggcctctttccgatgcttgctgatcctcggcatccagccgaatcaaccagtaatacaaatgagtcagttctgaaggttgctctagaccatggcaaggcatgtggtgtgatcaagtcccatgaccgtgttgtcgtttgccagaaggtgggagattcatcggttgtgaagatcattgagctggacgactagggcatactttgccgattttttttttttgacgaggccggaatttgttggctatatgtataatcctatagctttctttacaaatgagcagtttttccctatggtgccatcataggacttgcttagcgatttaaaactcgattatgtgccacctaaaatgggcagatggaacaatgaaatcatactgtgccctttatccgttgctt

SEQ ID NO: 5051 - protein, 415 aa, Zea mays subsp. mays
  peptide (1)..(415): Ceres Seq. ID no. 12344081
MARSFSPLTGGQDASSSLLPINFSGLAKAVTPGATIFVGQYLFTGSETTSVWLEVSEVKGDDVVCIIKNTATLAGSLFTLHCSQIHIDLPTLSDEDKDVIRKWGTPNKIDFLSLSYTRHAEDVRQAREFLSKLGDLSQTLIFAKIENVEGLNQFDEILAEADGIILSRGNLGIDLPPEKVFLFQKSALHKCNMAGKPAVVTRVVDSMTDNLRPTRAEATDVANAVLDGSDAILLGAETLRGLYPVETISTVGRICAEAEKVFNQDLYFKQTVKYVGEPMTHLESIASSAVRAAIKVKASVIICFTSSGRAARLIAKYRPTMPVLSVVIPRLKTNQLRWSFTGAFEARQSLIVRGLFPMLADPRHPAESTSNTNESVLKVALDHGKACGVIKSHDRVVVCQKVGDSSVVKIIELDD

SEQ ID NO: 5052 - protein, 223 aa, Zea mays subsp. mays
  peptide (1)..(223): Ceres Seq. ID no. 12344082
MAGKPAVVTRVVDSMTDNLRPTRAEATDVANAVLDGSDAILLGAETLRGLYPVETISTVGRICAEAEKVFNQDLYFKQTVKYVGEPMTHLESIASSAVRAAIKVKASVIICFTSSGRAARLIAKYRPTMPVLSVVIPRLKTNQLRWSFTGAFEARQSLIVRGLFPMLADPRHPAESTSNTNESVLKVALDHGKACGVIKSHDRVVVCQKVGDSSVVKIIELDD

SEQ ID NO: 5053 - protein, 209 aa, Zea mays subsp. mays
  peptide (1)..(209): Ceres Seq. ID no. 12344083
MTDNLRPTRAEATDVANAVLDGSDAILLGAETLRGLYPVETISTVGRICAEAEKVFNQDLYFKQTVKYVGEPMTHLESIASSAVRAAIKVKASVIICFTSSGRAARLIAKYRPTMPVLSVVIPRLKTNQLRWSFTGAFEARQSLIVRGLFPMLADPRHPAESTSNTNESVLKVALDHGKACGVIKSHDRVVVCQKVGDSSVVKIIELDD

SEQ ID NO: 5054 - DNA, 991 bp, Zea mays subsp. mays
  misc_feature (1)..(991): Ceres Seq. ID no. 12343786
  misc_feature (1)..(991): Ortholog of  Ceres SEQ ID NO 15171175 as cited in SEQ ID NO 57476
  misc_feature (1)..(991): Ortholog of  Ceres SEQ ID NO 15178436 as cited in SEQ ID NO 57919
  misc_feature (1)..(991): Ortholog of  Ceres SEQ ID NO 13655808 as cited in SEQ ID NO 64901
gttgtgcgtcttttcctcagcagcaaccggagagcggctgctcgcctgctcctcctcctagggaaaggacagcggcggcggcggcggcggcgagaagttgggcctgaagcccggacgctttctcccgagataccgcaatactgctagagcactgtcactaatgtttgcttatgacaatggagtcacctacaactgccgctggtggtgaactggagagctacttctccttgggtttgacagtatcccactcacagaaagataatgctgaatttccaaaggttctgttgcttctctcagcgtatcttgacaagacagttcagcagaatgaagagttactagactccagtaaaataaaggagtcgaccactatctttcatggtcagagggtgcctgaacttagtataaagctgtatgcagagcgtattttcaagtatgcaaagtgcagcccatcttgctttgtgctagcacttatctacatggagagatatctacaacaaccaaacatttacatgacgtcatttagtgttcatcgcctgcttattacaagtgttgttgttgctgccaaattcatagatgatgcgtttttcaataatgcatactacgggagagttggaggaattagcacaagagagatgaatatgcttgaactggatttattgttcggtctggacttcaggctcaaagtggatatagagactttcgaaagctactgcttacagttggaggaagcactggttcttgttttggagagaccaattcaggtccaagaggccaacgtaactaaacacttgatttgtaacagcagcgccgatgagacttgcaaacacgagctcgggcttgaaaggtacagcagtcaggctgtccaagggtgtagttggtaaatgtgattgggcagatagttttgaaaaaagtgtatgggtccgagtattggtaattcttttatttgacatttaagttgttcagttggccttgtttagtagggccgttattc

SEQ ID NO: 5055 - protein, 236 aa, Zea mays subsp. mays
  peptide (1)..(236): Ceres Seq. ID no. 12343787
MTMESPTTAAGGELESYFSLGLTVSHSQKDNAEFPKVLLLLSAYLDKTVQQNEELLDSSKIKESTTIFHGQRVPELSIKLYAERIFKYAKCSPSCFVLALIYMERYLQQPNIYMTSFSVHRLLITSVVVAAKFIDDAFFNNAYYGRVGGISTREMNMLELDLLFGLDFRLKVDIETFESYCLQLEEALVLVLERPIQVQEANVTKHLICNSSADETCKHELGLERYSSQAVQGCSW

SEQ ID NO: 5056 - protein, 234 aa, Zea mays subsp. mays
  peptide (1)..(234): Ceres Seq. ID no. 12343788
MESPTTAAGGELESYFSLGLTVSHSQKDNAEFPKVLLLLSAYLDKTVQQNEELLDSSKIKESTTIFHGQRVPELSIKLYAERIFKYAKCSPSCFVLALIYMERYLQQPNIYMTSFSVHRLLITSVVVAAKFIDDAFFNNAYYGRVGGISTREMNMLELDLLFGLDFRLKVDIETFESYCLQLEEALVLVLERPIQVQEANVTKHLICNSSADETCKHELGLERYSSQAVQGCSW

SEQ ID NO: 5057 - protein, 134 aa, Zea mays subsp. mays
  peptide (1)..(134): Ceres Seq. ID no. 12343789
MERYLQQPNIYMTSFSVHRLLITSVVVAAKFIDDAFFNNAYYGRVGGISTREMNMLELDLLFGLDFRLKVDIETFESYCLQLEEALVLVLERPIQVQEANVTKHLICNSSADETCKHELGLERYSSQAVQGCSW

SEQ ID NO: 5058 - DNA, 1084 bp, Zea mays subsp. mays
  misc_feature (1)..(1084): Ceres Seq. ID no. 12407764
  misc_feature (1)..(1084): Ortholog of  Ceres SEQ ID NO 13659393 as cited in SEQ ID NO 67047
  misc_feature (1)..(1084): Ortholog of  Ceres SEQ ID NO 13654553 as cited in SEQ ID NO 68417
ctgctccttctctggtgaggaggcgtggtgagagactgcgactgcgcgatggaggcgtcgtcgtcggcgttggcgctcgtggccgccgtgctcctcctctcctccccgctcgctgcgtcagatttctgcgtgtgccgttcggaccagccgacggcggtgctgcagaaggcgatcgacttcgcgtgcggcccgcagggcggcgccgactgcacgcccatcctgcagggcggcgggtgctacagcccggacaccgccgccgcgcactgctcctgggccgccaacacctactaccagaacaacaaggccaggggcgccacctgcgacttcggcggcgcagccaccgtctccaccaccgacccgagtttctccgggtgcactttcgcttccagtgccaccagcgccggtgctgggactggaaccgggacggcgggcagcagcaccttcagccccagcgcgggcaccggcttcaacggcaccgggaacgggatgggcggcagcactactaccggcctgggacccacgggcaacgcctttgacgccgccgccgccgccgcgccgggcctgctccccagcgccgcgtccctcggcctcgcactcgccgtcctctccttcctaacctagccctgccgcgccattaacggcagcctcccctcgtcttatgtctggtcgtgttcagtaccatacctctctgaacatgagccagctgctgctgctacttggcttgctccatggcggaaggggacgggccggggagctgtacgtactgcgacgaagaagagtgcggtggaactggctggttggttggttttggttccagcttcattttcacctcacaccccacactgctagtggcgacggtggttggggttgcggggtgcggtgcgtgccttttttgatgaatcctagctacacgacgggatggcgtgtggtttattcgctggtaggatggctgtctcttttcctccgaggaccattcatgtcttccttgtttgtacgtacctctcttcttttcttgttttatgtacaagacttgtcgctagccctttgtttgtttgtttctaatcaaactctttgttctgctgtc

SEQ ID NO: 5059 - protein, 190 aa, Zea mays subsp. mays
  peptide (1)..(190): Ceres Seq. ID no. 12407765
MEASSSALALVAAVLLLSSPLAASDFCVCRSDQPTAVLQKAIDFACGPQGGADCTPILQGGGCYSPDTAAAHCSWAANTYYQNNKARGATCDFGGAATVSTTDPSFSGCTFASSATSAGAGTGTGTAGSSTFSPSAGTGFNGTGNGMGGSTTTGLGPTGNAFDAAAAAAPGLLPSAASLGLALAVLSFLT

SEQ ID NO: 5060 - protein, 177 aa, Zea mays subsp. mays
  peptide (1)..(177): Ceres Seq. ID no. 12407766
APSLVRRRGERLRLRDGGVVVGVGARGRRAPPLLPARCVRFLRVPFGPADGGAAEGDRLRVRPAGRRRLHAHPAGRRVLQPGHRRRALLLGRQHLLPEQQGQGRHLRLRRRSHRLHHRPEFLRVHFRFQCHQRRCWDWNRDGGQQHLQPQRGHRLQRHRERDGRQHYYRPGTHGQRL

SEQ ID NO: 5061 - protein, 142 aa, Zea mays subsp. mays
  peptide (1)..(142): Ceres Seq. ID no. 12407767
MSGRVQYHTSLNMSQLLLLLGLLHGGRGRAGELYVLRRRRVRWNWLVGWFWFQLHFHLTPHTASGDGGWGCGVRCVPFLMNPSYTTGWRVVYSLVGWLSLFLRGPFMSSLFVRTSLLFLFYVQDLSLALCLFVSNQTLCSAV

SEQ ID NO: 5062 - DNA, 1561 bp, Zea mays subsp. mays
  misc_feature (1)..(1561): Ceres Seq. ID no. 13494774
  misc_feature (1)..(1561): Ortholog of  Ceres SEQ ID NO 12583469 as cited in SEQ ID NO 51031
  misc_feature (1)..(1561): Ortholog of  Ceres SEQ ID NO 13596527 as cited in SEQ ID NO 62582
  misc_feature (1)..(1561): Ortholog of  Ceres SEQ ID NO 15226378 as cited in SEQ ID NO 62741
  misc_feature (1)..(1561): Ortholog of  Ceres SEQ ID NO 15169639 as cited in SEQ ID NO 64624
  misc_feature (1)..(1561): Ortholog of  Ceres SEQ ID NO 14303071 as cited in SEQ ID NO 67114
  misc_feature (1)..(1561): Ortholog of  Ceres SEQ ID NO 13595998 as cited in SEQ ID NO 68161
  misc_feature (1)..(1561): Ortholog of  Ceres SEQ ID NO 14303635 as cited in SEQ ID NO 68503
aagaaccccgacccgaccgccgatagctacctagctcccaccccgcacccctgactccaccttctccattcttgatcccttcgccgcgcggagatccaagaacaggggcagcctgacaggggaacgggcggctatgggaggaagcagcgcgatgctcgccgtgttggcggtggtggttcttgcggcggtcggcggcgctgacgccgcggcggaatcgagtgaggcgtcggccaaggggaggtaccacgcgctcttcaatttcggggactcgctagccgacgctggcaacctcatccagaacggcaccccggacatcctggccaccgcgcgcctgccctacggccagacctacttcggcagggccaccggccgctgctccgacggacgcctcgtcatcgaccacctcgcacaagagtttggcctgccgctgctgccgccgtccaaggccacgaacgccagcttcgcgtacggcgccaatttcgccatcaccggcgccaccgcgctcgacacgccctacttcgaggccaaggggctcggtgccgtcatctggaactccggagcgctcatgacccaaatccagtggttccgtgatctcaagcctttcttctgcaacacaacgcaggcatgcaagaaattctttgccaaggcgctgtttgtggtcggtgagtttggcggcaatgactacaatgcacccctctttgcgggcatgggcatcccagaggtttacaaattcatgccggatgtcatccagggcatctctgacggtattgaggcactgattgctgagggggctgtggagatgattgtgcctggtgttatgcccactggctgcttcccagtgtacttgaacatgcttgatgagcccaaagagggatatggctcccgcagtgggtgtgtccgccggtacaacacattctcctgggtgcacaatgcacatctcaaggccatgcttaagaagctccgggctaagcatcccaatgtgaggatcatatatggcgattactacactccagttgtccagttcatgcttcagcctgagaagtttggttttgccaaacaactgcctagggcatgttgtggggctccatcgactcctgagaaagcagcttacaacttcaatgtcacggccaaatgcggtgagcctggtgcgactgcctgtgctgatccgacaacccattggagctgggatggcattcacctgacggaggctgcgtaccgccatatcgctaaaggctggttatacgggccttttgcggaccaaccaatcatccaatcctcatgatcacgccactcctgctgtagagtttcatcaaagtagcgcactggaaaaaaaatggagcgggggaaagtagttcttccatacagtttcaatgtttgcatacatgtacatctccattttgattgtattcatttaacttgggtggtacaaaggtgggatagggaggctgcacaaaggcctgatttcttgatttgtcagggggtataaatatgaaaaatataacgtacatataatcatgtatattgtgtcctggaaatgtgatacagactgtctgcttgagct

SEQ ID NO: 5063 - protein, 382 aa, Zea mays subsp. mays
  peptide (1)..(382): Ceres Seq. ID no. 13494775
MGGSSAMLAVLAVVVLAAVGGADAAAESSEASAKGRYHALFNFGDSLADAGNLIQNGTPDILATARLPYGQTYFGRATGRCSDGRLVIDHLAQEFGLPLLPPSKATNASFAYGANFAITGATALDTPYFEAKGLGAVIWNSGALMTQIQWFRDLKPFFCNTTQACKKFFAKALFVVGEFGGNDYNAPLFAGMGIPEVYKFMPDVIQGISDGIEALIAEGAVEMIVPGVMPTGCFPVYLNMLDEPKEGYGSRSGCVRRYNTFSWVHNAHLKAMLKKLRAKHPNVRIIYGDYYTPVVQFMLQPEKFGFAKQLPRACCGAPSTPEKAAYNFNVTAKCGEPGATACADPTTHWSWDGIHLTEAAYRHIAKGWLYGPFADQPIIQSS

SEQ ID NO: 5064 - protein, 376 aa, Zea mays subsp. mays
  peptide (1)..(376): Ceres Seq. ID no. 13494776
MLAVLAVVVLAAVGGADAAAESSEASAKGRYHALFNFGDSLADAGNLIQNGTPDILATARLPYGQTYFGRATGRCSDGRLVIDHLAQEFGLPLLPPSKATNASFAYGANFAITGATALDTPYFEAKGLGAVIWNSGALMTQIQWFRDLKPFFCNTTQACKKFFAKALFVVGEFGGNDYNAPLFAGMGIPEVYKFMPDVIQGISDGIEALIAEGAVEMIVPGVMPTGCFPVYLNMLDEPKEGYGSRSGCVRRYNTFSWVHNAHLKAMLKKLRAKHPNVRIIYGDYYTPVVQFMLQPEKFGFAKQLPRACCGAPSTPEKAAYNFNVTAKCGEPGATACADPTTHWSWDGIHLTEAAYRHIAKGWLYGPFADQPIIQSS

SEQ ID NO: 5065 - protein, 238 aa, Zea mays subsp. mays
  peptide (1)..(238): Ceres Seq. ID no. 13494777
MTQIQWFRDLKPFFCNTTQACKKFFAKALFVVGEFGGNDYNAPLFAGMGIPEVYKFMPDVIQGISDGIEALIAEGAVEMIVPGVMPTGCFPVYLNMLDEPKEGYGSRSGCVRRYNTFSWVHNAHLKAMLKKLRAKHPNVRIIYGDYYTPVVQFMLQPEKFGFAKQLPRACCGAPSTPEKAAYNFNVTAKCGEPGATACADPTTHWSWDGIHLTEAAYRHIAKGWLYGPFADQPIIQSS

SEQ ID NO: 5066 - DNA, 1232 bp, Zea mays subsp. mays; identical to SEQ ID NO: 2188
  misc_feature (1)..(1232): Ceres Seq. ID no. 13635672
  misc_feature (1)..(1232): Ortholog of  Ceres SEQ ID NO 15224319 as cited in SEQ ID NO 66044

SEQ ID NO: 5067 - protein, 247 aa, Zea mays subsp. mays; identical to SEQ ID NO: 2189
  peptide (1)..(247): Ceres Seq. ID no. 15220349
  misc_feature (86)..(86): Xaa is any aa, unknown or other

SEQ ID NO: 5068 - protein, 246 aa, Zea mays subsp. mays; identical to SEQ ID NO: 2190
  peptide (1)..(246): Ceres Seq. ID no. 15220350
  misc_feature (28)..(28): Xaa is any aa, unknown or other

SEQ ID NO: 5069 - protein, 193 aa, Zea mays subsp. mays; identical to SEQ ID NO: 2191
  peptide (1)..(193): Ceres Seq. ID no. 15220351
  misc_feature (32)..(32): Xaa is any aa, unknown or other

SEQ ID NO: 5070 - DNA, 1560 bp, Zea mays subsp. mays
  misc_feature (1)..(1560): Ceres Seq. ID no. 12373262
  misc_feature (1)..(1560): Ortholog of  Ceres SEQ ID NO 14311001 as cited in SEQ ID NO 53717
  misc_feature (1)..(1560): Ortholog of  Ceres SEQ ID NO 14314945 as cited in SEQ ID NO 58031
  misc_feature (1)..(1560): Ortholog of  Ceres SEQ ID NO 13595833 as cited in SEQ ID NO 59877
  misc_feature (1)..(1560): Ortholog of  Ceres SEQ ID NO 13654452 as cited in SEQ ID NO 65792
  misc_feature (1)..(1560): Ortholog of  Ceres SEQ ID NO 13573778 as cited in SEQ ID NO 0
gaaccccgagtcccgaccagagagagacacggagaggagcagacctgcccgtcgcaatggcgatgccaccgaagcccggcgacccgccgcagcgctcgccggcacgtagcccaaacctcaatctcccctgcccgctgccgccggtcccgggcggggcgccgccaccgccgcagcagcagccgggcgccgggctgcccccgccgcgcgtgggccaccaccgccgcgccagatctgaggtggccttccgcttcccggacgacctgcccggcggcgggggcggcggcttcgacgagatcggctccgaggacgacctcttctccaccttcatggacatggacaagatcgccggcgccgaccgcgaccgcgccgccgagacctcctcgccgccgcgcccagccaagcaccgccacagcgtctcctttgacggcttcggcatgggggctgccgccggcggcccgggcggccagcaggacgggggtggaggcgtgttcggagaggtgatggaggccaagaaggccatgtgcttccgagcagctctccgagctcgccgccatcgatcccaagcgcgccaaaagaattattgcaaacaggcaatctgcagcacggtcaaaggaaagaaaagctcgatatataacagaattggagcggaaggttcaaactcttcagacagaggctactactctttcagcacagctgacactattccagagagacacaactggactttcagcagaaaatgctgagctcaagataaggttgcaggccatggagcagcaggctcagctgcgtgacgctctaaatgatgcactgaggcaagaagtggagaggcttaagatagcaacgggcgagatgtcgaagtccaataacgagcatttcaatatgggaatgcagcacgtctcctacagcccttcattcttccagctctcggagcaacacacaatgcagcagcatggaaacattcagctgccgcatcatttccaacagcctccgctgactgtcccgagccaccagatgctatcccaccccaactccctctcgaacatggtgcagccaagactcgcttgggcggctccaggggctggacattgggaaaggatccatggctgtgaagtcggaggctgaggtcgtggtgaagtcggagggcagctctatatctgcgggtgaaagcaacaccaccttctagctatacaatacgtctgccttccaagaagcctttgtttggtttagagttcttcttttgttcatagtctgacatccttgaactgcttcctccttccctgtagtttttttattccattcgttatatctagttaccattgatcggttgtgtcgatcgttgttgtcgtggtggctgattttatagggacattggtgtgttggttttgagtttgttatgtgtgtggtatggttggttgtttcgagctagtgactgagagggcaccgagtgattttttggcagattttcttttctccacctgtcttagttttgttatagaacaaccatgatttctccttctgggaatgtgtacattgcgtgaagtgtgttgtttcaggctatct

SEQ ID NO: 5071 - protein, 246 aa, Zea mays subsp. mays
  peptide (1)..(246): Ceres Seq. ID no. 12373263
TPSPDQRETRRGADLPVAMAMPPKPGDPPQRSPARSPNLNLPCPLPPVPGGAPPPPQQQPGAGLPPPRVGHHRRARSEVAFRFPDDLPGGGGGGFDEIGSEDDLFSTFMDMDKIAGADRDRAAETSSPPRPAKHRHSVSFDGFGMGAAAGGPGGQQDGGGGVFGEVMEAKKAMCFRAALRARRHRSQARQKNYCKQAICSTVKGKKSSIYNRIGAEGSNSSDRGYYSFSTADTIPERHNWTFSRKC

SEQ ID NO: 5072 - protein, 228 aa, Zea mays subsp. mays
  peptide (1)..(228): Ceres Seq. ID no. 12373264
MAMPPKPGDPPQRSPARSPNLNLPCPLPPVPGGAPPPPQQQPGAGLPPPRVGHHRRARSEVAFRFPDDLPGGGGGGFDEIGSEDDLFSTFMDMDKIAGADRDRAAETSSPPRPAKHRHSVSFDGFGMGAAAGGPGGQQDGGGGVFGEVMEAKKAMCFRAALRARRHRSQARQKNYCKQAICSTVKGKKSSIYNRIGAEGSNSSDRGYYSFSTADTIPERHNWTFSRKC

SEQ ID NO: 5073 - protein, 226 aa, Zea mays subsp. mays
  peptide (1)..(226): Ceres Seq. ID no. 12373265
MPPKPGDPPQRSPARSPNLNLPCPLPPVPGGAPPPPQQQPGAGLPPPRVGHHRRARSEVAFRFPDDLPGGGGGGFDEIGSEDDLFSTFMDMDKIAGADRDRAAETSSPPRPAKHRHSVSFDGFGMGAAAGGPGGQQDGGGGVFGEVMEAKKAMCFRAALRARRHRSQARQKNYCKQAICSTVKGKKSSIYNRIGAEGSNSSDRGYYSFSTADTIPERHNWTFSRKC

SEQ ID NO: 5074 - DNA, 1414 bp, Zea mays subsp. mays
  misc_feature (1)..(1414): Ceres Seq. ID no. 12373258
  misc_feature (1)..(1414): Ortholog of  Ceres SEQ ID NO 15179055 as cited in SEQ ID NO 0
aactgaaactgtgtcattgtctgtcagtgctcgccgcgcggatctagggggaggggggccgtgcccggcgcggacgccgggatgccgatctgcgcgccgtcgtccgactcctcggcctcggcctcgtcgggcttgggcgcccgcgtctgggtgctccacgggctagcgctcggcgcggcggccgcggccgctgccgttgcgtacctgtaccggcggccgaccgggttccgcagccgcgcggtggggatcatacccgcgcgcttcgcctccacgcgcttcgagggcaagccgctcgttcccatcctcggcaagcccatgatccagagaacatgggaaagagttatgctagcttcttcgttggaccatgttgttgtggcaacggatgatgagagaattgcagaatgctgtcgaggatttggagctgatgttataatgacatcagcatcttgcaaaaacggatctgaacgctgctgtgaggcactaaagaagcttgataagcactatgatattgttgtcaatattcaaggagatgagcctctcattgaaccagagataatagatggtgtagttatgtcactgcagcgagctcctgatgcagtcttcagcacagctgttacttcactgaaaccagaagatgcattcgatacaaacagggtgaagtgtgttgtggataatctgggctacgcaatatacttttcaagagggctgattccattcaataaatcagggaacgccaatccaaaatatccatatcttcttcatcttggaatcgcgggctttgattcaaaatttttgaagatatatccagaacttccaccaacaccattacaaatggaagaggacctagagcaactaaaagttcttgaaaatggctataggatgaaggtgatcaaagtggaccatgatgcccatggtgtggatgcacccgaggacgttgagaaaatcgaagcactgatgcgaacgagaaacattcagtagaaaacgaagagaaagcaagtgctttgcattgctatcggcgttggcttggtgggatacttttggttgtgctttcccgtcttctgaatagcatgataccaagtgaagttggtgcatcacttcttgaagttttgtgcttgctaaaacgttcagtgattggatatgtcacttgcattagtcctcaatcagcagttcagcgcgcaggtggattgtatctgtacttcagtagttagtagcattactttcagtcttctttacattgaaaaacaaatcgtttctggagatgaagcaattggacagtgtaaaacaaaaggctaaagacccatccatgccgcgaggcgtgattgatataaggccagactcatcggaactttcattagacttccatttacatgtaataagttttcatatatacaatgttgatgatgtatacaatttt

SEQ ID NO: 5075 - protein, 298 aa, Zea mays subsp. mays
  peptide (1)..(298): Ceres Seq. ID no. 12373259
MPICAPSSDSSASASSGLGARVWVLHGLALGAAAAAAAVAYLYRRPTGFRSRAVGIIPARFASTRFEGKPLVPILGKPMIQRTWERVMLASSLDHVVVATDDERIAECCRGFGADVIMTSASCKNGSERCCEALKKLDKHYDIVVNIQGDEPLIEPEIIDGVVMSLQRAPDAVFSTAVTSLKPEDAFDTNRVKCVVDNLGYAIYFSRGLIPFNKSGNANPKYPYLLHLGIAGFDSKFLKIYPELPPTPLQMEEDLEQLKVLENGYRMKVIKVDHDAHGVDAPEDVEKIEALMRTRNIQ

SEQ ID NO: 5076 - protein, 220 aa, Zea mays subsp. mays
  peptide (1)..(220): Ceres Seq. ID no. 12373260
MIQRTWERVMLASSLDHVVVATDDERIAECCRGFGADVIMTSASCKNGSERCCEALKKLDKHYDIVVNIQGDEPLIEPEIIDGVVMSLQRAPDAVFSTAVTSLKPEDAFDTNRVKCVVDNLGYAIYFSRGLIPFNKSGNANPKYPYLLHLGIAGFDSKFLKIYPELPPTPLQMEEDLEQLKVLENGYRMKVIKVDHDAHGVDAPEDVEKIEALMRTRNIQ

SEQ ID NO: 5077 - protein, 211 aa, Zea mays subsp. mays
  peptide (1)..(211): Ceres Seq. ID no. 12373261
MLASSLDHVVVATDDERIAECCRGFGADVIMTSASCKNGSERCCEALKKLDKHYDIVVNIQGDEPLIEPEIIDGVVMSLQRAPDAVFSTAVTSLKPEDAFDTNRVKCVVDNLGYAIYFSRGLIPFNKSGNANPKYPYLLHLGIAGFDSKFLKIYPELPPTPLQMEEDLEQLKVLENGYRMKVIKVDHDAHGVDAPEDVEKIEALMRTRNIQ

SEQ ID NO: 5078 - DNA, 1153 bp, Zea mays subsp. mays
  misc_feature (1)..(1153): Ceres Seq. ID no. 12344416
  misc_feature (1)..(1153): Ortholog of  Ceres SEQ ID NO 14313060 as cited in SEQ ID NO 59447
  misc_feature (1)..(1153): Ortholog of  Ceres SEQ ID NO 12624676 as cited in SEQ ID NO 61197
aacctcaccaactcccctacaagccgccgggccgaacgaccgaagcatccacttccaaagtgtactgtttgctgcccgcctggcgcctgcccccataactactctgccaccaatccggggaggaatcaacctagcggtaagcggacatggcggcggcgaagatagcgccgtcgatgctctcgtcggactttgccaacctcgcttcggaggctgagcgcatggtccgcctaggcgccgactggctacatatggacatcatggatgggcacttcgttcctaacctgactattggggctccggtgatccagagcttgaggaaacataccaaagcatatttggactgccatcttatggtcacaaagccttcagattacgtagaaccatttggaaaggctggcgcttctggattcacattccatatagaagttgctagagacaactggcaagatctcatccaaagcattaaatcaaagggtatgcggcctggtgtatcattgaggccaggtactccagtggaggaagtttttcccctggtggaagcagaaaatccggtagaattggttcttgtgatgacagtcgagcctggttttggtggtcagaaatttatgccagaaatgatggataaggtgcgcacactgagaaagaagtacccttcccttgacatagaggttgatggtggtctaggtccttcaaccatagacgtggccgcatctgctggggccaattgcatcgtcgctggaagctctatatttggcgctgcggacccaggagccatcatatctgtgctgaggaagagcgtcgagggctctcagaacaaaaactgattttggtgtttctgctgtaaagtactccctccgtttttttttattcgtcgcgttttagttcaaacatgaactagcggacgactgatattcgagaatggagggagtacttcgaccctgcacgtcagatgagctgatcctcacattgcaccggaactgttcggcgagaataaaatttgatgttagaccttgaacgtcttttgcaatatgcttttttgtctgccctgattatattctaccccttcatataacgcttgatgtgccgtcaagaaatggcgaaacattggcatgactgtaaacaagaaactaaatacgggtataaaaatcgtgtc

SEQ ID NO: 5079 - protein, 225 aa, Zea mays subsp. mays
  peptide (1)..(225): Ceres Seq. ID no. 12344417
MAAAKIAPSMLSSDFANLASEAERMVRLGADWLHMDIMDGHFVPNLTIGAPVIQSLRKHTKAYLDCHLMVTKPSDYVEPFGKAGASGFTFHIEVARDNWQDLIQSIKSKGMRPGVSLRPGTPVEEVFPLVEAENPVELVLVMTVEPGFGGQKFMPEMMDKVRTLRKKYPSLDIEVDGGLGPSTIDVAASAGANCIVAGSSIFGAADPGAIISVLRKSVEGSQNKN

SEQ ID NO: 5080 - protein, 216 aa, Zea mays subsp. mays
  peptide (1)..(216): Ceres Seq. ID no. 12344418
MLSSDFANLASEAERMVRLGADWLHMDIMDGHFVPNLTIGAPVIQSLRKHTKAYLDCHLMVTKPSDYVEPFGKAGASGFTFHIEVARDNWQDLIQSIKSKGMRPGVSLRPGTPVEEVFPLVEAENPVELVLVMTVEPGFGGQKFMPEMMDKVRTLRKKYPSLDIEVDGGLGPSTIDVAASAGANCIVAGSSIFGAADPGAIISVLRKSVEGSQNKN

SEQ ID NO: 5081 - protein, 201 aa, Zea mays subsp. mays
  peptide (1)..(201): Ceres Seq. ID no. 12344419
MVRLGADWLHMDIMDGHFVPNLTIGAPVIQSLRKHTKAYLDCHLMVTKPSDYVEPFGKAGASGFTFHIEVARDNWQDLIQSIKSKGMRPGVSLRPGTPVEEVFPLVEAENPVELVLVMTVEPGFGGQKFMPEMMDKVRTLRKKYPSLDIEVDGGLGPSTIDVAASAGANCIVAGSSIFGAADPGAIISVLRKSVEGSQNKN

SEQ ID NO: 5082 - DNA, 883 bp, Zea mays subsp. mays
  misc_feature (1)..(883): Ceres Seq. ID no. 12403563
  misc_feature (1)..(883): Ortholog of  Ceres SEQ ID NO 13597542 as cited in SEQ ID NO 64986
actagttgtcgctgctgccctgttgcggcgacgactccgtgactcctagtccctacccagatcggcgcccgacgcaaggccgagcaggcgatggccgcagcggcgtcaatggggcacccttacgcgccagccgagctggaccttccgggtttcgtgccgctgaagctgtcccaggtcgagatcctcgtgtcctacctcggcgcctccgtcttcgttttcctcgccgtctggctcgtctccggaagatgtgtcagattatccaagaccgaccgtctgctcatgtgctggtgggcattcacagggttgacccacataatgatcgaggggcccttcgtcttcactcctgatttcttcaagaaggagaaccccaatttctttgatgaagtttggaaagagtatagtaagggagactctaggtatgttgctagggacactgcaactgttacggtcgaagggatcaccgctgtattggaaggccctgcatcactacttgctgtctacgctattgcatccaggaagtccttcagccacattctccagttcgccgtctgtctgggccagctctacggatgcctggtttacttcatcaccgcgtacttggacggcttcaacttctgggtcggcccgttctacttctgggcgtatttcattggcgcaaacagcttctggatctggataccgatgctcatcgccataaggtcctggaagaaaacttgcgccgcgtttcaagctgagaaggtgaagaagaccaaataaaagctgtctttagctaccgttttattggagaccgtcattttgatggcttaaattcttgtgttggttggtactggaaactgcatgatgtactctttgctcaaacaaatgaagaccggtttacaaattc

SEQ ID NO: 5083 - protein, 221 aa, Zea mays subsp. mays
  peptide (1)..(221): Ceres Seq. ID no. 12403564
MAAAASMGHPYAPAELDLPGFVPLKLSQVEILVSYLGASVFVFLAVWLVSGRCVRLSKTDRLLMCWWAFTGLTHIMIEGPFVFTPDFFKKENPNFFDEVWKEYSKGDSRYVARDTATVTVEGITAVLEGPASLLAVYAIASRKSFSHILQFAVCLGQLYGCLVYFITAYLDGFNFWVGPFYFWAYFIGANSFWIWIPMLIAIRSWKKTCAAFQAEKVKKTK

SEQ ID NO: 5084 - protein, 215 aa, Zea mays subsp. mays
  peptide (1)..(215): Ceres Seq. ID no. 12403565
MGHPYAPAELDLPGFVPLKLSQVEILVSYLGASVFVFLAVWLVSGRCVRLSKTDRLLMCWWAFTGLTHIMIEGPFVFTPDFFKKENPNFFDEVWKEYSKGDSRYVARDTATVTVEGITAVLEGPASLLAVYAIASRKSFSHILQFAVCLGQLYGCLVYFITAYLDGFNFWVGPFYFWAYFIGANSFWIWIPMLIAIRSWKKTCAAFQAEKVKKTK

SEQ ID NO: 5085 - protein, 158 aa, Zea mays subsp. mays
  peptide (1)..(158): Ceres Seq. ID no. 12403566
MCWWAFTGLTHIMIEGPFVFTPDFFKKENPNFFDEVWKEYSKGDSRYVARDTATVTVEGITAVLEGPASLLAVYAIASRKSFSHILQFAVCLGQLYGCLVYFITAYLDGFNFWVGPFYFWAYFIGANSFWIWIPMLIAIRSWKKTCAAFQAEKVKKTK

SEQ ID NO: 5086 - DNA, 2805 bp, Zea mays subsp. mays
  misc_feature (1)..(2805): Ceres Seq. ID no. 13600310
  misc_feature (1)..(2805): Ortholog of  Ceres SEQ ID NO 15180362 as cited in SEQ ID NO 0
ggaaaagatcccctgcagaggacatgagaaacggcgttgcagattccaaaacccatcagaaaacttctgtcttttctggacaaaaggttcgtgaagttttccaattaaaacgcggaacatattcagatcttactgctgccaagatttcagagatgatgcactctaatagcttagataatgcaccgacacagtcgcttattagtgttgttaatggtattttggatgaaagcatagaaaggaaaaagggagaaataccacatcgtgtagtttacttactgcggaaagtcgttcaagagattgagcaccgtctctgtattcaagcagagcacataagaagtcaaaatgttaccatcaagacaagagaacaaaagtactgttcaaaaattaaagcacttgaaatgttggtaaatggcacaaatgaagaaaaccagatggcaataaacaggcttcagatagtcaagaatgagaagtcacaaatcgaagagaaaaaagaactctgtgagaaagatgttcaacgattaatgaaagagaaagaatattccaaaagcatcataatgaacctaacaaaagatatggaagccatgaatagattgcatgagcagcaacttgagcaaattggaagaaaggcaaaggaaatggaggaacaattaaccaccagggtaaaagaagtagagtatctcttgctacaatcgaataagaaagttgaagaacttgagattgcttctaagctaaaatcacagttatgggatcagaaagagaacatttttcagagttacatggataatcaacaattagttatcaaggacataagaatattgtcacagtcatatgaaaatgatatgtatgcacttcaaatgcagtggagaaatgaaatctctaacttaggatctgggttaaaatgtttggttgatgccgctgaaaattatcataaagtcctgacagagaaccaaaagttatttaatgaagtgcaagaactaaaaggtaatataagagtatattgtcgtgttaggccatttctttccggtcaagataaaaagtccaccacaattgactacatgggggaaaatggtgagcttcttatatcaaatccatttaagcaagggaaggacggacatagaatgttcaagtttaataaagtgtttactccatttgcttcccaagctgaggttttttctgacatacaaccactgatccgatcagttctggatggattcaacgtttgtatttttgcatatggccagactggttctggcaaaacttacactatgagtgggcctaccacatcaaaacaagattggggtgtcaattatcgagctttaaatgatttgtttgatatttcactaagtaggagaaatgccttctcatatgaggtgggggtacaaatggttgagatatacaatgaacaagtccgtgatctgctatcaaatgatattgcacaaagaagacttgggatttggaacacttctcaacccaatgggcttgttgttccagatgcaagcttgcactcagttaagtcgacatctgatgtattagacttgatggagattggacaagcaaatagagcagttggttcaacagcgctaaatgaacgaagtagtcggtcacacagtattctaactgtacatgttcgagggatggatttgaagaatggatcaacctctaggggttgtttgcatcttattgatcttgctggtagtgagagggtagagaagtctgaagtaaccggcgatagattaaaagaagctcaatacattaacaaatcactctctgcgttaggtgatgttatttttgctttgtcacagaaaagtgcccatgtgccttatagaaacagcaagttaacacaagttcttcaaagttctttaggtggacaagcaaaaactctaatgtttgttcagataaatcctgatgttgagtcatattcagaaactataagtactttaaagtttgctgaaagggtgtctggagtagagttaggtgctgctagaagtaacaaggagggaaaagatataaaagagctattggaacaggttgcgtctttgaaagacacaattttgcgcaaagatatggaaatagagcagatccaggtcatcaaagacaaagtaaaatccccaaatttgttgttagatagaaatgtgcctggcttgacgaagactacagcaaaccaacctagccaactattatcaggcgaacgaatgcttaagtctagtgacagagttctatcggatcgtcagagttacggcgaggtgaatgtagatcctaaccaccatgtgatggatactgcaccagtgagcatagatgaagcaggatatgagaacaatgcatcggatgatggtttatcgggtgaaaccgagaatgataattcagctgctgagatgacagcggaacggctgcatagatttccatcaagaataagcaggttcactctcacaaagaacgggcagccatctatgtctagatcgaacccaaaggatgctaagactccaagcaatacgaaagctccatcgagccggttgacaggaggctcttcagccaggtctaaaagacggcagtagagcacgatcatgttgctcgttttgatgtgcattgtagttgaaatgtgaatttggtgggtagttgtaggaccgttttatgattgtaactttagaaaatgtcagacactgatggcagaatatttgagacatttgtttgatcatttgcttatgccgagcaaaacagcaaacaatgctcgattgtatgtgaaacactctgacctgtgaccatttgaatgtcggtgcgcctccggaagtccggagttgtgtatatacc

SEQ ID NO: 5087 - protein, 849 aa, Zea mays subsp. mays
  peptide (1)..(849): Ceres Seq. ID no. 13600311
KRSPAEDMRNGVADSKTHQKTSVFSGQKVREVFQLKRGTYSDLTAAKISEMMHSNSLDNAPTQSLISVVNGILDESIERKKGEIPHRVVYLLRKVVQEIEHRLCIQAEHIRSQNVTIKTREQKYCSKIKALEMLVNGTNEENQMAINRLQIVKNEKSQIEEKKELCEKDVQRLMKEKEYSKSIIMNLTKDMEAMNRLHEQQLEQIGRKAKEMEEQLTTRVKEVEYLLLQSNKKVEELEIASKLKSQLWDQKENIFQSYMDNQQLVIKDIRILSQSYENDMYALQMQWRNEISNLGSGLKCLVDAAENYHKVLTENQKLFNEVQELKGNIRVYCRVRPFLSGQDKKSTTIDYMGENGELLISNPFKQGKDGHRMFKFNKVFTPFASQAEVFSDIQPLIRSVLDGFNVCIFAYGQTGSGKTYTMSGPTTSKQDWGVNYRALNDLFDISLSRRNAFSYEVGVQMVEIYNEQVRDLLSNDIAQRRLGIWNTSQPNGLVVPDASLHSVKSTSDVLDLMEIGQANRAVGSTALNERSSRSHSILTVHVRGMDLKNGSTSRGCLHLIDLAGSERVEKSEVTGDRLKEAQYINKSLSALGDVIFALSQKSAHVPYRNSKLTQVLQSSLGGQAKTLMFVQINPDVESYSETISTLKFAERVSGVELGAARSNKEGKDIKELLEQVASLKDTILRKDMEIEQIQVIKDKVKSPNLLLDRNVPGLTKTTANQPSQLLSGERMLKSSDRVLSDRQSYGEVNVDPNHHVMDTAPVSIDEAGYENNASDDGLSGETENDNSAAEMTAERLHRFPSRISRFTLTKNGQPSMSRSNPKDAKTPSNTKAPSSRLTGGSSARSKRRQ

SEQ ID NO: 5088 - protein, 842 aa, Zea mays subsp. mays
  peptide (1)..(842): Ceres Seq. ID no. 13600312
MRNGVADSKTHQKTSVFSGQKVREVFQLKRGTYSDLTAAKISEMMHSNSLDNAPTQSLISVVNGILDESIERKKGEIPHRVVYLLRKVVQEIEHRLCIQAEHIRSQNVTIKTREQKYCSKIKALEMLVNGTNEENQMAINRLQIVKNEKSQIEEKKELCEKDVQRLMKEKEYSKSIIMNLTKDMEAMNRLHEQQLEQIGRKAKEMEEQLTTRVKEVEYLLLQSNKKVEELEIASKLKSQLWDQKENIFQSYMDNQQLVIKDIRILSQSYENDMYALQMQWRNEISNLGSGLKCLVDAAENYHKVLTENQKLFNEVQELKGNIRVYCRVRPFLSGQDKKSTTIDYMGENGELLISNPFKQGKDGHRMFKFNKVFTPFASQAEVFSDIQPLIRSVLDGFNVCIFAYGQTGSGKTYTMSGPTTSKQDWGVNYRALNDLFDISLSRRNAFSYEVGVQMVEIYNEQVRDLLSNDIAQRRLGIWNTSQPNGLVVPDASLHSVKSTSDVLDLMEIGQANRAVGSTALNERSSRSHSILTVHVRGMDLKNGSTSRGCLHLIDLAGSERVEKSEVTGDRLKEAQYINKSLSALGDVIFALSQKSAHVPYRNSKLTQVLQSSLGGQAKTLMFVQINPDVESYSETISTLKFAERVSGVELGAARSNKEGKDIKELLEQVASLKDTILRKDMEIEQIQVIKDKVKSPNLLLDRNVPGLTKTTANQPSQLLSGERMLKSSDRVLSDRQSYGEVNVDPNHHVMDTAPVSIDEAGYENNASDDGLSGETENDNSAAEMTAERLHRFPSRISRFTLTKNGQPSMSRSNPKDAKTPSNTKAPSSRLTGGSSARSKRRQ

SEQ ID NO: 5089 - protein, 799 aa, Zea mays subsp. mays
  peptide (1)..(799): Ceres Seq. ID no. 13600313
MMHSNSLDNAPTQSLISVVNGILDESIERKKGEIPHRVVYLLRKVVQEIEHRLCIQAEHIRSQNVTIKTREQKYCSKIKALEMLVNGTNEENQMAINRLQIVKNEKSQIEEKKELCEKDVQRLMKEKEYSKSIIMNLTKDMEAMNRLHEQQLEQIGRKAKEMEEQLTTRVKEVEYLLLQSNKKVEELEIASKLKSQLWDQKENIFQSYMDNQQLVIKDIRILSQSYENDMYALQMQWRNEISNLGSGLKCLVDAAENYHKVLTENQKLFNEVQELKGNIRVYCRVRPFLSGQDKKSTTIDYMGENGELLISNPFKQGKDGHRMFKFNKVFTPFASQAEVFSDIQPLIRSVLDGFNVCIFAYGQTGSGKTYTMSGPTTSKQDWGVNYRALNDLFDISLSRRNAFSYEVGVQMVEIYNEQVRDLLSNDIAQRRLGIWNTSQPNGLVVPDASLHSVKSTSDVLDLMEIGQANRAVGSTALNERSSRSHSILTVHVRGMDLKNGSTSRGCLHLIDLAGSERVEKSEVTGDRLKEAQYINKSLSALGDVIFALSQKSAHVPYRNSKLTQVLQSSLGGQAKTLMFVQINPDVESYSETISTLKFAERVSGVELGAARSNKEGKDIKELLEQVASLKDTILRKDMEIEQIQVIKDKVKSPNLLLDRNVPGLTKTTANQPSQLLSGERMLKSSDRVLSDRQSYGEVNVDPNHHVMDTAPVSIDEAGYENNASDDGLSGETENDNSAAEMTAERLHRFPSRISRFTLTKNGQPSMSRSNPKDAKTPSNTKAPSSRLTGGSSARSKRRQ

SEQ ID NO: 5090 - DNA, 1844 bp, Zea mays subsp. mays
  misc_feature (1)..(1844): Ceres Seq. ID no. 12409726
  misc_feature (1)..(1844): Ortholog of  Ceres SEQ ID NO 14314636 as cited in SEQ ID NO 56924
  misc_feature (1)..(1844): Ortholog of  Ceres SEQ ID NO 15168421 as cited in SEQ ID NO 60131
  misc_feature (1)..(1844): Ortholog of  Ceres SEQ ID NO 13597574 as cited in SEQ ID NO 64677
  misc_feature (1)..(1844): Ortholog of  Ceres SEQ ID NO 13597843 as cited in SEQ ID NO 64850
  misc_feature (1)..(1844): Ortholog of  Ceres SEQ ID NO 13597678 as cited in SEQ ID NO 65375
  misc_feature (1)..(1844): Ortholog of  Ceres SEQ ID NO 15176787 as cited in SEQ ID NO 66468
  misc_feature (1)..(1844): Ortholog of  Ceres SEQ ID NO 13596180 as cited in SEQ ID NO 67941
  misc_feature (1)..(1844): Ortholog of  Ceres SEQ ID NO 13591190 as cited in SEQ ID NO 68044
  misc_feature (1)..(1844): Ortholog of  Ceres SEQ ID NO 13595961 as cited in SEQ ID NO 68223
atgtgcgggagccttatggtcatctgcctcctctaaaatatctgtcttgcaaacgaaaatagatggacggcagtccgtaggccactccacctccacgatacaccacggcaccactcaacctgtcaggtagacttctctctcccgcggaagctcttacctccggctccgcaagcaagacttcatggagaagacggtcgttctgtaccccggcctatccgtcagccatttcgtcccgatgatgcagctcgccgacatgttcctagaggagggttacgctgttgcggtcgcgctcatcgacctcaccttggaccaagacgccgccttggcagacgccgtcgaccgcgtcgcctccgccaagccgtccgtcgccttccacaggctccttcggatccagaatcctcccactgtcacagacgacgggggagccgttcctctggtacttccagatactgaaacgctacaacgaccgcctccgtgagttcctctgctccctgcctccccgaagcgtccacgcggtgatcgtggacgcgctttccgtcgacgcgctcgacgtcaccaaggagcttgggctcccggcctacaccttctgcgccgccaacgcctccgcgctcgccgtgttcctccagcttccttggatccgcgcggaaggccaaccaagcttcaaggagctcggagacgcccccgtcaacttctccggcgtgcctcccattccggcgtcacacctcgtgcgccagatgctggacccggagagcgagatatacaccgcgatgatgaacgcgatgcgaaggggagcggaggaccccgacggcatcttggtgaacacgttcgcgtcgctggaagctcgggcggtgggagctctccgggacccacagctggttcctcctagcagcggcagagcacgcaggacgcctccggtgtactgcgtcgggccactggtcgccggtgccggcgcagaggcaaaagagaagcacgaatgcctggcgtggctcgacgggcaaccagagcgcagcgtggtgttgctctgcttcgggagcataggcgcggccacccactcggaagagcagctcagggaggttgccgtcggcctgcagagatccggccaccgtttcctgtgggtggtgcgagccccgctgcgcggtgacaccgagaggctgttcgatccccgtgcggacaccgacctcgacgcccttctgccggacgggttcctcgaggccacaagagaccgcggcctggtcgtcaagcactgggcgccgcaggtggaagtgctcaaccatagggcgacaggcgttcgtgacgcactgtgggtggaactcggtgctggaaggtatcacggctggcgtgccgatgctttgctggccgatgtacgcggagcagaaaatgaacaagctgttcatggtggaggaagccatggtcggcgtggaaatggttggatggcagcaggggctggtcagtgctgaggaggtggaggccaaggtaaggttggtgttggaggagtccgaggaaggcaaccagctcaggacgcgggtggccgcgcataggaatgccgcgaccatggcccggaggggcggcggctcatcgcgcgctgcgtttggccagttcttgtcggacgccgccaaactcgcacgggagtagacgcgtacgcgctggatgcattgccgattgctgaatttcaccatcatcggttgtgattcgatgttgagaattgagatgaaactgcgatgcttgcatgtactctgtggtaacttttatttctatatctgtgagtgctcggcgttgcaacaggaccactatattacaacctttaatatcatacagacttctatatatgatagtacaatacttgc

SEQ ID NO: 5091 - protein, 240 aa, Zea mays subsp. mays
  peptide (1)..(240): Ceres Seq. ID no. 12409727
MLDPESEIYTAMMNAMRRGAEDPDGILVNTFASLEARAVGALRDPQLVPPSSGRARRTPPVYCVGPLVAGAGAEAKEKHECLAWLDGQPERSVVLLCFGSIGAATHSEEQLREVAVGLQRSGHRFLWVVRAPLRGDTERLFDPRADTDLDALLPDGFLEATRDRGLVVKHWAPQVEVLNHRATGVRDALWVELGAGRYHGWRADALLADVRGAENEQAVHGGGSHGRRGNGWMAAGAGQC

SEQ ID NO: 5092 - protein, 229 aa, Zea mays subsp. mays
  peptide (1)..(229): Ceres Seq. ID no. 12409728
MMNAMRRGAEDPDGILVNTFASLEARAVGALRDPQLVPPSSGRARRTPPVYCVGPLVAGAGAEAKEKHECLAWLDGQPERSVVLLCFGSIGAATHSEEQLREVAVGLQRSGHRFLWVVRAPLRGDTERLFDPRADTDLDALLPDGFLEATRDRGLVVKHWAPQVEVLNHRATGVRDALWVELGAGRYHGWRADALLADVRGAENEQAVHGGGSHGRRGNGWMAAGAGQC

SEQ ID NO: 5093 - protein, 228 aa, Zea mays subsp. mays
  peptide (1)..(228): Ceres Seq. ID no. 12409729
MNAMRRGAEDPDGILVNTFASLEARAVGALRDPQLVPPSSGRARRTPPVYCVGPLVAGAGAEAKEKHECLAWLDGQPERSVVLLCFGSIGAATHSEEQLREVAVGLQRSGHRFLWVVRAPLRGDTERLFDPRADTDLDALLPDGFLEATRDRGLVVKHWAPQVEVLNHRATGVRDALWVELGAGRYHGWRADALLADVRGAENEQAVHGGGSHGRRGNGWMAAGAGQC

SEQ ID NO: 5094 - DNA, 1277 bp, Zea mays subsp. mays
  misc_feature (1)..(1277): Ceres Seq. ID no. 12406953
  misc_feature (1)..(1277): Ortholog of  Ceres SEQ ID NO 13598579 as cited in SEQ ID NO 65523
agagccggccggtcgtcgtcgatccacatcaccattactccatctcctgataccgatcgagagctcctccctcgctccgggctgagtcgccggccggacggactcctccgatccgtgcggcgtcaggccggcccgccagctgggacatcccgtttgattcatcagccgtagtaggagccatggtcgaagctatttgatctatctctgagctgagctgggccggtaatttgatgatgcttgccggtgtgatcatgagtggatgataagagatgataagcggcaacctcaccaatgaagacctgggggccgggcgcaccaaggccgaggggccgacgaccgcggccggggccgtcgtcgcaaagagtcccgtgctgccgagctcccggcactggccgccgtcgacggagtccaggatcgtgcgcgtgtcgcgggtcttcggcggcaaggaccggcacagcaaggtgaggacggtcaaggggctgcgcgaccggcgcgtgcggctgtccgtgccgacggcgatacagctctacgacctccaggaccggctgggcctcagccagccgagcaaggtggtggactggctgctcgacgccgcgcagcacgagatcgacaagctgcctccgcttcagttcccaccgcaagcggcgcaggacctcgtcgcccatctgccgccgccatccatggtggcgcccttcgcagccgaccgagccgacggcgacaaacgccactgccacggcggcgtcaaagggctcatgggcctcaacaattccatccgcctcgtcaacgccaccatgccgctggctcacggcttgtactacacgcccgctcgtcttctactcgccggaaggcggcggattcaccatgaaagaagaagccaccggttatcagttcccagtacaaaatagcctcgaccactcgcaaggccagctctcactgagctcagctagaagcttccttcgccccggcaaccagggatgattaggtcactgatctctactgctccaagaaggtacgtagaagaataaagcttggtgtagtagtaatcaagtactcatttgaaggttccgtaacggttgtaactgcagttttgagatgctattgtttggtatgatcgagtagagggtctctagcatgcataattgaggttatttttgcaggacatgcaatgcaattcgttgcttcttttttatacaaggaagcaacgacaggtcatatgggtgtgtgtttttgtttgtattgtaataacaattttaataatccattcttgattttgtgtt

SEQ ID NO: 5095 - protein, 211 aa, Zea mays subsp. mays
  peptide (1)..(211): Ceres Seq. ID no. 12406954
MISGNLTNEDLGAGRTKAEGPTTAAGAVVAKSPVLPSSRHWPPSTESRIVRVSRVFGGKDRHSKVRTVKGLRDRRVRLSVPTAIQLYDLQDRLGLSQPSKVVDWLLDAAQHEIDKLPPLQFPPQAAQDLVAHLPPPSMVAPFAADRADGDKRHCHGGVKGLMGLNNSIRLVNATMPLAHGLYYTPARLLLAGRRRIHHERRSHRLSVPSTK

SEQ ID NO: 5096 - DNA, 1492 bp, Zea mays subsp. mays
  misc_feature (1)..(1492): Ceres Seq. ID no. 13498770
  misc_feature (1)..(1492): Ortholog of  Ceres SEQ ID NO 13581804 as cited in SEQ ID NO 51424
  misc_feature (1)..(1492): Ortholog of  Ceres SEQ ID NO 14306627 as cited in SEQ ID NO 53023
  misc_feature (1)..(1492): Ortholog of  Ceres SEQ ID NO 15174917 as cited in SEQ ID NO 53650
  misc_feature (1)..(1492): Ortholog of  Ceres SEQ ID NO 14304034 as cited in SEQ ID NO 53878
  misc_feature (1)..(1492): Ortholog of  Ceres SEQ ID NO 14307559 as cited in SEQ ID NO 54006
  misc_feature (1)..(1492): Ortholog of  Ceres SEQ ID NO 13663874 as cited in SEQ ID NO 67003
  misc_feature (1)..(1492): Ortholog of  Ceres SEQ ID NO 13624654 as cited in SEQ ID NO 0
aaaacctaggaggagcctagtggccacctagggtgaggaaaactgaggacgcgaggcgagagcgagatccaatctgcacccccccaccaaagaaagattcttccccgccggcctcgctctctcaacatccgtctcgctccttccaccctcgctgcgcctcaggcagcgagcgagcatatagcagcccaccacccacatgccgcagggccctcacccgtcgagccaattgagtggcagccagaaaaacccagagcgcgagcagcgagcgcgagcgactcggcagcgagcgcgggctcctgtgtgcagtgtgtctgcgctagagggcgaagggcacggaccgccttcgtcaataattgcggtacgaacggggcaaatccgtcgtttaaagaggtcgctgatagcgcctgctggtggcgagagagaaagcagcagaatcgctgagggatcgtcgatccggagaggcaaaaaagccgagagatcaggcagggcaccatggggcgcgggaaggtggtgctgcagcggatcgagaacaagatcagccggcaggtgaccttcgccaagcgccggaacggcctgctcaagaaggcgtacgagctctccgtcctctgcgacgccgaggtcgcgctcgtcctcttctcccacgccggccgcctctaccagttctcatcctcctccaatctgcttaagactctagagcggtaccagaggtacatctatgcttcagccgatgctgcagtgccatctagcgatcagatgcagaataactatcaagaatatgtgaagctgaaggcacgagttgaggttttacagcactcacaaaggaatcttcttggtgaagatctggccctacttagcccaagtgaacttgaccagcttgagaatcaagtagacaagaccttgaagcaaataagatcaagaaagactcaagtgttacttgatgaactttgtgacttaaagagaaaggaacaaatgctgcaagatgcaaacagggttctgaaaaggaagctgggcgagtttgaggcagaggcggcttctcccccgcagttagcgtggcaaggcgaaggcggcatgttgtcccatgaccctccacagccagaacacttcttccaggctctggagagcaacccatgtctgcaacctacataccatacgatggacatgaaccagcagccagtgccagcgccgggcggctgctatcctgcatggatgtcttagccagtgcttcattccattgccttgagaagtgtcctgaccttcacagatccctacgagctttattactgcttttgcctgcccctttgctgcttgcggtgcttactgaactgtccaaatgaccacatggtcatatataggttattgctgtctttatcttatgttgatcacggcctgctcagctgctttagcgccatgcaaaatggcttgggcgatgcacgcttgaatgggtcgaactgcttatgttttgggagtataaatcacttagcaataagcattg

SEQ ID NO: 5097 - protein, 240 aa, Zea mays subsp. mays
  peptide (1)..(240): Ceres Seq. ID no. 13498771
MGRGKVVLQRIENKISRQVTFAKRRNGLLKKAYELSVLCDAEVALVLFSHAGRLYQFSSSSNLLKTLERYQRYIYASADAAVPSSDQMQNNYQEYVKLKARVEVLQHSQRNLLGEDLALLSPSELDQLENQVDKTLKQIRSRKTQVLLDELCDLKRKEQMLQDANRVLKRKLGEFEAEAASPPQLAWQGEGGMLSHDPPQPEHFFQALESNPCLQPTYHTMDMNQQPVPAPGGCYPAWMS

SEQ ID NO: 5098 - protein, 153 aa, Zea mays subsp. mays
  peptide (1)..(153): Ceres Seq. ID no. 13498772
MQNNYQEYVKLKARVEVLQHSQRNLLGEDLALLSPSELDQLENQVDKTLKQIRSRKTQVLLDELCDLKRKEQMLQDANRVLKRKLGEFEAEAASPPQLAWQGEGGMLSHDPPQPEHFFQALESNPCLQPTYHTMDMNQQPVPAPGGCYPAWMS

SEQ ID NO: 5099 - DNA, 1352 bp, Zea mays subsp. mays
  misc_feature (1)..(1352): Ceres Seq. ID no. 12409718
  misc_feature (1)..(1352): Ortholog of  Ceres SEQ ID NO 15227018 as cited in SEQ ID NO 0
accagtcccctttacatccacacacaacgcgcaccacaccacaccacaccacccgacgccaacgtccgagaccaaactccgatccccactatgccggcggacggggaggcgctggcgccggccgtccacttctggggcgagcacccggccacggaggcggagttctactcggcgcacggcacggagggcgagccctccttacttcaccacgcccgacgcgggcgcccggcggctcttcacgcgcgcgtggaggccccgcgcgcccgancggcccagggcgctcgtgttcatggtccacggctacggcaatgacatcagctggacgttccagtccacggcggtcttcctcgcgcggtccgggttcgcctgcttcgcggccgacctcccgggccacggccgctcccacggcctccgggccttcgtgcccgacctcgacgccgccgtcgctgacctcctcgccttcttccgcgccgtcagggcgagggaggagcacgctggcctgccctgcttcctgttcggggagtccatgggcggggccatctgcctgctcatccacctccgcacacggccggaggagtgggcgggggcggtcctcgtcgctcccatgtgcaggatctccgaccggatccgcccgccgtggccgctgccggagattctcaccttcgtcgcgcgcttcagcgcccacggcggccatcgtgcccaccgccgacctcatcgagaagtccgtcaaggtgcccgccaagcgcatcgttgcagcgcgcaaccctgtgcgctacaacggccgtcccaggctcggcaccgtcgtcgagctgttgcgtgccaccgacgagctggccaagcgcctcggcgaagtcagcatcccgttccttgtcgtgcacggcagcaccgacgaggttaccgacccggaagtcagccgcgccctgtacgccgccgccgccagcaaggataagactatcaagatatacgacgggatgctccactccttgctatttggggaaccggacgagaacatcgagcgtgtccgtggggacatcctggcctggctcaacgagagatgcacagcccaggcaactcaccgtaacatacctgtcgaataagcattcggatgcatggatacacaagaaaaatatttcatgtacaacgattgttatatatgctatactcagtatttgactgtaaactgtttggtcaggtttagtggcttggatatacaaaatgttggttgcctgatcagtgtaaaagaatgctgcaaatgcttgtgatcgataatatcagctctcttcgggggctatggatggcaatacaaggcgttctctgccctgtacaagcttggcagaacgaattttatctcc

SEQ ID NO: 5100 - protein, 364 aa, Zea mays subsp. mays
  peptide (1)..(364): Ceres Seq. ID no. 12409719
  misc_feature (89)..(89): Xaa is any aa, unknown or other
QSPLHPHTTRTTPHHTTRRQRPRPNSDPHYAGGRGGAGAGRPLLGRAPGHGGGVLLGARHGGRALLTSPRPTRAPGGSSRARGGPARPXGPGRSCSWSTATAMTSAGRSSPRRSSSRGPGSPASRPTSRATAAPTASGPSCPTSTPPSLTSSPSSAPSGRGRSTLACPASCSGSPWAGPSACSSTSAHGRRSGRGRSSSLPCAGSPTGSARRGRCRRFSPSSRASAPTAAIVPTADLIEKSVKVPAKRIVAARNPVRYNGRPRLGTVVELLRATDELAKRLGEVSIPFLVVHGSTDEVTDPEVSRALYAAAASKDKTIKIYDGMLHSLLFGEPDENIERVRGDILAWLNERCTAQATHRNIPVE

SEQ ID NO: 5101 - protein, 315 aa, Zea mays subsp. mays
  peptide (1)..(315): Ceres Seq. ID no. 12409720
  misc_feature (89)..(89): Xaa is any aa, unknown or other
PVPFTSTHNAHHTTPHHPTPTSETKLRSPLCRRTGRRWRRPSTSGASTRPRRRSSTRRTARRASPPYFTTPDAGARRLFTRAWRPRAPXRPRALVFMVHGYGNDISWTFQSTAVFLARSGFACFAADLPGHGRSHGLRAFVPDLDAAVADLLAFFRAVRAREEHAGLPCFLFGESMGGAICLLIHLRTRPEEWAGAVLVAPMCRISDRIRPPWPLPEILTFVARFSAHGGHRAHRRPHREVRQGARQAHRCSAQPCALQRPSQARHRRRAVACHRRAGQAPRRSQHPVPCRARQHRRGYRPGSQPRPVRRRRQQG

SEQ ID NO: 5102 - protein, 262 aa, Zea mays subsp. mays
  peptide (1)..(262): Ceres Seq. ID no. 12409721
MTSAGRSSPRRSSSRGPGSPASRPTSRATAAPTASGPSCPTSTPPSLTSSPSSAPSGRGRSTLACPASCSGSPWAGPSACSSTSAHGRRSGRGRSSSLPCAGSPTGSARRGRCRRFSPSSRASAPTAAIVPTADLIEKSVKVPAKRIVAARNPVRYNGRPRLGTVVELLRATDELAKRLGEVSIPFLVVHGSTDEVTDPEVSRALYAAAASKDKTIKIYDGMLHSLLFGEPDENIERVRGDILAWLNERCTAQATHRNIPVE

SEQ ID NO: 5103 - protein, 219 aa, Zea mays subsp. mays
  peptide (1)..(219): Ceres Seq. ID no. 12409722
MVHGYGNDISWTFQSTAVFLARSGFACFAADLPGHGRSHGLRAFVPDLDAAVADLLAFFRAVRAREEHAGLPCFLFGESMGGAICLLIHLRTRPEEWAGAVLVAPMCRISDRIRPPWPLPEILTFVARFSAHGGHRAHRRPHREVRQGARQAHRCSAQPCALQRPSQARHRRRAVACHRRAGQAPRRSQHPVPCRARQHRRGYRPGSQPRPVRRRRQQG

SEQ ID NO: 5104 - DNA, 1270 bp, Zea mays subsp. mays
  misc_feature (1)..(1270): Ceres Seq. ID no. 12369175
  misc_feature (1)..(1270): Ortholog of  Ceres SEQ ID NO 13595509 as cited in SEQ ID NO 59833
agagcggcgctgccagcaaggcggctagtatgagcagcatggagtcgcggccgggccgaacgaacctggtggagcccatagggcacggcgccgcgctgccgtccggcggccaggcagtgcagccgtggtggacgagctccggggctgtgctcggtgcagtctcgccagccgtcgtggcggtggcgcccgggagcgggacggggattagcctgtcgagcagcccggcaggtggtagtggtggtggcggcgcggctaaaggagccgcgagtgacgagagcagcgaggattcacggagatctggggaaccaaaagatggaagcgctagtcaagaaaagaaccatgccacatcgcagatacccgctctggcgccagagtatttggcaccatactcgcagctggaactgaaccaatcaattgcttctgcagcatatcagtacccagatccttactatgcaggcatggttgctccctatggaagtcatgctgtggctcattttcagctacctggactaactcaatctcgaatgccattacctcttgaagtatccgaggagcctgtttatgtaaatgccaagcagtaccatggtatcttaagacgacggcagtcccgtgctaaggctgaacttgagaaaaaggtggtcaaagccagaaagccataccttcacgagtctcgtcatcagcacgcgatgaggagggcaagaggaaacgggggacgcttcctgaacacaaagaaaagtgacagtggtgctcccaatggaggcgaaaacgccgagcatctccatgtccctcccgacttactacagctacgacagaacgaggcttgaagtagcggtatggctctggcatccttgaacagcagttcctgtccacgggcgtaggcattcgagaccggattcatatagctctccacagcatacgcgcagccatctctgcggtaacgcacgttctcctgaacgagctttgtagcgagataggtatgcaagtgcaatctgggcgcaggaatccatcatcaagtgcccaatgcccatggggtaggtacgctgtttcaggcaattcattcttggctttcacgttccacccttgtgtaactggtgtgttgtaaatgtgtggaaaactaagcttgtgctctgtatcgggccgttcagcggaactgcaaaacgcctgtataattaagatcgaactttggattaactcggtaatgctttgtctggttttcttttagcttttcaactgtaacacggccacagctgattcatgtgatgtgcttgct

SEQ ID NO: 5105 - protein, 273 aa, Zea mays subsp. mays
  peptide (1)..(273): Ceres Seq. ID no. 12369176
SGAASKAASMSSMESRPGRTNLVEPIGHGAALPSGGQAVQPWWTSSGAVLGAVSPAVVAVAPGSGTGISLSSSPAGGSGGGGAAKGAASDESSEDSRRSGEPKDGSASQEKNHATSQIPALAPEYLAPYSQLELNQSIASAAYQYPDPYYAGMVAPYGSHAVAHFQLPGLTQSRMPLPLEVSEEPVYVNAKQYHGILRRRQSRAKAELEKKVVKARKPYLHESRHQHAMRRARGNGGRFLNTKKSDSGAPNGGENAEHLHVPPDLLQLRQNEA

SEQ ID NO: 5106 - protein, 264 aa, Zea mays subsp. mays
  peptide (1)..(264): Ceres Seq. ID no. 12369177
MSSMESRPGRTNLVEPIGHGAALPSGGQAVQPWWTSSGAVLGAVSPAVVAVAPGSGTGISLSSSPAGGSGGGGAAKGAASDESSEDSRRSGEPKDGSASQEKNHATSQIPALAPEYLAPYSQLELNQSIASAAYQYPDPYYAGMVAPYGSHAVAHFQLPGLTQSRMPLPLEVSEEPVYVNAKQYHGILRRRQSRAKAELEKKVVKARKPYLHESRHQHAMRRARGNGGRFLNTKKSDSGAPNGGENAEHLHVPPDLLQLRQNEA

SEQ ID NO: 5107 - protein, 261 aa, Zea mays subsp. mays
  peptide (1)..(261): Ceres Seq. ID no. 12369178
MESRPGRTNLVEPIGHGAALPSGGQAVQPWWTSSGAVLGAVSPAVVAVAPGSGTGISLSSSPAGGSGGGGAAKGAASDESSEDSRRSGEPKDGSASQEKNHATSQIPALAPEYLAPYSQLELNQSIASAAYQYPDPYYAGMVAPYGSHAVAHFQLPGLTQSRMPLPLEVSEEPVYVNAKQYHGILRRRQSRAKAELEKKVVKARKPYLHESRHQHAMRRARGNGGRFLNTKKSDSGAPNGGENAEHLHVPPDLLQLRQNEA

SEQ ID NO: 5108 - DNA, 1249 bp, Zea mays subsp. mays
  misc_feature (1)..(1249): Ceres Seq. ID no. 12373684
  misc_feature (1)..(1249): Ortholog of  Ceres SEQ ID NO 15179499 as cited in SEQ ID NO 0
accggaaaaaaaacattcgcggtggcttctttcttcttccccaatccaactccaaactctccatccagtgggaaaaaaaaacaaaaagggtaccggaagcggcgaaagcctcgcctcccgccgctctcgcatcgtctccagagcgcacgtcagatcaggtgcgccgcgcccccctcgcctaagctgcgacgaccatccatcgaacaggaaggatgacgggctccatggatctcccggccaagggcgggttcagcttcgacctgtgtcgccggaacaacatgctggagaagaacggactcaaggtcccgggattcaggaagaccgggacaaccatcgtcggcctcgtctttcaggatggggttgttcttggggcagacacaagggcaactgagggccccatagttgctgataagaactgtgagaaaatccactttatggcaccgaatatatactgctgtggagcaggaactgctgcggacacggaggccgttacagatatggtgagctcccagctacagcttcaccgttatgcaacgggccgcgaatcaagagttgtaactgctcttacactactgaagtcacacctcttcaagtatcaaggccatgtcagtgctgcccttgttcttggtggagtggattgtactgggccacatttacacactgtttatccacacgggtccactgatactcttccttttgccaccatgggctctggttctcttgctgcaatgtcagtgtttgaatcgaagtacaaagaaggccttactagggaggagggaatacagattgtgtgcgaagcaatctgtgctggtattttcaatgacttgggtagtgggagcaacgtggacgtctgcgtgataaccaaggggaagacagaatacttgagaaaccaccagttgccgaatcccaggacttatgctagttcaaagggatacagtttcacaaaggggcagactgaggtactgtcttcaaaggtcacacttctaaagcagaaggttgaggtcgccgagggtggtgatgctatggaggagtgatcttgcatgcctgcattcatacaagcatattctgaatctgtgtaacttttcttagtggagcagctagaacaagaaaaaaaaaaatttggagatctttgctgtactcgctggaccgaagccagggctcttatgctaaatgtgtttctaatgtttggcacattttaaattgcttgttgtttctgaatgtttaaaaccggtgaagggtatttgcttgt

SEQ ID NO: 5109 - protein, 273 aa, Zea mays subsp. mays
  peptide (1)..(273): Ceres Seq. ID no. 12373685
MTGSMDLPAKGGFSFDLCRRNNMLEKNGLKVPGFRKTGTTIVGLVFQDGVVLGADTRATEGPIVADKNCEKIHFMAPNIYCCGAGTAADTEAVTDMVSSQLQLHRYATGRESRVVTALTLLKSHLFKYQGHVSAALVLGGVDCTGPHLHTVYPHGSTDTLPFATMGSGSLAAMSVFESKYKEGLTREEGIQIVCEAICAGIFNDLGSGSNVDVCVITKGKTEYLRNHQLPNPRTYASSKGYSFTKGQTEVLSSKVTLLKQKVEVAEGGDAMEE

SEQ ID NO: 5110 - protein, 269 aa, Zea mays subsp. mays
  peptide (1)..(269): Ceres Seq. ID no. 12373686
MDLPAKGGFSFDLCRRNNMLEKNGLKVPGFRKTGTTIVGLVFQDGVVLGADTRATEGPIVADKNCEKIHFMAPNIYCCGAGTAADTEAVTDMVSSQLQLHRYATGRESRVVTALTLLKSHLFKYQGHVSAALVLGGVDCTGPHLHTVYPHGSTDTLPFATMGSGSLAAMSVFESKYKEGLTREEGIQIVCEAICAGIFNDLGSGSNVDVCVITKGKTEYLRNHQLPNPRTYASSKGYSFTKGQTEVLSSKVTLLKQKVEVAEGGDAMEE

SEQ ID NO: 5111 - protein, 251 aa, Zea mays subsp. mays
  peptide (1)..(251): Ceres Seq. ID no. 12373687
MLEKNGLKVPGFRKTGTTIVGLVFQDGVVLGADTRATEGPIVADKNCEKIHFMAPNIYCCGAGTAADTEAVTDMVSSQLQLHRYATGRESRVVTALTLLKSHLFKYQGHVSAALVLGGVDCTGPHLHTVYPHGSTDTLPFATMGSGSLAAMSVFESKYKEGLTREEGIQIVCEAICAGIFNDLGSGSNVDVCVITKGKTEYLRNHQLPNPRTYASSKGYSFTKGQTEVLSSKVTLLKQKVEVAEGGDAMEE

SEQ ID NO: 5112 - DNA, 1471 bp, Zea mays subsp. mays
  misc_feature (1)..(1471): Ceres Seq. ID no. 12349040
  misc_feature (1)..(1471): Ortholog of  Ceres SEQ ID NO 14312844 as cited in SEQ ID NO 55601
  misc_feature (1)..(1471): Ortholog of  Ceres SEQ ID NO 14312866 as cited in SEQ ID NO 55630
  misc_feature (1)..(1471): Ortholog of  Ceres SEQ ID NO 13597376 as cited in SEQ ID NO 64002
  misc_feature (1)..(1471): Ortholog of  Ceres SEQ ID NO 13503573 as cited in SEQ ID NO 65402
  misc_feature (1)..(1471): Ortholog of  Ceres SEQ ID NO 13659615 as cited in SEQ ID NO 67248
acgcctcctcccctaccattcgcagttttggacacttggttgtcgtttcgtcccgcagatccgcaagcaccggggccagtagagagagagagagagaggagggagggtcgcggcctcgcggggggtggaggagatgtctgtggcgaaggaggcggggccgagcagcagggcggtgcttgtgacgggcggggcgggatacatcggcagccacgccgtgctgcagctgctcaccgcgggcttccgggtcgtcgtcgtcgacagcctcgccaactcctccgagctcgtgatccgccgcctgcgctcgctcgcggtggaacacgccaaaaacctcgcgttccacaaggttgatatccgtgacaaagatggattggaaaaggtttttgcttcaacaagatttgatgctgttattcattttgctggactgaaagctgttggagaaagtgtacaaaagcctttgctttattatgaccataatgttgttggcacaataaatcttctggaagtaatggcagctcatggatgtaagaagttagtgttctcatcatcagctgcagtttatgggtcacctaagaactcaccctgcactgaagattttcctctcactccacataacccatatggcagaaccaaacttatggcagaggagatatgccgtgatatctaccattcagatcctgaatggaatatcattttgcttaggtactttaatccagttggggctcaccccagtggataccttggtgaagacccatgtggaactcctaacaaccttatgcccttcgttcagcaaattgcagttggcaggaggccatcgctaacaatatttggaaataactacgcaacaaaggatgggacaggggttcgtgattatattcatgtggttgaccttgctgaaggacatcttttcgcattaaagaagctttttgaaagctcatctaacataggatgtgaagcatacaaccttggaaccggaaaaggaacatcagtgttggagatagtcaatgcatttgagaaggcttctggaaagaaaatccctttgatcatgggccaacggcgtcctggtgatgctgagattctcttttcatcgccggcaaaagcagagagagagctccactggaaagcgaaatatggcatcacagaaatgtgcggagacctgtggaactgggctagcaagagcccttatggatacgcggcatctgagtctccgaagctgaatggtagttcacgctgagcaacgccgattggcccgtgtggactcacttgtacatgagactgtagtgccagccaaccaggataaatgtagatctagtcggtcggtcatacagagagaagttctataggcctaggaaagaaatgttatcctgttcctcagcataagctcccatagtggttcttccatatgcgtatagtctatgaaatttgttctaggaccattgctatagtcaaccagctaattcaattctatttcttg

SEQ ID NO: 5113 - protein, 365 aa, Zea mays subsp. mays
  peptide (1)..(365): Ceres Seq. ID no. 12349041
MSVAKEAGPSSRAVLVTGGAGYIGSHAVLQLLTAGFRVVVVDSLANSSELVIRRLRSLAVEHAKNLAFHKVDIRDKDGLEKVFASTRFDAVIHFAGLKAVGESVQKPLLYYDHNVVGTINLLEVMAAHGCKKLVFSSSAAVYGSPKNSPCTEDFPLTPHNPYGRTKLMAEEICRDIYHSDPEWNIILLRYFNPVGAHPSGYLGEDPCGTPNNLMPFVQQIAVGRRPSLTIFGNNYATKDGTGVRDYIHVVDLAEGHLFALKKLFESSSNIGCEAYNLGTGKGTSVLEIVNAFEKASGKKIPLIMGQRRPGDAEILFSSPAKAERELHWKAKYGITEMCGDLWNWASKSPYGYAASESPKLNGSSR

SEQ ID NO: 5114 - protein, 241 aa, Zea mays subsp. mays
  peptide (1)..(241): Ceres Seq. ID no. 12349042
MAAHGCKKLVFSSSAAVYGSPKNSPCTEDFPLTPHNPYGRTKLMAEEICRDIYHSDPEWNIILLRYFNPVGAHPSGYLGEDPCGTPNNLMPFVQQIAVGRRPSLTIFGNNYATKDGTGVRDYIHVVDLAEGHLFALKKLFESSSNIGCEAYNLGTGKGTSVLEIVNAFEKASGKKIPLIMGQRRPGDAEILFSSPAKAERELHWKAKYGITEMCGDLWNWASKSPYGYAASESPKLNGSSR

SEQ ID NO: 5115 - protein, 198 aa, Zea mays subsp. mays
  peptide (1)..(198): Ceres Seq. ID no. 12349043
MAEEICRDIYHSDPEWNIILLRYFNPVGAHPSGYLGEDPCGTPNNLMPFVQQIAVGRRPSLTIFGNNYATKDGTGVRDYIHVVDLAEGHLFALKKLFESSSNIGCEAYNLGTGKGTSVLEIVNAFEKASGKKIPLIMGQRRPGDAEILFSSPAKAERELHWKAKYGITEMCGDLWNWASKSPYGYAASESPKLNGSSR

SEQ ID NO: 5116 - DNA, 1163 bp, Zea mays subsp. mays
  misc_feature (1)..(1163): Ceres Seq. ID no. 12344724
  misc_feature (1)..(1163): Ortholog of  Ceres SEQ ID NO 14301765 as cited in SEQ ID NO 61955
  misc_feature (1)..(1163): Ortholog of  Ceres SEQ ID NO 12620986 as cited in SEQ ID NO 66720
agtgtggaggggaggcagggtagcccccgcggcgccgctccgctcgaaatccccaaaaaggcaagatcaaatcaaatcagatctctccacccccagcccatccatggcgatcgtgtacgccctggtcgcgcggggcacggtggtgctggccgagttcgccgccgtctcgggcaacgccggcgccgtggcccgtcggatcctcgagaagctgccgcccgacgccgagtccaggctgtgcttcgcgcaggaccggtacatcttccacgtcctccgatccgacgccgccggcatcaccttcctctgtatggccaacgacaccttcggaacaaggatcccctttctctacctggaggacatccaaatgaggttcatgaaaaactacggcagagtcgcccactctgcgctggcttacgccatgaacgatgagttctccagagtgctccatcagcaaatggagttcttctccagcaacccaagcgccgacacactcaaccgtctccgtggagaagtcagcgagatacacaccgtcatggtcgacaacatagagaaaattcttgacagaggcgatcgcatctcgctccttgtcgacaagacatccaccatgcaagacagcgcctttcacttccgcaagcaatccaagaggctccgtagagctctttggatgaagaatgccaagcttctagttgtgttgacagttgtcatagtagtgctgctctacttgatcatttctgctttctgtggaggcctttccttgtcatcatgcagatcatgagtaacacaccagatggctttgcccctcccttaaatggagggtagaacaccatggaatgatgcctgctgtgttgagcaccggagcttccggaggcaaaaaaaaaaaggagatcgatggataccactgtggtttccagtaactgggatcagattgtacagtggacgagtggagttggccgttgctgtttttgatgtcgccatggttgtgggtgaactcaattcttaaatcgtggtgtgcttagcatctttcttgccttgtcaaactgtcgttgtgacttgtgagggatgggactagtgagttgggttttgtagagttacatgggttatcaatgtgcagacatatatgtatgccgcgatgagtgttagtacatgcctactatggttatcggtgt

SEQ ID NO: 5117 - protein, 256 aa, Zea mays subsp. mays
  peptide (1)..(256): Ceres Seq. ID no. 12344725
VWRGGRVAPAAPLRSKSPKRQDQIKSDLSTPSPSMAIVYALVARGTVVLAEFAAVSGNAGAVARRILEKLPPDAESRLCFAQDRYIFHVLRSDAAGITFLCMANDTFGTRIPFLYLEDIQMRFMKNYGRVAHSALAYAMNDEFSRVLHQQMEFFSSNPSADTLNRLRGEVSEIHTVMVDNIEKILDRGDRISLLVDKTSTMQDSAFHFRKQSKRLRRALWMKNAKLLVVLTVVIVVLLYLIISAFCGGLSLSSCRS

SEQ ID NO: 5118 - protein, 222 aa, Zea mays subsp. mays
  peptide (1)..(222): Ceres Seq. ID no. 12344726
MAIVYALVARGTVVLAEFAAVSGNAGAVARRILEKLPPDAESRLCFAQDRYIFHVLRSDAAGITFLCMANDTFGTRIPFLYLEDIQMRFMKNYGRVAHSALAYAMNDEFSRVLHQQMEFFSSNPSADTLNRLRGEVSEIHTVMVDNIEKILDRGDRISLLVDKTSTMQDSAFHFRKQSKRLRRALWMKNAKLLVVLTVVIVVLLYLIISAFCGGLSLSSCRS

SEQ ID NO: 5119 - protein, 155 aa, Zea mays subsp. mays
  peptide (1)..(155): Ceres Seq. ID no. 12344727
MANDTFGTRIPFLYLEDIQMRFMKNYGRVAHSALAYAMNDEFSRVLHQQMEFFSSNPSADTLNRLRGEVSEIHTVMVDNIEKILDRGDRISLLVDKTSTMQDSAFHFRKQSKRLRRALWMKNAKLLVVLTVVIVVLLYLIISAFCGGLSLSSCRS

SEQ ID NO: 5120 - DNA, 1360 bp, Zea mays subsp. mays
  misc_feature (1)..(1360): Ceres Seq. ID no. 12344092
  misc_feature (1)..(1360): Ortholog of  Ceres SEQ ID NO 15170438 as cited in SEQ ID NO 52845
  misc_feature (1)..(1360): Ortholog of  Ceres SEQ ID NO 13503557 as cited in SEQ ID NO 69075
gagatctatccccgtttccaacctcacacccccccttccattggagctccttcgtctgagttaaacctaaaccctaatcgcgacctgcgttcgtcaaaaccctacctggccatggacggcggaggaggaggcggtggaggaggaggtggagttggggcaggtgtcatggtgggtggcggagtcgtgccgggcggcgggggcggcgacgtggaactcgtcagcaagacgctgcagttcgagcacaagctgttctactttgatctgaaggagaacccgcgggggaggtacctcaagatctccgagaagacatcggccacgcgctccaccatcatcgtccccatcgacggcgtcgcctggttcctcgacctcttcgactactacatccgcaccgacgagcgcgacgtcttcagcaaggagctgcgactccagaccaaggtgttctatttcgatatcggggagaacaagaggggccgattcctcaaggtttctgaggcctctgtcaacagaaaccggagtaccataattgttccagctggcagctctggtgaagagggctgggaagcattcagaaatgtactgttggaaataaataacgaggcttccagattgtatgtcctaccaaatcatccaaatcagcaacacatggagccgccagagcgtcttcctggcttgtcagatgatgtgggtgccggatttatagctggacatggtagccagtccgcttctgggccagaggtagatgtcgaacgtttggttgatctgcctcctcaagaagaaattagtggcatgggtatgtctaaggtgattagggcagatcagaagaggttcttcttcgacctgggaagcaacaacaggggccattatttgaggatttctgaggtggctggagttgatcgttcgtctataatcttgccgctctcgggtttgaagcagttccatgaaatggttggtcactttgtagatataatgaaggacaggcttgaaggaatgacaggagctaacgtgcgcactgtcgaatccagtcagagatgattacccttactgtggcctgggcaagactgctgttatgcctcctgtaggtttgccatgtggtgtgtggtaatgtagatcacgcactattaattcatctggtggggataataatgtctcctttctcttcatttttttaaaattcagtggtgaggattgatttatttgggacgttttgctttttcggaggaataataagcagtgtattgttcgtggggtggtataattatagttgctgtagtgttagccctgttttcatgcttcgctgttcttgtttatgtaaaaaagatgtgtggtatgtttctggcattgagttctttctacacatgtt

SEQ ID NO: 5121 - protein, 343 aa, Zea mays subsp. mays
  peptide (1)..(343): Ceres Seq. ID no. 12344093
EIYPRFQPHTPPSIGAPSSELNLNPNRDLRSSKPYLAMDGGGGGGGGGGGVGAGVMVGGGVVPGGGGGDVELVSKTLQFEHKLFYFDLKENPRGRYLKISEKTSATRSTIIVPIDGVAWFLDLFDYYIRTDERDVFSKELRLQTKVFYFDIGENKRGRFLKVSEASVNRNRSTIIVPAGSSGEEGWEAFRNVLLEINNEASRLYVLPNHPNQQHMEPPERLPGLSDDVGAGFIAGHGSQSASGPEVDVERLVDLPPQEEISGMGMSKVIRADQKRFFFDLGSNNRGHYLRISEVAGVDRSSIILPLSGLKQFHEMVGHFVDIMKDRLEGMTGANVRTVESSQR

SEQ ID NO: 5122 - protein, 306 aa, Zea mays subsp. mays
  peptide (1)..(306): Ceres Seq. ID no. 12344094
MDGGGGGGGGGGGVGAGVMVGGGVVPGGGGGDVELVSKTLQFEHKLFYFDLKENPRGRYLKISEKTSATRSTIIVPIDGVAWFLDLFDYYIRTDERDVFSKELRLQTKVFYFDIGENKRGRFLKVSEASVNRNRSTIIVPAGSSGEEGWEAFRNVLLEINNEASRLYVLPNHPNQQHMEPPERLPGLSDDVGAGFIAGHGSQSASGPEVDVERLVDLPPQEEISGMGMSKVIRADQKRFFFDLGSNNRGHYLRISEVAGVDRSSIILPLSGLKQFHEMVGHFVDIMKDRLEGMTGANVRTVESSQR

SEQ ID NO: 5123 - protein, 288 aa, Zea mays subsp. mays
  peptide (1)..(288): Ceres Seq. ID no. 12344095
MVGGGVVPGGGGGDVELVSKTLQFEHKLFYFDLKENPRGRYLKISEKTSATRSTIIVPIDGVAWFLDLFDYYIRTDERDVFSKELRLQTKVFYFDIGENKRGRFLKVSEASVNRNRSTIIVPAGSSGEEGWEAFRNVLLEINNEASRLYVLPNHPNQQHMEPPERLPGLSDDVGAGFIAGHGSQSASGPEVDVERLVDLPPQEEISGMGMSKVIRADQKRFFFDLGSNNRGHYLRISEVAGVDRSSIILPLSGLKQFHEMVGHFVDIMKDRLEGMTGANVRTVESSQR

SEQ ID NO: 5124 - DNA, 1389 bp, Zea mays subsp. mays
  misc_feature (1)..(1389): Ceres Seq. ID no. 12413988
  misc_feature (1)..(1389): Ortholog of  Ceres SEQ ID NO 14302764 as cited in SEQ ID NO 67753
  misc_feature (1)..(1389): Ortholog of  Ceres SEQ ID NO 14302291 as cited in SEQ ID NO 68180
gttcaattcgatcacttcttccattccaatttccacacacacacgtctcagctcactccctcctccagtttcgtcagctcgtcatcataaaccgaacacagagctctcgattccattccaggatgctgctgaacccggcgtcagagacgtcggtgctagacaccatccggcagcacctcctcgaggagccagcggcgncggaggcgcggccggccgacgagagcttcgggagcctggtggcggaccagtggagcggctcgctcccgttccgcaccgacgacgccgacgacatggtggtgttcggggtgctgcaggacgccttcgcctacggctggctgcccgacggctcattcgtgcacgtgaagcccgagccagtgcggtcccccgactcgtcctcctaccacccctgctcctacgacggctcaccctgcttcggcctcctggacccggagccgccgctgacgcccggcaccaccacgcccgggagggggcaggaggaggccgcggcggccatggcccggggcaagcactacaggggggtgaggcagcgcccgtggggcaagttcgcggcggagatcagggaccccgccaggaacggcgcgcgcgtctggctcggcacgtacgacaccgccgaggacgccgcgctcgcctacgaccgcgccgcctaccgcatgcgcggctcgcgcgcgctcctcaacttcccgctccgcatcggctccggggacaagcgcccgtcgccggcgccgcccgagcccaccacctcctcggactcctcctcgtcttcggccagcggctcgcacaagaggcggaagcgaggcgaggccgcggctgccaacatggccatggcgctggtgccctcgccctcccagcttaaccggccggcccagccgtggttccctgccgcgccggtcgagcaggcggcgatggctccgcgcgtggagcagatcgtcgtctagtctagccatgcgccggcgaaagcgggggcaaggccctgcgctgcacttgcgtgacagctccaccggatggaatgcgaatatgcgataaagctcgggagcaactggggtccgtccggatgccgctgttgctccgtgcaactggcgcaagtggaagaagctgtctattggaagtcaaattgagccgcgcggacagtccggcgctgaggccggacggtccgcggtccggacagtctgcggtggtggcgcggacggtccgcgcgcgcgcagagtcagttagggttcctagtttctcgcgggatttgttacctaaaaccgcgggattaactcgggaaacagttggaaacggatccagacctccccctttatatagatgaaggtctacggccgattgaaccccaacaatcgaacaaatcaagtctatttctcgtttttt

SEQ ID NO: 5125 - protein, 317 aa, Zea mays subsp. mays
  peptide (1)..(317): Ceres Seq. ID no. 12413989
  misc_feature (66)..(66): Xaa is any aa, unknown or other
SIRSLLPFQFPHTHVSAHSLLQFRQLVIINRTQSSRFHSRMLLNPASETSVLDTIRQHLLEEPAAXEARPADESFGSLVADQWSGSLPFRTDDADDMVVFGVLQDAFAYGWLPDGSFVHVKPEPVRSPDSSSYHPCSYDGSPCFGLLDPEPPLTPGTTTPGRGQEEAAAAMARGKHYRGVRQRPWGKFAAEIRDPARNGARVWLGTYDTAEDAALAYDRAAYRMRGSRALLNFPLRIGSGDKRPSPAPPEPTTSSDSSSSSASGSHKRRKRGEAAAANMAMALVPSPSQLNRPAQPWFPAAPVEQAAMAPRVEQIVV

SEQ ID NO: 5126 - protein, 290 aa, Zea mays subsp. mays
  peptide (1)..(290): Ceres Seq. ID no. 12413990
  misc_feature (66)..(66): Xaa is any aa, unknown or other
FNSITSSIPISTHTRLSSLPPPVSSARHHKPNTELSIPFQDAAEPGVRDVGARHHPAAPPRGASGXGGAAGRRELREPGGGPVERLAPVPHRRRRRHGGVRGAAGRLRLRLAARRLIRAREARASAVPRLVLLPPLLLRRLTLLRPPGPGAAADARHHHAREGAGGGRGGHGPGQALQGGEAAPVGQVRGGDQGPRQERRARLARHVRHRRGRRARLRPRRLPHARLARAPQLPAPHRLRGQAPVAGAARAHHLLGLLLVFGQRLAQEAEARRGRGCQHGHGAGALALPA

SEQ ID NO: 5127 - protein, 277 aa, Zea mays subsp. mays
  peptide (1)..(277): Ceres Seq. ID no. 12413991
  misc_feature (26)..(26): Xaa is any aa, unknown or other
MLLNPASETSVLDTIRQHLLEEPAAXEARPADESFGSLVADQWSGSLPFRTDDADDMVVFGVLQDAFAYGWLPDGSFVHVKPEPVRSPDSSSYHPCSYDGSPCFGLLDPEPPLTPGTTTPGRGQEEAAAAMARGKHYRGVRQRPWGKFAAEIRDPARNGARVWLGTYDTAEDAALAYDRAAYRMRGSRALLNFPLRIGSGDKRPSPAPPEPTTSSDSSSSSASGSHKRRKRGEAAAANMAMALVPSPSQLNRPAQPWFPAAPVEQAAMAPRVEQIVV

SEQ ID NO: 5128 - DNA, 1232 bp, Zea mays subsp. mays
  misc_feature (1)..(1232): Ceres Seq. ID no. 12343790
  misc_feature (1)..(1232): Ortholog of  Ceres SEQ ID NO 13582388 as cited in SEQ ID NO 56812
  misc_feature (1)..(1232): Ortholog of  Ceres SEQ ID NO 14305353 as cited in SEQ ID NO 57710
atcagttactactgcctgcctgcctgcctgcgtctctcctccaggtccaggctccaggaatccaccccccacctcctcggattctttccccctctccagctcccccgtcctgcagccgcctgcactgtgctgccgccccgttcgcctcccggcctccagcctcctcggttcccgcgggagggccatgaagttaaggacaaaacgacctgaatggaagtcccttgtgcctctacaactgagcagattgagcaggaaatctgccatgcgtttctttttgttccccaaggttcagtcggctggtcaatcgccagatgataccccagtttatcttaatgtgtatgatttgacgccaatgaacggttatatatattgggcaggcctgggcatatttcactcaggaattgaagttcatggtgttgaatatgcattcggagcacatgactttcccaccagtggggtctttgaggtagaacctcgccaatgccctggtttcagattcagaaaatcaatatttcttggtacaacatgcttggatccaatccaagttaggcagttcatggagctgcagtcagtaaactacaacggcgatacttaccatcttatcacgaagaactgtaaccacttctgcaaggatatgtgctacaagttgaccggtaacaaaattcccaaatgggtgaatcggctcgccagaataggcgccatttgcaactgccttctcccggagtcgcttaagatctctccggttggccatgacccaaacagtcaatccgaagactcggagaagaggcgtctgaggaacccattcagctgcttctcttcgatctcgagccaccggcagctgccgtcgtcatctcctttcccaccatctcctgtgaaagggggcctcccccgttgctcgtcgaggaaaagcagcacggcgtctccgaaaaataggtagcctgccctggggcgcgcccctgcgtaacttccgagtcgtcgtgctaattcctgcggtgtcaacatctggatccgcacggcgagtgctgtgctgtgctgcgctgtagctttctgtcaggtacttgttttttggtcggtaaaaatcagatgcctgatgttgtatcatgtaaaaaacccctagcgacgtgtgctgctgatctgcctcgcaagatctgttgggagggtgaattgccactcggttctacccgccgcctatgtactctactcagggatttgtatattaatccattattctt

SEQ ID NO: 5129 - protein, 311 aa, Zea mays subsp. mays
  peptide (1)..(311): Ceres Seq. ID no. 12343791
SVTTACLPACVSPPGPGSRNPPPTSSDSFPLSSSPVLQPPALCCRPVRLPASSLLGSRGRAMKLRTKRPEWKSLVPLQLSRLSRKSAMRFFLFPKVQSAGQSPDDTPVYLNVYDLTPMNGYIYWAGLGIFHSGIEVHGVEYAFGAHDFPTSGVFEVEPRQCPGFRFRKSIFLGTTCLDPIQVRQFMELQSVNYNGDTYHLITKNCNHFCKDMCYKLTGNKIPKWVNRLARIGAICNCLLPESLKISPVGHDPNSQSEDSEKRRLRNPFSCFSSISSHRQLPSSSPFPPSPVKGGLPRCSSRKSSTASPKNR

SEQ ID NO: 5130 - protein, 250 aa, Zea mays subsp. mays
  peptide (1)..(250): Ceres Seq. ID no. 12343792
MKLRTKRPEWKSLVPLQLSRLSRKSAMRFFLFPKVQSAGQSPDDTPVYLNVYDLTPMNGYIYWAGLGIFHSGIEVHGVEYAFGAHDFPTSGVFEVEPRQCPGFRFRKSIFLGTTCLDPIQVRQFMELQSVNYNGDTYHLITKNCNHFCKDMCYKLTGNKIPKWVNRLARIGAICNCLLPESLKISPVGHDPNSQSEDSEKRRLRNPFSCFSSISSHRQLPSSSPFPPSPVKGGLPRCSSRKSSTASPKNR

SEQ ID NO: 5131 - protein, 224 aa, Zea mays subsp. mays
  peptide (1)..(224): Ceres Seq. ID no. 12343793
MRFFLFPKVQSAGQSPDDTPVYLNVYDLTPMNGYIYWAGLGIFHSGIEVHGVEYAFGAHDFPTSGVFEVEPRQCPGFRFRKSIFLGTTCLDPIQVRQFMELQSVNYNGDTYHLITKNCNHFCKDMCYKLTGNKIPKWVNRLARIGAICNCLLPESLKISPVGHDPNSQSEDSEKRRLRNPFSCFSSISSHRQLPSSSPFPPSPVKGGLPRCSSRKSSTASPKNR

SEQ ID NO: 5132 - DNA, 1623 bp, Zea mays subsp. mays
  misc_feature (1)..(1623): Ceres Seq. ID no. 12373676
  misc_feature (1)..(1623): Ortholog of  Ceres SEQ ID NO 15177221 as cited in SEQ ID NO 53046
  misc_feature (1)..(1623): Ortholog of  Ceres SEQ ID NO 15170209 as cited in SEQ ID NO 58562
  misc_feature (1)..(1623): Ortholog of  Ceres SEQ ID NO 14315134 as cited in SEQ ID NO 59476
  misc_feature (1)..(1623): Ortholog of  Ceres SEQ ID NO 12616332 as cited in SEQ ID NO 63449
  misc_feature (1)..(1623): Ortholog of  Ceres SEQ ID NO 13597498 as cited in SEQ ID NO 64648
  misc_feature (1)..(1623): Ortholog of  Ceres SEQ ID NO 14308053 as cited in SEQ ID NO 67790
agcaggcggcccgggcagatagcaggcgtgttgctcgcgcctcggcacataaatcgtctccgatctccaggtgcccggccaccctggttcgtcgaagcaccctagtcgtcgtagcggcctacgggctcttgggcagagagagaagctgcatagccagtcgctcctgcatatgctccagctgctgcgcgcaatgatggcactgacggagcggcagccgcagctggagaagaagccggcgcgcgggagggcgccgctgtcggggaaggccgtcgcggcgctgtgcgtgacgagcttcgtcgtggggctgctgcttagcggcaacgtgtcgctcatgtcggcctcggcgtcgccgtcgtcctcgagcacggacagcgccgacagcgacaagagcattcgtgtttccggttgcgacaatgagcgtaaactcggagagaaccaccccaaggatctcctgaacgaggtgtcgagaactcatcaagcaatccagtcgctggacaaggcggtgtccaccctggagatggagatggccgtggaacgcgctaggggcggtggcggcggcggcggcgccgcgtccatggcgtccagcaggactcctcagaaggccttcgtcgtggtcggcatcaacacggccttcaccagcaagaagcggcgcgactcgctccgcgacacctgggtccccagaggggataagctgaggaagctggagcgggagaaggggatcgtggtccggttcgtgatcgggcacagcggcacgccgggcggcggcgcgctggaccgcgccctggacgcggaggaggccgagaccagggacttcatgcggctggaccacgccgagggctaccacgagctgtcgtccaagaccaggacctacttcaccaccgccgtcgccacctgggacgccgacttctacgtcaaggtcgacgacgacatccacctcaacctcgggatgctggcgagcaggctggcgaaacacaggacgcgcccgagggtgtacgtcggctgcatgaagtccgggcctgtcctgtcacagaaaggagtcaagtaccacgagccagagtactggaagttcggcgacgagggcaacaagtacttccgccacgccaccggccaaatctacgccatctccaaggacctcgccgcctacatctccatcaaccagccgatcctgcacaggttcgcgaacgaggacgtctcgctgggggcgtggctgatcgggctcgaggtcgagcacgtcgacgaccggagcatgtgctgcgcgacgcctccagactgcgagtggaagaagcgagccgggaacgtgtgcgtggcgtccttcgactggtcgtgcagcggcgtctgtaagtcggtggaccggatgcgccacatccacaaggcgtgcggcgaaggcgaaggcgccgtctggaacgccgccacatgagacgagattgccattctcgtcggaacacttgttgtatgcggagcttcacttgatgaaaacgcgaaggcgagagggaagcgcctgcgccactgtttggcatgacacattccgcatggcaagcgtggttgtttcacttgagacggcatgctatgatccacgtaaaagcgcatggattattattggtgtgtcaacgtgatcctttttgg

SEQ ID NO: 5133 - protein, 415 aa, Zea mays subsp. mays
  peptide (1)..(415): Ceres Seq. ID no. 12373677
MLQLLRAMMALTERQPQLEKKPARGRAPLSGKAVAALCVTSFVVGLLLSGNVSLMSASASPSSSSTDSADSDKSIRVSGCDNERKLGENHPKDLLNEVSRTHQAIQSLDKAVSTLEMEMAVERARGGGGGGGAASMASSRTPQKAFVVVGINTAFTSKKRRDSLRDTWVPRGDKLRKLEREKGIVVRFVIGHSGTPGGGALDRALDAEEAETRDFMRLDHAEGYHELSSKTRTYFTTAVATWDADFYVKVDDDIHLNLGMLASRLAKHRTRPRVYVGCMKSGPVLSQKGVKYHEPEYWKFGDEGNKYFRHATGQIYAISKDLAAYISINQPILHRFANEDVSLGAWLIGLEVEHVDDRSMCCATPPDCEWKKRAGNVCVASFDWSCSGVCKSVDRMRHIHKACGEGEGAVWNAAT

SEQ ID NO: 5134 - protein, 408 aa, Zea mays subsp. mays
  peptide (1)..(408): Ceres Seq. ID no. 12373678
MMALTERQPQLEKKPARGRAPLSGKAVAALCVTSFVVGLLLSGNVSLMSASASPSSSSTDSADSDKSIRVSGCDNERKLGENHPKDLLNEVSRTHQAIQSLDKAVSTLEMEMAVERARGGGGGGGAASMASSRTPQKAFVVVGINTAFTSKKRRDSLRDTWVPRGDKLRKLEREKGIVVRFVIGHSGTPGGGALDRALDAEEAETRDFMRLDHAEGYHELSSKTRTYFTTAVATWDADFYVKVDDDIHLNLGMLASRLAKHRTRPRVYVGCMKSGPVLSQKGVKYHEPEYWKFGDEGNKYFRHATGQIYAISKDLAAYISINQPILHRFANEDVSLGAWLIGLEVEHVDDRSMCCATPPDCEWKKRAGNVCVASFDWSCSGVCKSVDRMRHIHKACGEGEGAVWNAAT

SEQ ID NO: 5135 - protein, 407 aa, Zea mays subsp. mays
  peptide (1)..(407): Ceres Seq. ID no. 12373679
MALTERQPQLEKKPARGRAPLSGKAVAALCVTSFVVGLLLSGNVSLMSASASPSSSSTDSADSDKSIRVSGCDNERKLGENHPKDLLNEVSRTHQAIQSLDKAVSTLEMEMAVERARGGGGGGGAASMASSRTPQKAFVVVGINTAFTSKKRRDSLRDTWVPRGDKLRKLEREKGIVVRFVIGHSGTPGGGALDRALDAEEAETRDFMRLDHAEGYHELSSKTRTYFTTAVATWDADFYVKVDDDIHLNLGMLASRLAKHRTRPRVYVGCMKSGPVLSQKGVKYHEPEYWKFGDEGNKYFRHATGQIYAISKDLAAYISINQPILHRFANEDVSLGAWLIGLEVEHVDDRSMCCATPPDCEWKKRAGNVCVASFDWSCSGVCKSVDRMRHIHKACGEGEGAVWNAAT

SEQ ID NO: 5136 - DNA, 1387 bp, Zea mays subsp. mays
  misc_feature (1)..(1387): Ceres Seq. ID no. 12353776
  misc_feature (1)..(1387): Ortholog of  Ceres SEQ ID NO 15170461 as cited in SEQ ID NO 52853
  misc_feature (1)..(1387): Ortholog of  Ceres SEQ ID NO 14313666 as cited in SEQ ID NO 54618
  misc_feature (1)..(1387): Ortholog of  Ceres SEQ ID NO 13595351 as cited in SEQ ID NO 55934
  misc_feature (1)..(1387): Ortholog of  Ceres SEQ ID NO 13595513 as cited in SEQ ID NO 56663
  misc_feature (1)..(1387): Ortholog of  Ceres SEQ ID NO 13639645 as cited in SEQ ID NO 57488
attcagtgtagccagcaggtagctgcatcagctagctagctagatagacacttagacaggcataaaaccatctcgggcactcgttccctgcacaagtgtaggagagagctgaggcctgctggccatggacaccaccagcaagaaagcctacggggttgccgtcgtcatacagctcatctacaccggcatgtacgtcgtctccaaggcggcattcgaccatggcatgagcacctacgtgttcatcttctaccgccaggcggccgccactgcgctgttgctccccatagccattgtgcttgaaaggaagaatgcaccacccatgtcattcaggctgtttctgaagctgttcttctatgcattgcttggcaacacattgagcatgaatctgtacaacataagcctcaagtacacctctgcaacagtggcatcggcaacgagcaactctgtccctgtggtcaccttcttcctggcagtcctgttaaggctggaagtggttcggctgagaagcccgtcaggcatggcgaaggcggcgggcgtggcgctgtgcctggccggggtcctgaccatcgcgctgtacacggggccgtcgatgagcccggtgaaccaccaccgcgccttcgcgtcgcaccagcagcacccccatccccatgccgatggcggcggcggcggcaaggggacgtggatcaagggcacgttcctgatgctgctgtccaacacgacgtggtccctctggatcgtgctgcaggcgtcgctgctcaaggagtaccccaacaagctgttgtccacgctggtgcagtgcgcgctcagcaccgcccagtccttcctcctcgccgtcgccgtcgagcgggaccccgccgcctggaagctgcagctcgacgtcggcctcctcgccgtcgcctactccggtctggtggtgacgggcgtgtcgttctacctgcaggcgtggtgcatcgagaagcgcgggcccgtgttcctggccatgtccaacccgctgggcctgctgctcaccatcttctgctcctccttcttcctcggcgagatcgtgcgcctgggcagcctcctcggcagcggcctcctcgtcggagggctctacagcgtcctctggggcaagagcaaggaccacctccaccaggagcatcaagacgacgaagagaagcagcagcagcagccgagcgcagcaggcggagacaaccagaagcagctcaaggagcagttcgcaatggagccatcatcgccactgcgccatcagtccggatgatgaggaatggtctacgcgtgtatgtgtgtgagtaggttctacgtacgtgcctatatatgtcttaatgtctatgtggtgggtctgggcgtatccaactccgatgcacatggatggtctcttgttcgcccg

SEQ ID NO: 5137 - protein, 377 aa, Zea mays subsp. mays
  peptide (1)..(377): Ceres Seq. ID no. 12353777
MDTTSKKAYGVAVVIQLIYTGMYVVSKAAFDHGMSTYVFIFYRQAAATALLLPIAIVLERKNAPPMSFRLFLKLFFYALLGNTLSMNLYNISLKYTSATVASATSNSVPVVTFFLAVLLRLEVVRLRSPSGMAKAAGVALCLAGVLTIALYTGPSMSPVNHHRAFASHQQHPHPHADGGGGGKGTWIKGTFLMLLSNTTWSLWIVLQASLLKEYPNKLLSTLVQCALSTAQSFLLAVAVERDPAAWKLQLDVGLLAVAYSGLVVTGVSFYLQAWCIEKRGPVFLAMSNPLGLLLTIFCSSFFLGEIVRLGSLLGSGLLVGGLYSVLWGKSKDHLHQEHQDDEEKQQQQPSAAGGDNQKQLKEQFAMEPSSPLRHQSG

SEQ ID NO: 5138 - protein, 356 aa, Zea mays subsp. mays
  peptide (1)..(356): Ceres Seq. ID no. 12353778
MYVVSKAAFDHGMSTYVFIFYRQAAATALLLPIAIVLERKNAPPMSFRLFLKLFFYALLGNTLSMNLYNISLKYTSATVASATSNSVPVVTFFLAVLLRLEVVRLRSPSGMAKAAGVALCLAGVLTIALYTGPSMSPVNHHRAFASHQQHPHPHADGGGGGKGTWIKGTFLMLLSNTTWSLWIVLQASLLKEYPNKLLSTLVQCALSTAQSFLLAVAVERDPAAWKLQLDVGLLAVAYSGLVVTGVSFYLQAWCIEKRGPVFLAMSNPLGLLLTIFCSSFFLGEIVRLGSLLGSGLLVGGLYSVLWGKSKDHLHQEHQDDEEKQQQQPSAAGGDNQKQLKEQFAMEPSSPLRHQSG

SEQ ID NO: 5139 - protein, 344 aa, Zea mays subsp. mays
  peptide (1)..(344): Ceres Seq. ID no. 12353779
MSTYVFIFYRQAAATALLLPIAIVLERKNAPPMSFRLFLKLFFYALLGNTLSMNLYNISLKYTSATVASATSNSVPVVTFFLAVLLRLEVVRLRSPSGMAKAAGVALCLAGVLTIALYTGPSMSPVNHHRAFASHQQHPHPHADGGGGGKGTWIKGTFLMLLSNTTWSLWIVLQASLLKEYPNKLLSTLVQCALSTAQSFLLAVAVERDPAAWKLQLDVGLLAVAYSGLVVTGVSFYLQAWCIEKRGPVFLAMSNPLGLLLTIFCSSFFLGEIVRLGSLLGSGLLVGGLYSVLWGKSKDHLHQEHQDDEEKQQQQPSAAGGDNQKQLKEQFAMEPSSPLRHQSG

SEQ ID NO: 5140 - DNA, 1116 bp, Zea mays subsp. mays
  misc_feature (1)..(1116): Ceres Seq. ID no. 12434957
  misc_feature (1)..(1116): Ortholog of  Ceres SEQ ID NO 12780822 as cited in SEQ ID NO 67471
atatacctgtcactcacgctaccgccgtgaccgatcgttcgttccttccttctccctcccttcgcgggccgcgcgcctattttattatttactactctattcatatcattatattgtttggtttccttcttcccggccagatctctcactctctcgtcagatcctctcggctagctagctaggacagaggagggaggggaaggcgctggctatggcgactgcggcggcggcggcggcggcggccatggaggagccggacgtcgtcaacggccgcgacgtggtgagctgggtggcgtccggggtggtgctgtggtcgaccgccttcttgctggtgcgggcgctgttccccaagcgctcctacgacttctgcaaccgcgccgtctccaccatgcacgccgtcgccgccgtgtgcctcgcctgcctctccgtcgacgactggtcgtgccccgtctgcccgctcgccgccgcatcctcccgtcgccagatgaaggcgctggcggttacgctggcgtacatggtgtacgacgcggcgtgctgccacctcaacggcgacacgcggctggacaacgccgtgcaccacctggtcagcatcgtcggcatcggcgcggggctcgcctaccagaggtgcgggacggagatggtggccagcatgctcgtgacggagatgtccagcccgctgctgcacctgcgggagatgctcaaggagctgggcgtgcgggacacggagctgaacctcctcgtcgacgtgctcttcgccgccaccttctccgccgcccggatgggcgtcgggccgtacctcacctacgtcaccgtgacggcccgacaaccccatcctcatcaaggcgatggcgacggggctgcagctggtgagcgcctactggttcctgcggatcctccggatggtcaggtacaagctcgccggcaagaagaagccgacgccggccaagctcgccgccgccgccgccaactgacgtaataagcgccggcgacgaccttcacgagctacgcacatttatgataccgggagttggattcgacagaggccgtgctgtacatatagtacaaatacacacacacgcccgcctctgaagcaatgcaatgcaatgcaatttctcc

SEQ ID NO: 5141 - protein, 254 aa, Zea mays subsp. mays
  peptide (1)..(254): Ceres Seq. ID no. 12434958
MATAAAAAAAAMEEPDVVNGRDVVSWVASGVVLWSTAFLLVRALFPKRSYDFCNRAVSTMHAVAAVCLACLSVDDWSCPVCPLAAASSRRQMKALAVTLAYMVYDAACCHLNGDTRLDNAVHHLVSIVGIGAGLAYQRCGTEMVASMLVTEMSSPLLHLREMLKELGVRDTELNLLVDVLFAATFSAARMGVGPYLTYVTVTARQPHPHQGDGDGAAAGERLLVPADPPDGQVQARRQEEADAGQARRRRRQLT

SEQ ID NO: 5142 - protein, 243 aa, Zea mays subsp. mays
  peptide (1)..(243): Ceres Seq. ID no. 12434959
MEEPDVVNGRDVVSWVASGVVLWSTAFLLVRALFPKRSYDFCNRAVSTMHAVAAVCLACLSVDDWSCPVCPLAAASSRRQMKALAVTLAYMVYDAACCHLNGDTRLDNAVHHLVSIVGIGAGLAYQRCGTEMVASMLVTEMSSPLLHLREMLKELGVRDTELNLLVDVLFAATFSAARMGVGPYLTYVTVTARQPHPHQGDGDGAAAGERLLVPADPPDGQVQARRQEEADAGQARRRRRQLT

SEQ ID NO: 5143 - protein, 195 aa, Zea mays subsp. mays
  peptide (1)..(195): Ceres Seq. ID no. 12434960
MHAVAAVCLACLSVDDWSCPVCPLAAASSRRQMKALAVTLAYMVYDAACCHLNGDTRLDNAVHHLVSIVGIGAGLAYQRCGTEMVASMLVTEMSSPLLHLREMLKELGVRDTELNLLVDVLFAATFSAARMGVGPYLTYVTVTARQPHPHQGDGDGAAAGERLLVPADPPDGQVQARRQEEADAGQARRRRRQLT

SEQ ID NO: 5144 - DNA, 1661 bp, Zea mays subsp. mays
  misc_feature (1)..(1661): Ceres Seq. ID no. 12409686
  misc_feature (1)..(1661): Ortholog of  Ceres SEQ ID NO 12626061 as cited in SEQ ID NO 64594
  misc_feature (1)..(1661): Ortholog of  Ceres SEQ ID NO 15174020 as cited in SEQ ID NO 0
  misc_feature (1)..(1661): Ortholog of  Ceres SEQ ID NO 15179151 as cited in SEQ ID NO 0
gtgttcacaaagccggcgccttttgctccccgatctcagttcccgcccacctctaagctcccaaggcgacgctgcggcggcgggacaagcggaaggacaagaggcggacttgtctccctgcccccaccccctccctcgcttcgcgcgtacccccttcagttcagccgggcggtaccgtcgacggcgccggcattgtacttctgctgcgcagctatcactgctctgagaaaatggttgcagcagcctttactgttgatttggacaagcctctagtattccaggttggccatctagaggagcagtatcaggagtgggttcaccagccgattgtttgcaaggaagggccacggttttttgaaaatgatatattggagttcttaacacgcacgaaatggtgggcagttcctcttatctggttgcctgttgtatgttggtgcctgagtacttctatcaagatgggcaatactatcacagatgtagctatgatgattgggtttggaatatttctgtggacactgatcgaatatgtgttacaccgattcttgttccacataaaaaccaaaagttactggggaaacacagcacattatcttcttcatggatgtcatcacaagcatccgatggatggacttcgacttgtctttccaccagctgccgcagctattttgtgctttccggtaaataatcttccttatgtattacgtaccagggtatgggtatctactctgctgttgctgacaatatgtcagatttccacaacactgatgttgaaattacttactacatttgttaaatgttgcatcctaatccttttttttctaaagctggttgaagtggcctgtttgtacatggaaatcgtcatggtttcaagctaatcagaattccttttaactttgttaactttcagttggatatcgataattttaatgccttttttttctgaactgttcatatagttctggaacatgatcaagctattttcgaccccgtctacaactcctggtctgtttggaggtggcctgttgggctacgtgatctatgattgcacacactactacctgcatcatggccagccatcatcagatcctgcaaagtatctccaagaagtaccatctcaaccatcacttcagaattcaaacaaagggctttggaataacttcgaccctgtgggatcatgtatttggcacgctgccttctacgaaaactgtcgacaagagcatttgattttgactggatcttctgctttgcaaagctcttatagtgatgttaggctttgctcgcattgcctgtgtccactttttgaggccagcttccctgttccatcatgtagatttggctttggcagtgtctctatttttttttatctctagcagaggactttaaaatcatcaattacagattggtcatcatcggtggaggttctgttggacaaatttctatccagtttctgattcttctccatggaccaactgtatgaaggcgatcaccagttgctggctcacagacgcgactgaagcgatcaccagtttggtttcaagtcaatgccatcagcggtcgtgttcacattatgtctagctagtgccagctgttagatcagcatgtaatgtatgtacagtgttttcttctctagtagcgtagcctctctgcaagggctgtttggc

SEQ ID NO: 5145 - protein, 214 aa, Zea mays subsp. mays
  peptide (1)..(214): Ceres Seq. ID no. 12409687
MVAAAFTVDLDKPLVFQVGHLEEQYQEWVHQPIVCKEGPRFFENDILEFLTRTKWWAVPLIWLPVVCWCLSTSIKMGNTITDVAMMIGFGIFLWTLIEYVLHRFLFHIKTKSYWGNTAHYLLHGCHHKHPMDGLRLVFPPAAAAILCFPVNNLPYVLRTRVWVSTLLLLTICQISTTLMLKLLTTFVKCCILILFFLKLVEVACLYMEIVMVSS

SEQ ID NO: 5146 - protein, 139 aa, Zea mays subsp. mays
  peptide (1)..(139): Ceres Seq. ID no. 12409688
MGNTITDVAMMIGFGIFLWTLIEYVLHRFLFHIKTKSYWGNTAHYLLHGCHHKHPMDGLRLVFPPAAAAILCFPVNNLPYVLRTRVWVSTLLLLTICQISTTLMLKLLTTFVKCCILILFFLKLVEVACLYMEIVMVSS

SEQ ID NO: 5147 - protein, 134 aa, Zea mays subsp. mays
  peptide (1)..(134): Ceres Seq. ID no. 12409689
MIKLFSTPSTTPGLFGGGLLGYVIYDCTHYYLHHGQPSSDPAKYLQEVPSQPSLQNSNKGLWNNFDPVGSCIWHAAFYENCRQEHLILTGSSALQSSYSDVRLCSHCLCPLFEASFPVPSCRFGFGSVSIFFYL

SEQ ID NO: 5148 - DNA, 1192 bp, Zea mays subsp. mays
  misc_feature (1)..(1192): Ceres Seq. ID no. 12409683
  misc_feature (1)..(1192): Ortholog of  Ceres SEQ ID NO 15224319 as cited in SEQ ID NO 66044
  misc_feature (1)..(1192): Ortholog of  Ceres SEQ ID NO 13598045 as cited in SEQ ID NO 66822
acaaacgaacaaggcattaatctcctccaatcctccagtgatcccgggtaaccaaatcaaatcagccctttcttttgctacggttttgtatttcatcgtgtcgcccaagaaaatcgaaggaacgcgccgccaccggccgcaacaaagcaaagcaggcctccggcctccctgaactgacttcagaagtcaccaacgcacccagcacagacagaagaccctcgccggacgctcgctctcgccggggacaactcaatcccgaggccaggatggcccgctacgatcgcgcgatcaccgtgttctcacccgacggccacctcttccaggtcgagtacgccctcgaggccgtccgcaagggcaacgccgctgtcggcgtccgcggcgtcgacaccgtcgtcctcggcgtcgagaagaagtccacccccaagctccaggactccaggtccgtgcgcaagatcgtgagcctggacacccacatcgcgctggcgtgcgcggggctcaaggccgacgcgcgcgtgctcatcaaccgcgctcgcgtggagtgccagagccaccgcctcacagtcgaggaccccgtcaccgtcgagtacatcacgcgctacatcgccggcctgcagcagaagtacacgcagagcggaggggtgcgccccttcggcctctccacgctcatcgtcggcttcgatccctacacccagaagccccgcgctgtaccagactgacccctcagggaccttctccgcttggaaggccaacgcaaccggccgcaactccaactccatgcgcgagtttctcgagaagaattacaaggagacgtccggtaaggagaccatcaagctcgccatcagagcactccttgaggttgttgagagtggtggcaagaacatagagattgcagtgatgacacacgaggacggccttcatgaactcgaagaggctgagattgatgagtatgttgccgaaattgaagcagagaaggccgctgccgaggctgcaaagaagggtgcaccaaaggggaactgactccgcacaagcttagattccgcctcttgttccagagcatgtcttatgattcacctcttagatggatgcccggatgtttggatacaggaatatttataaaaaaaattaagatgaagccgcttggatgaaaacatgctatgtgatgcatagtattgcaataccatggtggtttgtg

SEQ ID NO: 5149 - protein, 149 aa, Zea mays subsp. mays
  peptide (1)..(149): Ceres Seq. ID no. 12409684
MARYDRAITVFSPDGHLFQVEYALEAVRKGNAAVGVRGVDTVVLGVEKKSTPKLQDSRSVRKIVSLDTHIALACAGLKADARVLINRARVECQSHRLTVEDPVTVEYITRYIAGLQQKYTQSGGVRPFGLSTLIVGFDPYTQKPRAVPD

SEQ ID NO: 5150 - protein, 80 aa, Zea mays subsp. mays
  peptide (1)..(80): Ceres Seq. ID no. 12409685
MREFLEKNYKETSGKETIKLAIRALLEVVESGGKNIEIAVMTHEDGLHELEEAEIDEYVAEIEAEKAAAEAAKKGAPKGN

SEQ ID NO: 5151 - DNA, 1105 bp, Zea mays subsp. mays
  misc_feature (1)..(1105): Ceres Seq. ID no. 12373368
  misc_feature (1)..(1105): Ortholog of  Ceres SEQ ID NO 14304124 as cited in SEQ ID NO 56378
  misc_feature (1)..(1105): Ortholog of  Ceres SEQ ID NO 12585331 as cited in SEQ ID NO 62912
  misc_feature (1)..(1105): Ortholog of  Ceres SEQ ID NO 13654964 as cited in SEQ ID NO 63176
gcacgagaccattacctagaacatcctaatcgaaaagaatccgcatttccccttccccgcaccgcaccgcaccgcacccaacccccgtcggagagagagatggcatcggtggcggagatgcagcccctcgcgccggcggggtaccgccgcgcgccggagatgaaggagaaggtggaggcgtcggtggtggacctggaggccgggaccggggagacgctgtacccggggatctcgcgcggggagagcgccctccgatggggcttcgtccgcaaggtctacggcatcctcgctgcgcagctgctcctcaccaccgccgtctccgccctcaccgttctccaccccaccctcaacgccacgctctccgactccccgggcctcgcgctcgtgctcgccgtcctgcccttcatcctgatgatcccattgtaccattatcagcacaagcacccacacaatttcgttttcctgggtctgttcacgttgtgcttgagcttcagcatcggcgtggcttgtgctaacacccaaggaaaaatcgttctggaggctttagtgctgacggctggcgtggtggtttctctgactgcgtatgctttctgggcgtcaaagaagggcaaggaatttgggtacctggggcctatcctgtcttccgcgcttactatcctcgtcctaactagctttcttcaggttttcttcccactgggacccgtgtcggtgggcttgttcggtggtctaggggctctggtcttctcaggcttcatcctgtacgacaccgagaacctgatcaagcgccacacctacgacgagtacatctgggcgtcggttgggctgtacctcgacatcctgaacctgttcctctccatcctgaacatgctcaggagcatgcaatccgacaactagcctcttgatcgaacacggtatacccccatggtaaatgcggtcctgtgctctggttgttagaggacgggatcgacgtgcgacatatgtattgtgtgagcccactcgtgtcaacactgcaaacaattgtggtcatgtcaccttgtatgttcttggtcacttttcaaacaattgtaagtacctcatatcgttttgcgctcgtgctattcgcgcc

SEQ ID NO: 5152 - protein, 297 aa, Zea mays subsp. mays
  peptide (1)..(297): Ceres Seq. ID no. 12373369
ARDHYLEHPNRKESAFPLPRTAPHRTQPPSEREMASVAEMQPLAPAGYRRAPEMKEKVEASVVDLEAGTGETLYPGISRGESALRWGFVRKVYGILAAQLLLTTAVSALTVLHPTLNATLSDSPGLALVLAVLPFILMIPLYHYQHKHPHNFVFLGLFTLCLSFSIGVACANTQGKIVLEALVLTAGVVVSLTAYAFWASKKGKEFGYLGPILSSALTILVLTSFLQVFFPLGPVSVGLFGGLGALVFSGFILYDTENLIKRHTYDEYIWASVGLYLDILNLFLSILNMLRSMQSDN

SEQ ID NO: 5153 - protein, 264 aa, Zea mays subsp. mays
  peptide (1)..(264): Ceres Seq. ID no. 12373370
MASVAEMQPLAPAGYRRAPEMKEKVEASVVDLEAGTGETLYPGISRGESALRWGFVRKVYGILAAQLLLTTAVSALTVLHPTLNATLSDSPGLALVLAVLPFILMIPLYHYQHKHPHNFVFLGLFTLCLSFSIGVACANTQGKIVLEALVLTAGVVVSLTAYAFWASKKGKEFGYLGPILSSALTILVLTSFLQVFFPLGPVSVGLFGGLGALVFSGFILYDTENLIKRHTYDEYIWASVGLYLDILNLFLSILNMLRSMQSDN

SEQ ID NO: 5154 - protein, 258 aa, Zea mays subsp. mays
  peptide (1)..(258): Ceres Seq. ID no. 12373371
MQPLAPAGYRRAPEMKEKVEASVVDLEAGTGETLYPGISRGESALRWGFVRKVYGILAAQLLLTTAVSALTVLHPTLNATLSDSPGLALVLAVLPFILMIPLYHYQHKHPHNFVFLGLFTLCLSFSIGVACANTQGKIVLEALVLTAGVVVSLTAYAFWASKKGKEFGYLGPILSSALTILVLTSFLQVFFPLGPVSVGLFGGLGALVFSGFILYDTENLIKRHTYDEYIWASVGLYLDILNLFLSILNMLRSMQSDN

SEQ ID NO: 5155 - DNA, 1536 bp, Zea mays subsp. mays
  misc_feature (1)..(1536): Ceres Seq. ID no. 12409679
  misc_feature (1)..(1536): Ortholog of  Ceres SEQ ID NO 13594345 as cited in SEQ ID NO 58043
  misc_feature (1)..(1536): Ortholog of  Ceres SEQ ID NO 13597574 as cited in SEQ ID NO 64677
  misc_feature (1)..(1536): Ortholog of  Ceres SEQ ID NO 13662880 as cited in SEQ ID NO 65422
  misc_feature (1)..(1536): Ortholog of  Ceres SEQ ID NO 14302071 as cited in SEQ ID NO 66585
  misc_feature (1)..(1536): Ortholog of  Ceres SEQ ID NO 14316013 as cited in SEQ ID NO 67181
  misc_feature (1)..(1536): Ortholog of  Ceres SEQ ID NO 12779098 as cited in SEQ ID NO 67698
  misc_feature (1)..(1536): Ortholog of  Ceres SEQ ID NO 13596180 as cited in SEQ ID NO 67941
  misc_feature (1)..(1536): Ortholog of  Ceres SEQ ID NO 13591190 as cited in SEQ ID NO 68044
  misc_feature (1)..(1536): Ortholog of  Ceres SEQ ID NO 13595961 as cited in SEQ ID NO 68223
atggtggcaagtgagcagcaaacacacagctagactccgcgagaaccgtcaatgggttctataggaggacccacagccacagccaccgccgaccggcgccgccgcgtgctgttcttcccgctcccgtaccagggccatatcaaccccatgttccaactcgccggcctcctccacttgcgcggtttctccgtcaccgtcttccacaccgacttcaacgctcccgacaagtcccgccaccctgcctacgacttcgtccccgttcccgtccgcggctgcttgccgaagggcagctcggatgccttgcaggtgaccgtggagcgcatcctcgccgtgaaccgcgcctgcgaggctccgttccgggagcgcctggccgctctgctggcgcgggaggacgtcgcgtgcctggtcgctgacgcccacctgctgacgctgctggacgtggcgcgggggctcggcgtgccgacgctggtgctgcgcaccggcagcgcggcgtgcctccgcatgttcgcggcgttccccgcgctctgcgacaaggggtatcagccggcgcaagagtcgcagctggaggcgccggtgactgagctgccgccgtaccgcgtccgggacctgccgtccaccaccagcgcctgccacggcgtaataagcgaggtgatttcccgtttagtgacggccgtgacgacctcctcgggtctcatcctcaacaccatggacgctctcgagtgcggcgagctggcgtcgctccggcgagacctcggcgtccccgtgttcgacatcggcccgctccacatgctctctccggcggcctcgagcagcttgctactgcaagaccgcggctgcctcgagtggctcgacgcgcaagccccggcgtccgtgctctacgtcagcttcggcagcctcgccagcatgtccgccgccgagctggtggaaacagcctggggcatagccaacagcggctatcccttcctgtgggttctccggccgggcctcgtccgcggctcgcagacgtcggaggcggcgccacccctgcccgacggcttcgacgccgcgacgcgcgggcggggcatggtcgtgagctgggcggccgcaggaggaggtcctggcgcaccctgccgtgggcgcgttctggacgcactgtggctggaactcgacgctagagagcttgtgcgcgggcgtgccggtcattgcccgcccgtgcttcggcgaccagatggggaacgcgaggtacgtggaccacgtgtggcggaccggcctcacgctcgacggcgtgctcgagaggggcgaggtggaggcggccgtcgcggcgttgatggcgcctggagagcccggcgacggactgcgtcggagggcgcgggagctcaagagcagcgcggcggagtgcatggccaaggatgggtcgtcctgcacgaatgtcgacaagctggtagaccacattctgacactgtaggcgtttggtacaggagcagccacgtggtgctgttcttgggtactgtttttctttgcggttgaaaaataaataaataaaacccgatggagctt

SEQ ID NO: 5156 - protein, 484 aa, Zea mays subsp. mays
  peptide (1)..(484): Ceres Seq. ID no. 12409680
MGSIGGPTATATADRRRRVLFFPLPYQGHINPMFQLAGLLHLRGFSVTVFHTDFNAPDKSRHPAYDFVPVPVRGCLPKGSSDALQVTVERILAVNRACEAPFRERLAALLAREDVACLVADAHLLTLLDVARGLGVPTLVLRTGSAACLRMFAAFPALCDKGYQPAQESQLEAPVTELPPYRVRDLPSTTSACHGVISEVISRLVTAVTTSSGLILNTMDALECGELASLRRDLGVPVFDIGPLHMLSPAASSSLLLQDRGCLEWLDAQAPASVLYVSFGSLASMSAAELVETAWGIANSGYPFLWVLRPGLVRGSQTSEAAPPLPDGFDAATRGRGMVVSWAAAGGGPGAPCRGRVLDALWLELDARELVRGRAGHCPPVLRRPDGEREVRGPRVADRPHARRRAREGRGGGGRRGVDGAWRARRRTASEGAGAQEQRGGVHGQGWVVLHECRQAGRPHSDTVGVWYRSSHVVLFLGTVFLCG

SEQ ID NO: 5157 - protein, 452 aa, Zea mays subsp. mays
  peptide (1)..(452): Ceres Seq. ID no. 12409681
MFQLAGLLHLRGFSVTVFHTDFNAPDKSRHPAYDFVPVPVRGCLPKGSSDALQVTVERILAVNRACEAPFRERLAALLAREDVACLVADAHLLTLLDVARGLGVPTLVLRTGSAACLRMFAAFPALCDKGYQPAQESQLEAPVTELPPYRVRDLPSTTSACHGVISEVISRLVTAVTTSSGLILNTMDALECGELASLRRDLGVPVFDIGPLHMLSPAASSSLLLQDRGCLEWLDAQAPASVLYVSFGSLASMSAAELVETAWGIANSGYPFLWVLRPGLVRGSQTSEAAPPLPDGFDAATRGRGMVVSWAAAGGGPGAPCRGRVLDALWLELDARELVRGRAGHCPPVLRRPDGEREVRGPRVADRPHARRRAREGRGGGGRRGVDGAWRARRRTASEGAGAQEQRGGVHGQGWVVLHECRQAGRPHSDTVGVWYRSSHVVLFLGTVFLCG

SEQ ID NO: 5158 - protein, 334 aa, Zea mays subsp. mays
  peptide (1)..(334): Ceres Seq. ID no. 12409682
MFAAFPALCDKGYQPAQESQLEAPVTELPPYRVRDLPSTTSACHGVISEVISRLVTAVTTSSGLILNTMDALECGELASLRRDLGVPVFDIGPLHMLSPAASSSLLLQDRGCLEWLDAQAPASVLYVSFGSLASMSAAELVETAWGIANSGYPFLWVLRPGLVRGSQTSEAAPPLPDGFDAATRGRGMVVSWAAAGGGPGAPCRGRVLDALWLELDARELVRGRAGHCPPVLRRPDGEREVRGPRVADRPHARRRAREGRGGGGRRGVDGAWRARRRTASEGAGAQEQRGGVHGQGWVVLHECRQAGRPHSDTVGVWYRSSHVVLFLGTVFLCG

SEQ ID NO: 5159 - DNA, 1517 bp, Zea mays subsp. mays
  misc_feature (1)..(1517): Ceres Seq. ID no. 12414097
  misc_feature (1)..(1517): Ortholog of  Ceres SEQ ID NO 12609045 as cited in SEQ ID NO 51314
  misc_feature (1)..(1517): Ortholog of  Ceres SEQ ID NO 14316312 as cited in SEQ ID NO 60042
  misc_feature (1)..(1517): Ortholog of  Ceres SEQ ID NO 13595877 as cited in SEQ ID NO 67702
  misc_feature (1)..(1517): Ortholog of  Ceres SEQ ID NO 13654367 as cited in SEQ ID NO 67993
aacacacaaacccacaccaattgatgtgaaacccacacaatcccatcgtcacgacgccaagatcgtgtgcgagtgcgactgtgcgcacgtctccgtctcgcttgttttaagcacggcaagggaagaggacgacgacgggtggacgcttggacaaacagccttgtcgtgtactctctctttctctcctcccacagttccgctcgattcgaagagtccagcgccacacgacatcctccgcgcggccggccatgggggaagctgcggatccagcgacggggagggtgtcaccgccgatgtcgtggcgtacgcggctctccgtgctcgccgcggggtacctcaccgacgccacgcgccgcgccgacggcacagtcaaccgccgcctgctcggcatgctcgacaagggcgtggcggcgtccgcggtcccgcgcaacggcgtcgcctcgcgggacgtgaccatcgacccggccgtgcccctccgcgcgcgcctcttctacccctgcgctcccgccgccgccgaggacgacgacgcgggggcggagcgtccggcggtgcccgtcgtcgtgttcttccacggcggcggcttcgcgtacctctccgcggcatcccccgcctacgacgctgcgtgccgccgcatcgccaggtacgccggcgcggcggtgctgtccgtcgactaccgccgctcgcccgagcaccggttccccgccgcctacgacgacggcttcgcggccctccgcttcctcgacggcgggcccgaccccgaccccggcgcgatcgcgggcgccccgccgatcgacgccgcgcgctgcttcctcgcgggggacagcgctggcggtaacatcgcgcaccacgtcgcccgccgctacgcgctggacccttccgccttcgcgaacctccgcctcgccggcctcatcgccatccagcccttcttcggcggccaggagcgcacgcccgccgagctgcggctcgtcggcgcgcccatcgtctccgttccgcgcaccgactggatgtggcgcgcgttccttccccacggcgcggaccgcacccacgaggcgtcatcccccgacgtcgccaccgcgggcatcgacggcgcccctgatttcccgcctgccacggtcgtcatcggcgggtacgacccgctgcaggactggcagcgccggtactgcgacgcgttgcgcggtaaggggaaggaggtgcgggtgctcgagtaccccgacgccatccacgccttctacgtgttcccggagttcgcggagtccaaggacctcatgctacggatcaaggagatcgtcgccagcagcgagtgatgggggacggacggcgtgggcgcgcgcagctgtcgctcagatgcgtggtggatgtatctgcgactgtgctaagtggctagggtcagtgttgtggttgtggactggacggtgctgtctagtgtgtgacgtggttcgtcgtgtgggacgcgccacaattaaactagtgttaaataatgatgcgatcggcaatgataattctaattttcgtgtttg

SEQ ID NO: 5160 - protein, 351 aa, Zea mays subsp. mays
  peptide (1)..(351): Ceres Seq. ID no. 12414098
MGEAADPATGRVSPPMSWRTRLSVLAAGYLTDATRRADGTVNRRLLGMLDKGVAASAVPRNGVASRDVTIDPAVPLRARLFYPCAPAAAEDDDAGAERPAVPVVVFFHGGGFAYLSAASPAYDAACRRIARYAGAAVLSVDYRRSPEHRFPAAYDDGFAALRFLDGGPDPDPGAIAGAPPIDAARCFLAGDSAGGNIAHHVARRYALDPSAFANLRLAGLIAIQPFFGGQERTPAELRLVGAPIVSVPRTDWMWRAFLPHGADRTHEASSPDVATAGIDGAPDFPPATVVIGGYDPLQDWQRRYCDALRGKGKEVRVLEYPDAIHAFYVFPEFAESKDLMLRIKEIVASSE

SEQ ID NO: 5161 - protein, 336 aa, Zea mays subsp. mays
  peptide (1)..(336): Ceres Seq. ID no. 12414099
MSWRTRLSVLAAGYLTDATRRADGTVNRRLLGMLDKGVAASAVPRNGVASRDVTIDPAVPLRARLFYPCAPAAAEDDDAGAERPAVPVVVFFHGGGFAYLSAASPAYDAACRRIARYAGAAVLSVDYRRSPEHRFPAAYDDGFAALRFLDGGPDPDPGAIAGAPPIDAARCFLAGDSAGGNIAHHVARRYALDPSAFANLRLAGLIAIQPFFGGQERTPAELRLVGAPIVSVPRTDWMWRAFLPHGADRTHEASSPDVATAGIDGAPDFPPATVVIGGYDPLQDWQRRYCDALRGKGKEVRVLEYPDAIHAFYVFPEFAESKDLMLRIKEIVASSE

SEQ ID NO: 5162 - protein, 304 aa, Zea mays subsp. mays
  peptide (1)..(304): Ceres Seq. ID no. 12414100
MLDKGVAASAVPRNGVASRDVTIDPAVPLRARLFYPCAPAAAEDDDAGAERPAVPVVVFFHGGGFAYLSAASPAYDAACRRIARYAGAAVLSVDYRRSPEHRFPAAYDDGFAALRFLDGGPDPDPGAIAGAPPIDAARCFLAGDSAGGNIAHHVARRYALDPSAFANLRLAGLIAIQPFFGGQERTPAELRLVGAPIVSVPRTDWMWRAFLPHGADRTHEASSPDVATAGIDGAPDFPPATVVIGGYDPLQDWQRRYCDALRGKGKEVRVLEYPDAIHAFYVFPEFAESKDLMLRIKEIVASSE

SEQ ID NO: 5163 - DNA, 793 bp, Zea mays subsp. mays
  misc_feature (1)..(793): Ceres Seq. ID no. 12349701
  misc_feature (1)..(793): Ortholog of  Ceres SEQ ID NO 12614157 as cited in SEQ ID NO 67965
aagatttgccttggcttgccgtgccctgcgggagccaagccaaggacggctagcgctcgccacgcgcgatgtccgggcttcctccggccgcgcgaccgctgctaccgtctccctgcgcctcttcctccgttgttcgggcgaaggcagcgtcggcatgctgctccagcctaaagcagtcgcgcccaggccgaagtgctgccgccccttccaccgtcgccgcgcgtcaggccgcgccgctcttggctgcggcgctcgtccttgtagcggcaccccctggcctgcctgctgctatctcaccagcatttgcacagcccagtttcagaaggcgcagcgctgttccggaaggcttgtattggttgccatgacatgggaggaaacattctacagccaggagccactcttttcctgaaggacctcgagagaaacggagttgccacggaggaggaactgtataacatcacatactatgggaaaggaagaatgcccggttttggagagaaatgcaccccaagaggacagtgcaccttcggcccccggctatcggaagacgacatcaagatcctagctttgtttgtcaagtcgcaagcccagaacgggtggccgaagattgagggggatggagattgatcaaactgaaaaaacgatgagaagacggtgcttgttagtcagatgaaaatggtgacgggaagatagtgtttgtatagtttaggaatctggtctttctgaacttgtaaccttttagtctctgtttctgaactgaacttgtaaccttctggtccgtgtttcagttttc

SEQ ID NO: 5164 - protein, 135 aa, Zea mays subsp. mays
  peptide (1)..(135): Ceres Seq. ID no. 12349702
RFALACRALREPSQGRLALATRDVRASSGRATAATVSLRLFLRCSGEGSVGMLLQPKAVAPRPKCCRPFHRRRASGRAALGCGARPCSGTPWPACCYLTSICTAQFQKAQRCSGRLVLVAMTWEETFYSQEPLFS

SEQ ID NO: 5165 - protein, 98 aa, Zea mays subsp. mays
  peptide (1)..(98): Ceres Seq. ID no. 12349703
MSGLPPAARPLLPSPCASSSVVRAKAASACCSSLKQSRPGRSAAAPSTVAARQAAPLLAAALVLVAAPPGLPAAISPAFAQPSFRRRSAVPEGLYWLP

SEQ ID NO: 5166 - protein, 86 aa, Zea mays subsp. mays
  peptide (1)..(86): Ceres Seq. ID no. 12349704
MGGNILQPGATLFLKDLERNGVATEEELYNITYYGKGRMPGFGEKCTPRGQCTFGPRLSEDDIKILALFVKSQAQNGWPKIEGDGD

SEQ ID NO: 5167 - protein, 84 aa, Zea mays subsp. mays
  peptide (1)..(84): Ceres Seq. ID no. 12349705
MLLQPKAVAPRPKCCRPFHRRRASGRAALGCGARPCSGTPWPACCYLTSICTAQFQKAQRCSGRLVLVAMTWEETFYSQEPLFS

SEQ ID NO: 5168 - DNA, 1435 bp, Zea mays subsp. mays
  misc_feature (1)..(1435): Ceres Seq. ID no. 12409675
  misc_feature (1)..(1435): Ortholog of  Ceres SEQ ID NO 14302255 as cited in SEQ ID NO 65021
atcatgcattcttcatggcgacggtgaccagtttgagcttctcaggcagctgcagacacgggccacgctatactgcccggccggcggccagttctcgtagtagtcagctacttaatgatcagctagctagagcatcgcggagattacaagtggcggcgggcatggcggtggcggcgttcccttcctgcggcgccttcgcccctccttgcctagtgagtacaaggagagccttctcctcggtggtggccatggcttccgcagccccggtgagagctcccagcaggaagcccttcgcccctcctcgcgaggtacaccgccccgtggcgcactcgctgcccccgcagaagcgggagatcttcgagtcgctcgagtcgtgggcggcggacaacatcctggtgctcctcaagcccgtggagaggtcctggcagccgcaggactacctgccggacgccgcctccgagtccttcgacgacgaggtccgggagctgcgagagcgcgcccgggagatccccgacgactacttcgtctgcttcgtgggcgacatggtcaccgaggaggcgctgccgacgtaccagaccatgctcaacaccctggacggcggcgtccgcgacgagaccggcgccagctcgaccagctgggcggtgtggaccagggcgtgggccgccgaggagaacaggcacggcgacctcatgaacaaatacctcttcctgacggggagggtggacatgaggcagatcgagaagaccgtccagtacctcatcgcctcagggatggatcccaagacggagacgaacccgtacatgggcttcgtctacacgtcgttccaggagcgcgccaccttcatctcccacggcaacacggcgcgccacgccaggcggtacggcgacaccaagctggcgcagatctgcggcacaatcgccgccgacgagaagcgccacgagtcggcgtacgagcggatcgtcgagaagctgttcgaggtggacccggactacacggtgcgcgccttcgcggacaccatgaggaagaaggtggccatgcccgcccacctcatgtacgacggccaggacgacgggctgttcgcgcgcttcagcgctgtcgcgcagcgcatcggtgtctacacggccagggactacgtcgacatcctcgagttcctggtccgccggtggggcgtccaggaactcacggggctgtccggggaaggccgccgcgcgcaggagttcgtgtgcgagctggggccccggttcaggaggctggaggagagggcgcacgacaacaaggccaaggatccggagttcgcgccattcagctggattcacgggcgccaggttcagctttgattaaagatgatgactgggggattcgccgactctctccgtcctcagatgatatgttgtactgtactagcatataactaagaattgattgaagttgctgt

SEQ ID NO: 5169 - protein, 444 aa, Zea mays subsp. mays
  peptide (1)..(444): Ceres Seq. ID no. 12409676
HAFFMATVTSLSFSGSCRHGPRYTARPAASSRSSQLLNDQLARASRRLQVAAGMAVAAFPSCGAFAPPCLVSTRRAFSSVVAMASAAPVRAPSRKPFAPPREVHRPVAHSLPPQKREIFESLESWAADNILVLLKPVERSWQPQDYLPDAASESFDDEVRELRERAREIPDDYFVCFVGDMVTEEALPTYQTMLNTLDGGVRDETGASSTSWAVWTRAWAAEENRHGDLMNKYLFLTGRVDMRQIEKTVQYLIASGMDPKTETNPYMGFVYTSFQERATFISHGNTARHARRYGDTKLAQICGTIAADEKRHESAYERIVEKLFEVDPDYTVRAFADTMRKKVAMPAHLMYDGQDDGLFARFSAVAQRIGVYTARDYVDILEFLVRRWGVQELTGLSGEGRRAQEFVCELGPRFRRLEERAHDNKAKDPEFAPFSWIHGRQVQL

SEQ ID NO: 5170 - protein, 440 aa, Zea mays subsp. mays
  peptide (1)..(440): Ceres Seq. ID no. 12409677
MATVTSLSFSGSCRHGPRYTARPAASSRSSQLLNDQLARASRRLQVAAGMAVAAFPSCGAFAPPCLVSTRRAFSSVVAMASAAPVRAPSRKPFAPPREVHRPVAHSLPPQKREIFESLESWAADNILVLLKPVERSWQPQDYLPDAASESFDDEVRELRERAREIPDDYFVCFVGDMVTEEALPTYQTMLNTLDGGVRDETGASSTSWAVWTRAWAAEENRHGDLMNKYLFLTGRVDMRQIEKTVQYLIASGMDPKTETNPYMGFVYTSFQERATFISHGNTARHARRYGDTKLAQICGTIAADEKRHESAYERIVEKLFEVDPDYTVRAFADTMRKKVAMPAHLMYDGQDDGLFARFSAVAQRIGVYTARDYVDILEFLVRRWGVQELTGLSGEGRRAQEFVCELGPRFRRLEERAHDNKAKDPEFAPFSWIHGRQVQL

SEQ ID NO: 5171 - protein, 391 aa, Zea mays subsp. mays
  peptide (1)..(391): Ceres Seq. ID no. 12409678
MAVAAFPSCGAFAPPCLVSTRRAFSSVVAMASAAPVRAPSRKPFAPPREVHRPVAHSLPPQKREIFESLESWAADNILVLLKPVERSWQPQDYLPDAASESFDDEVRELRERAREIPDDYFVCFVGDMVTEEALPTYQTMLNTLDGGVRDETGASSTSWAVWTRAWAAEENRHGDLMNKYLFLTGRVDMRQIEKTVQYLIASGMDPKTETNPYMGFVYTSFQERATFISHGNTARHARRYGDTKLAQICGTIAADEKRHESAYERIVEKLFEVDPDYTVRAFADTMRKKVAMPAHLMYDGQDDGLFARFSAVAQRIGVYTARDYVDILEFLVRRWGVQELTGLSGEGRRAQEFVCELGPRFRRLEERAHDNKAKDPEFAPFSWIHGRQVQL

SEQ ID NO: 5172 - DNA, 1240 bp, Zea mays subsp. mays
  misc_feature (1)..(1240): Ceres Seq. ID no. 12352706
  misc_feature (1)..(1240): Ortholog of  Ceres SEQ ID NO 14313955 as cited in SEQ ID NO 54407
actacaggtctacagctcccgcccagcatcatggccttccattccccaatctagggttgctgagctccccaccaccgccggtcatgcccgacgcggatgttgacaccgtgattcgcgaagccgccgcggccgcggccccagcccgacgacgacagcgagggtgacaccgaggaagaggaggaggagggggacgaggtcgacgaggacgaggacgacgacgaggaggagttacccgccgaggcgccggcgccggacgaggagcaacctgccccagcgcccatctcgaccttgccggggaatccaaaccagctgacgctggtcttccagggcgaggtttacgttttcgaatccgtcacccccgagaaggttcaagctgtgctgctacttttaggacgtggtgaactaccacctggtttagctggcatggttttacccaatcaaaatgacaacaagggctatgacgatatacttcagaggacagacattccagcaaaaagggttgcttcactaattaggttccgtgagaaaaggaaggaaagaaattttgataagaaaatacgttatgctgttcgcaaagaagtggcactcaggatgcagcgtcggaaggggcaatttgctggaagagccagtctggagggagaatctccagctcctggatgtgatcctggttctcagggctcaggcctagattttgcatctcgagaatcaatgtgccagaactgtggtactagtgaaaaaatgaccccagcaatgcgtcgtggtccagcgggtccaaggactttgtgcaatgcttgtggattgatgtgggcaaacaagggtaccctgagaagttgccccagggcaaaagttgaatctcctgcggttgcaactgagcagggaacaagtgacaacaaagccctggcaacactgaataataacaatgttgctgcaagcaatggcgaagccacaagtgcagcagagaaaggagtgccaaaggcgccgtgacagtatatagacattattgtcagagacaaagatttcggattctttgcctatagctagacaagacaccccgttagaaatatttgataatgattgtcatcaagtgtacattcattcttgcttgacagtgttagacgtgtaattaatataagctgtccgattgtgtaaacagtaaacccatatggcatctgttgtgttacaacttacactttctaactttcttcattctcataacatcatgatcaaagattcgatgctt

SEQ ID NO: 5173 - protein, 186 aa, Zea mays subsp. mays
  peptide (1)..(186): Ceres Seq. ID no. 12352707
MVLPNQNDNKGYDDILQRTDIPAKRVASLIRFREKRKERNFDKKIRYAVRKEVALRMQRRKGQFAGRASLEGESPAPGCDPGSQGSGLDFASRESMCQNCGTSEKMTPAMRRGPAGPRTLCNACGLMWANKGTLRSCPRAKVESPAVATEQGTSDNKALATLNNNNVAASNGEATSAAEKGVPKAP

SEQ ID NO: 5174 - protein, 130 aa, Zea mays subsp. mays
  peptide (1)..(130): Ceres Seq. ID no. 12352708
MQRRKGQFAGRASLEGESPAPGCDPGSQGSGLDFASRESMCQNCGTSEKMTPAMRRGPAGPRTLCNACGLMWANKGTLRSCPRAKVESPAVATEQGTSDNKALATLNNNNVAASNGEATSAAEKGVPKAP

SEQ ID NO: 5175 - DNA, 1064 bp, Zea mays subsp. mays
  misc_feature (1)..(1064): Ceres Seq. ID no. 12355457
  misc_feature (1)..(1064): Ortholog of  Ceres SEQ ID NO 13595808 as cited in SEQ ID NO 50995
  misc_feature (1)..(1064): Ortholog of  Ceres SEQ ID NO 12609096 as cited in SEQ ID NO 52019
  misc_feature (1)..(1064): Ortholog of  Ceres SEQ ID NO 15177207 as cited in SEQ ID NO 58287
  misc_feature (1)..(1064): Ortholog of  Ceres SEQ ID NO 15178854 as cited in SEQ ID NO 0
aacaaccccggcctgccatgtgccacaaccgtagcctgtagcttcatccgttgcgctgcgcccggttccctcgcgcggtgcggaatttaacatggccgtgccggaggtggtggtcgacggcgtcgtcttcccgccggtggcccgcccgccgggctccgccggctcgcacttcctcggcggcgcaggcgtgcgaggcgtcgagatcggaggcaacttcatcaagttcacggccatcggcgtgtacctggaggacgcggccgtgcccgcgctggccaagaagtggggcggcaagacggccgacgagctcgcctccgacgccgccttcttccgcgacgtcgtcacgggcgacttcgagaagttcacgagggtgacgatgatcctcccgctgacgggcgagcagtacgcggagaaagtgacggagaactgcgtggcgttctggaaggccgccggcctgtacacggacgccgagggcgtcgccgtggagaagttcagggaggtgttcaagccagagactttcgcgccgggcgcctccatcctcttcacgcactcgcccgccggagtcctcaccgtcgccttctccaaggactcgtcggtgccagcggccggcggcgtggcgatcgagaacaagcgcctctgcgaggccgtgctggagtccatcatcggggagcgcggcgtgtcgccggccgcgaagctgagcctcgccgcgagggtgtcggagctcctcgccaaggagaccgccgcggccgccgacgcgccgcaggcggagcccgtctccatcaccgcctgaggcgaggagcgggcgggcgggcgagcgaacgaaccgcgaggagaaaaaaagcaaccagacggttgggcggcacggcgtctcacacctgccgcctgcgcttgcgtgctccggagtccggactggagagacgccgcgcgggtgcagtgcatccgtcgcgtcttgtctgtccgcgctatggcgtcgtgttcctgcctttctggtcgcgtagttgtcttgtgttcgctgttggtcgttctgggtaacatttgaataaaacaagcggatttgttgcacttgc

SEQ ID NO: 5176 - protein, 231 aa, Zea mays subsp. mays; identical to SEQ ID NO: 4436
  peptide (1)..(231): Ceres Seq. ID no. 12355458

SEQ ID NO: 5177 - protein, 137 aa, Zea mays subsp. mays; identical to SEQ ID NO: 4437
  peptide (1)..(137): Ceres Seq. ID no. 12355459

SEQ ID NO: 5178 - DNA, 1343 bp, Zea mays subsp. mays
  misc_feature (1)..(1343): Ceres Seq. ID no. 12376422
  misc_feature (1)..(1343): Ortholog of  Ceres SEQ ID NO 14304842 as cited in SEQ ID NO 54198
  misc_feature (1)..(1343): Ortholog of  Ceres SEQ ID NO 14308683 as cited in SEQ ID NO 58723
aggccagcacaaaaccactcgatagaaaagcccccctcaaaacccacggcgccgccgcagccgcgttcacgaagcttggggaggcgagcaccccgatccggcgaggtgccgcgagcgaggcagcgatgagaggccgtgcgtcccatctccgcgcgctcctctcgcgagcgctctctccaagccttcctcctcctggtcgcgctctgcctcaggtcactaggcccggtgcgtctccgttcggagctggattcgtggggcgcgcgcgcttcttctccatcgacgcctcggctgcgacgcagggcgggtcgaagccccctgcgccgccgccggcgggtactgcgggcggcgagggagggggtggtggtcagtctgggaaatctgaacaagcggacgccgggaaagccgtccgcggagggccggtgtcttggctcagttttctactcctgcttgtgactggaggagggataatcgtgtactacgacaaagaaaagaagcgtcacattgaagaattgaagaatagaacaagtgctgtgaagcctggacaatcagtaggcactgcagccattggcggtccattcaagcttttgaatcatgatggaaaacctgttactgaaaaggatttcttgggcaaatggacgctgctttattttggatttacacactgtcctgacatttgtccagatgaactccagaaaatggctgcagcgattgacaaaattaaggaaaaggcaaaactggatgttgtgccagtttttattacagttgatcctgaaagagatactgttgagcaggttcgggactatgttaaagagttccatccagatctagtaggcctcacgggcacgacagatgaagtaagacaagttgcacgtgcttatcgagtttactatatgaagacagaggaggagggttctgactaccttgttgatcactcaattgtcatgtacctgatggacccagagatgaagtttgtcaagttttatggcaagaactacgacacagattcccttgctgacggtatcgttaaagaaattaaagagcacaagtaaacagtagttggaatgccactttgcaacgtcagccttgtttctgaatttctcccgagagttttgttaaatcaagcaaaaaccaaatggcacacgagatcatgtggcaatagctgatgacatttgaatctcgcggcggcttttatttcagcagattcgggtgcacatgttgcggttttgtgcacgtttttgtcacggcaaacttctgcgttattagcttgggacgctgttcattgctgaatgtaattttatttgcatagtttcataccagttcaatatgaaacctttttccccttc

SEQ ID NO: 5179 - protein, 348 aa, Zea mays subsp. mays
  peptide (1)..(348): Ceres Seq. ID no. 12376423
ASTKPLDRKAPLKTHGAAAAAFTKLGEASTPIRRGAASEAAMRGRASHLRALLSRALSPSLPPPGRALPQVTRPGASPFGAGFVGRARFFSIDASAATQGGSKPPAPPPAGTAGGEGGGGGQSGKSEQADAGKAVRGGPVSWLSFLLLLVTGGGIIVYYDKEKKRHIEELKNRTSAVKPGQSVGTAAIGGPFKLLNHDGKPVTEKDFLGKWTLLYFGFTHCPDICPDELQKMAAAIDKIKEKAKLDVVPVFITVDPERDTVEQVRDYVKEFHPDLVGLTGTTDEVRQVARAYRVYYMKTEEEGSDYLVDHSIVMYLMDPEMKFVKFYGKNYDTDSLADGIVKEIKEHK

SEQ ID NO: 5180 - protein, 307 aa, Zea mays subsp. mays
  peptide (1)..(307): Ceres Seq. ID no. 12376424
MRGRASHLRALLSRALSPSLPPPGRALPQVTRPGASPFGAGFVGRARFFSIDASAATQGGSKPPAPPPAGTAGGEGGGGGQSGKSEQADAGKAVRGGPVSWLSFLLLLVTGGGIIVYYDKEKKRHIEELKNRTSAVKPGQSVGTAAIGGPFKLLNHDGKPVTEKDFLGKWTLLYFGFTHCPDICPDELQKMAAAIDKIKEKAKLDVVPVFITVDPERDTVEQVRDYVKEFHPDLVGLTGTTDEVRQVARAYRVYYMKTEEEGSDYLVDHSIVMYLMDPEMKFVKFYGKNYDTDSLADGIVKEIKEHK

SEQ ID NO: 5181 - DNA, 1042 bp, Zea mays subsp. mays
  misc_feature (1)..(1042): Ceres Seq. ID no. 12435100
  misc_feature (1)..(1042): Ortholog of  Ceres SEQ ID NO 13638835 as cited in SEQ ID NO 52005
  misc_feature (1)..(1042): Ortholog of  Ceres SEQ ID NO 12614289 as cited in SEQ ID NO 68735
  misc_feature (1)..(1042): Ortholog of  Ceres SEQ ID NO 14309007 as cited in SEQ ID NO 0
aagaaaaagccccaaatacacagcctaggcccaccaattcggacacgctcacacgccagagaagagagaggaaaggaacccaacacactctctcgcgcggcaagagcttcccggcccgaaaccgaaagcaccaccaatctctgcgtttttcgtctgcngcggcggcggcggcagcagcggaggaggtggacgagatgctgtccgccgacatccccccaaaccagaccatctacctcaacaacctcaacgagaaggtcaagaaagaagagttgaagagatcgctttatgccctgtgctcgcagtatggaaggatactggatgtggtggctctgaaaacacagaaactgagagggcaggcatgggtggtgtttagcgagattacagctgctaccaatgctttccgtggattgcaagactttgatttctacggcaaaaaaatgcgagtacaatatgcaaaaacaaaatcagactgtattgcaaaagaagatggtacttatgcacctaaggagaaaaggaagaagcaagaggagaaagctgctgagaaaaaacgacgagcagaagaggcacagcaagctggccccaatgctgctgctgctcaaagcaatggaactggctatcaagcgtctcgtctgggcaaggcttcgcaggagccacctgctcctccgaacaacatcctcttcatccagaacttgccagaccagaccacgagcatgatgctccagatcctgttccagcagtatcccggcttccgggaagtccggatgatcgaagccaaaccaggcattgcctttgtggagttcgaggacgacggccagtccatggtggcgatgcaggctctccagggcttcaagatcaccccggagaaccccatggctatatcctatgccaaaaaatgagaaccctcgcggaatccctgtacccaatacccataatattttccgttccgccttccggaatcgagccacagtatctagtctactttccggccatgtatttttggaaagcacttgcttaatttagaagttagactcttgccactttc

SEQ ID NO: 5182 - protein, 297 aa, Zea mays subsp. mays
  peptide (1)..(297): Ceres Seq. ID no. 12435101
  misc_feature (52)..(52): Xaa is any aa, unknown or other
EKAPNTQPRPTNSDTLTRQRRERKGTQHTLSRGKSFPARNRKHHQSLRFSSXAAAAAAAEEVDEMLSADIPPNQTIYLNNLNEKVKKEELKRSLYALCSQYGRILDVVALKTQKLRGQAWVVFSEITAATNAFRGLQDFDFYGKKMRVQYAKTKSDCIAKEDGTYAPKEKRKKQEEKAAEKKRRAEEAQQAGPNAAAAQSNGTGYQASRLGKASQEPPAPPNNILFIQNLPDQTTSMMLQILFQQYPGFREVRMIEAKPGIAFVEFEDDGQSMVAMQALQGFKITPENPMAISYAKK

SEQ ID NO: 5183 - protein, 233 aa, Zea mays subsp. mays
  peptide (1)..(233): Ceres Seq. ID no. 12435102
MLSADIPPNQTIYLNNLNEKVKKEELKRSLYALCSQYGRILDVVALKTQKLRGQAWVVFSEITAATNAFRGLQDFDFYGKKMRVQYAKTKSDCIAKEDGTYAPKEKRKKQEEKAAEKKRRAEEAQQAGPNAAAAQSNGTGYQASRLGKASQEPPAPPNNILFIQNLPDQTTSMMLQILFQQYPGFREVRMIEAKPGIAFVEFEDDGQSMVAMQALQGFKITPENPMAISYAKK

SEQ ID NO: 5184 - protein, 152 aa, Zea mays subsp. mays
  peptide (1)..(152): Ceres Seq. ID no. 12435103
MRVQYAKTKSDCIAKEDGTYAPKEKRKKQEEKAAEKKRRAEEAQQAGPNAAAAQSNGTGYQASRLGKASQEPPAPPNNILFIQNLPDQTTSMMLQILFQQYPGFREVRMIEAKPGIAFVEFEDDGQSMVAMQALQGFKITPENPMAISYAKK

SEQ ID NO: 5185 - DNA, 1346 bp, Zea mays subsp. mays
  misc_feature (1)..(1346): Ceres Seq. ID no. 12373672
  misc_feature (1)..(1346): Ortholog of  Ceres SEQ ID NO 12562983 as cited in SEQ ID NO 53309
  misc_feature (1)..(1346): Ortholog of  Ceres SEQ ID NO 14309224 as cited in SEQ ID NO 0
aaacatagaggcattccgcagtccgcagtccatccgcagtccgcagtccgcacgcacggacgcgccctcccagatctcccgcctccggcaaacaaaatgcccccactctcaccgcccgcatcgctgacccccgctgctggcggtcggcgacggtggaagtgccgcctcagtcccactatcgcacgtgaccgctgctacactcgctccttccgctccgcggggctccgcccggcggccattccgctccccgatggcgccgtctgtacacctgtggctcccgcctcctgccgccgaccccgccaagcccctataccctgttctgcttctccacggcttcggcgcacaagccacctggcagtgggcgcccttcctcggcccgctcctcgctgccggtctggccccctatgtcccggacctcgtcttctttggcgcctcatcctcccccgcagcagaccgctccccggtctatcaggctgcctgtgttgccgccgctatggccgcgcttcctggcgccccgcagcggtacgccgtcgtcggggtcagttacggcggcttcgtagcataccacctcgcccacgcgtttccggcagcggtggagcggcttgtactagtcgcggccggtgtttgcctcgaggaggccgatctggccgcggggctctttgccgttgaggatatcgccgaggctgcaagtcttttgctgccccagcggccggaggatctccggaggttggtggggctcaccttctgccgccctcagcggttcatgccgtcctgtttcatcagagattacatcagggttatgtgcacggaaaatgtaaaagagaagagggagttgctgtatgcattgatcaatggcaggaagctttcagaccttcctaaaattaaccagcaaaccttgataatttggggagagcaggaccgggtctttccattggaacttggattacggctgaaaaggcatctgggtgatacttccgaactaatcattgtcaagaatgccggtcatgccataaatcgcgaaaagccagcagaactttgcagactgataaagcactacatcgttgatccctcagtcaaatgtcgagatgaccgtaagggatcttggaagaatgcgataaagaggtttgttgggtcgagcctgaggaaggtggactcttctcgaccgctgctatagcaattgacgtatatatattgacttttacgtgcagcagatttgttatctgattgtgacacgcaattaagtaattaacgatgtgtaatgtccagtagccactattattgtgtaactagcattggcagacatctgttcaaaaaatacttgtgcaatatgtataatgcaaatgatt

SEQ ID NO: 5186 - protein, 307 aa, Zea mays subsp. mays
  peptide (1)..(307): Ceres Seq. ID no. 12373673
MAPSVHLWLPPPAADPAKPLYPVLLLHGFGAQATWQWAPFLGPLLAAGLAPYVPDLVFFGASSSPAADRSPVYQAACVAAAMAALPGAPQRYAVVGVSYGGFVAYHLAHAFPAAVERLVLVAAGVCLEEADLAAGLFAVEDIAEAASLLLPQRPEDLRRLVGLTFCRPQRFMPSCFIRDYIRVMCTENVKEKRELLYALINGRKLSDLPKINQQTLIIWGEQDRVFPLELGLRLKRHLGDTSELIIVKNAGHAINREKPAELCRLIKHYIVDPSVKCRDDRKGSWKNAIKRFVGSSLRKVDSSRPLL

SEQ ID NO: 5187 - protein, 226 aa, Zea mays subsp. mays
  peptide (1)..(226): Ceres Seq. ID no. 12373674
MAALPGAPQRYAVVGVSYGGFVAYHLAHAFPAAVERLVLVAAGVCLEEADLAAGLFAVEDIAEAASLLLPQRPEDLRRLVGLTFCRPQRFMPSCFIRDYIRVMCTENVKEKRELLYALINGRKLSDLPKINQQTLIIWGEQDRVFPLELGLRLKRHLGDTSELIIVKNAGHAINREKPAELCRLIKHYIVDPSVKCRDDRKGSWKNAIKRFVGSSLRKVDSSRPLL

SEQ ID NO: 5188 - protein, 222 aa, Zea mays subsp. mays
  peptide (1)..(222): Ceres Seq. ID no. 12373675
KHRGIPQSAVHPQSAVRTHGRALPDLPPPANKMPPLSPPASLTPAAGGRRRWKCRLSPTIARDRCYTRSFRSAGLRPAAIPLPDGAVCTPVAPASCRRPRQAPIPCSASPRLRRTSHLAVGALPRPAPRCRSGPLCPGPRLLWRLILPRSRPLPGLSGCLCCRRYGRASWRPAAVRRRRGQLRRLRSIPPRPRVSGSGGAACTSRGRCLPRGGRSGRGALCR

SEQ ID NO: 5189 - DNA, 1932 bp, Zea mays subsp. mays
  misc_feature (1)..(1932): Ceres Seq. ID no. 13637288
  misc_feature (1)..(1932): Ortholog of  Ceres SEQ ID NO 13596021 as cited in SEQ ID NO 62020
aaaaaggggaaaaaaaggagagagaacacacacacacacaaaccccaatcccctgcggcggcgatggacccgtcatcggcgggctccggcggcaactccctcccgtccgtcggccccgacgggcagaagcggcgcgtgtgctacttctacgacccggatgtgggcaactactactacgggcagggccatccgatgaagccgcaccgcatccggatgacgcactcgctgctggcgcgctacggcctcctcaaccagatgcaggtgtaccgccccaacccggcccgcgaccgcgacctctgccgcttccacgccgacgactacatcaacttcctgcgctccgtcacgccggaaacgcagcaggaccagatccgcctgctcaagcgcttcaacgtcggcgaggactgccccgtcttcgacggcctctacagcttctgccagacctatgcgggcgcctccgtcggcggggccgtcaagctcaaccacggccatgacatcgcaatcaactggtcggggggcctgcaccacgccaagaagtgcgaggcgtcgggcttctgctacgtcaatgacatcgtgctcgccatactcgagctgctcaagcatcacgagagagttctgtatgtcgatatcgatatccaccatggtgatggagtggaggaggctttctacacaacagatagggttatgactgtctcgttccacaagtttggtgattatttcccaggaacaggggatatccgtgacattgggcactcaaaagggaagtactactccctgaatgtccctctagatgatgggattgatgatgaaagctaccagtccctttttaagccaatcatgggcaaagttatggaggttttccgccctggtgcagttgtgcttcagtgtggtgctgattccttgtctggggataggttgggctgcttcaacctctcaatcaaaggtcatgcggaatgtgttaggtatatgaggtctttcaacgttccattgttgctccttggtggtggtggatataccataagaaatgttgcacgctgttggtgttatgagactggagttgctcttggccaagagcctgaagacaagatgcctgttaatgagtactatgaatacttcggtccagattacactcttcatgttgcaccaagtaacatggagaacaaaaatacacgacaacaactggatgatatacgatctaaacttctggataatctttcaaaacttcgacatgctcctagtgtccactttcaagagagagttcctgacacagaaatacctgagcaagatgaagatcaagatgatccagatgaacgacatgatcctgactctgatatggaagtggatgaccacaaggctgtggaagagtcatcgaggaggagcattctaggtataaaaatcaagagagaatttggtgaaaatgcgaccagagtacaggatggtggcagggttgcatctgaacatagaggactggaacccatggcagaagacattggttcctccaagcaagctcctcaggcagatgccagtgcaatggccatcgatgaaccaagcaatgtcaagaatgaacctgagagctcaactaaattgcaaggccaagcagctgcgtaccacaagccatagctgcgaccatcaagagttgctgggtttctgctaggcaacttcctgcttgatttggacagtccagaaaacagaagtgaatccgcaatacgtccctgccatttcaaatttgacttggttacacctatctgtgacaatgttaatgtaatgagatcccatggcactagtgaagttcccaggtgtccacctgggattgcttgcggttgagagagacgatagtctgatgacccatgtatacatgaagcccatgatctcagttgtacagtcattagccaatacaaatatgcagtggactaaagggtgattcattgcgtgttc

SEQ ID NO: 5190 - protein, 538 aa, Zea mays subsp. mays
  peptide (1)..(538): Ceres Seq. ID no. 13637289
KKGKKRRENTHTHKPQSPAAAMDPSSAGSGGNSLPSVGPDGQKRRVCYFYDPDVGNYYYGQGHPMKPHRIRMTHSLLARYGLLNQMQVYRPNPARDRDLCRFHADDYINFLRSVTPETQQDQIRLLKRFNVGEDCPVFDGLYSFCQTYAGASVGGAVKLNHGHDIAINWSGGLHHAKKCEASGFCYVNDIVLAILELLKHHERVLYVDIDIHHGDGVEEAFYTTDRVMTVSFHKFGDYFPGTGDIRDIGHSKGKYYSLNVPLDDGIDDESYQSLFKPIMGKVMEVFRPGAVVLQCGADSLSGDRLGCFNLSIKGHAECVRYMRSFNVPLLLLGGGGYTIRNVARCWCYETGVALGQEPEDKMPVNEYYEYFGPDYTLHVAPSNMENKNTRQQLDDIRSKLLDNLSKLRHAPSVHFQERVPDTEIPEQDEDQDDPDERHDPDSDMEVDDHKAVEESSRRSILGIKIKREFGENATRVQDGGRVASEHRGLEPMAEDIGSSKQAPQADASAMAIDEPSNVKNEPESSTKLQGQAAAYHKP

SEQ ID NO: 5191 - protein, 517 aa, Zea mays subsp. mays
  peptide (1)..(517): Ceres Seq. ID no. 13637290
MDPSSAGSGGNSLPSVGPDGQKRRVCYFYDPDVGNYYYGQGHPMKPHRIRMTHSLLARYGLLNQMQVYRPNPARDRDLCRFHADDYINFLRSVTPETQQDQIRLLKRFNVGEDCPVFDGLYSFCQTYAGASVGGAVKLNHGHDIAINWSGGLHHAKKCEASGFCYVNDIVLAILELLKHHERVLYVDIDIHHGDGVEEAFYTTDRVMTVSFHKFGDYFPGTGDIRDIGHSKGKYYSLNVPLDDGIDDESYQSLFKPIMGKVMEVFRPGAVVLQCGADSLSGDRLGCFNLSIKGHAECVRYMRSFNVPLLLLGGGGYTIRNVARCWCYETGVALGQEPEDKMPVNEYYEYFGPDYTLHVAPSNMENKNTRQQLDDIRSKLLDNLSKLRHAPSVHFQERVPDTEIPEQDEDQDDPDERHDPDSDMEVDDHKAVEESSRRSILGIKIKREFGENATRVQDGGRVASEHRGLEPMAEDIGSSKQAPQADASAMAIDEPSNVKNEPESSTKLQGQAAAYHKP

SEQ ID NO: 5192 - protein, 474 aa, Zea mays subsp. mays
  peptide (1)..(474): Ceres Seq. ID no. 13637291
MKPHRIRMTHSLLARYGLLNQMQVYRPNPARDRDLCRFHADDYINFLRSVTPETQQDQIRLLKRFNVGEDCPVFDGLYSFCQTYAGASVGGAVKLNHGHDIAINWSGGLHHAKKCEASGFCYVNDIVLAILELLKHHERVLYVDIDIHHGDGVEEAFYTTDRVMTVSFHKFGDYFPGTGDIRDIGHSKGKYYSLNVPLDDGIDDESYQSLFKPIMGKVMEVFRPGAVVLQCGADSLSGDRLGCFNLSIKGHAECVRYMRSFNVPLLLLGGGGYTIRNVARCWCYETGVALGQEPEDKMPVNEYYEYFGPDYTLHVAPSNMENKNTRQQLDDIRSKLLDNLSKLRHAPSVHFQERVPDTEIPEQDEDQDDPDERHDPDSDMEVDDHKAVEESSRRSILGIKIKREFGENATRVQDGGRVASEHRGLEPMAEDIGSSKQAPQADASAMAIDEPSNVKNEPESSTKLQGQAAAYHKP

SEQ ID NO: 5193 - DNA, 1105 bp, Zea mays subsp. mays
  misc_feature (1)..(1105): Ceres Seq. ID no. 12343379
  misc_feature (1)..(1105): Ortholog of  Ceres SEQ ID NO 15177100 as cited in SEQ ID NO 51752
  misc_feature (1)..(1105): Ortholog of  Ceres SEQ ID NO 14314737 as cited in SEQ ID NO 56852
  misc_feature (1)..(1105): Ortholog of  Ceres SEQ ID NO 13595748 as cited in SEQ ID NO 57649
  misc_feature (1)..(1105): Ortholog of  Ceres SEQ ID NO 14314651 as cited in SEQ ID NO 59944
agcccaaaatcaattcggatccgcctccatggctgccgcttcgcagctcctctctctgttcttcctcctcctcctccctgcttgtgatgccatctactgcgacgaagacgactgctacgacctcctaggggttaagcaggacgcgaacgcgtcagacatcaagaaagcgtactacaagctctctctcaaacaccacccggacaagaatcccgatccggagtcgcggaagctcttcgtcaagatcgccaatgcttacgagattctgaaggatgaatccactagggcgcagtatgactttgccattgaacatccggaggaggttttctataacacagctcagtactatagggcatactatggacataaaacggatcctcgtgcagtgttgattggtcttcttctaattgtttcagcatttcaatacattaatcagctaacgaggtataaccaggccatgaaaagtgtcaagcaaactcctgcttacaaaaataggttaaaagctttggagtatgagcgaacaggaggaattgctagcaaaaagaagggcatcaagcaggtggataagaaagttgaagaagagctaagtaatgaagttgaattgcaaattcatggggttgaaaaaccgtctgtttggaggctgtttggtgtccaatttatactttggccttactctgttggcaaggcgcttacttggaagatttgttggttttggagataccgggtaaagaaattaccatatacatgggaggatgcttgctacttgacctggatttcactccaaatacctgcgaatgcatggaaaaatatggatgagtccaggaaggaggaccttgtgagaagacacctctgggaaaagagcaacatggagaggtatacttcagggacgaggaaggaaccaaagcgtaggaggtagctgtgcaacatttttgacctgagactacagcaactttaaacaatacaacatactcctatattggagtgaaaagttattgaccaggcttgagttcaccgatagctaattgctagggtccccgggaagtggcatggctaaggaatcatgtttggaggacaattcatgtaataaagtgatcaaggcgacttttgc

SEQ ID NO: 5194 - protein, 303 aa, Zea mays subsp. mays
  peptide (1)..(303): Ceres Seq. ID no. 12343380
AQNQFGSASMAAASQLLSLFFLLLLPACDAIYCDEDDCYDLLGVKQDANASDIKKAYYKLSLKHHPDKNPDPESRKLFVKIANAYEILKDESTRAQYDFAIEHPEEVFYNTAQYYRAYYGHKTDPRAVLIGLLLIVSAFQYINQLTRYNQAMKSVKQTPAYKNRLKALEYERTGGIASKKKGIKQVDKKVEEELSNEVELQIHGVEKPSVWRLFGVQFILWPYSVGKALTWKICWFWRYRVKKLPYTWEDACYLTWISLQIPANAWKNMDESRKEDLVRRHLWEKSNMERYTSGTRKEPKRRR

SEQ ID NO: 5195 - protein, 294 aa, Zea mays subsp. mays
  peptide (1)..(294): Ceres Seq. ID no. 12343381
MAAASQLLSLFFLLLLPACDAIYCDEDDCYDLLGVKQDANASDIKKAYYKLSLKHHPDKNPDPESRKLFVKIANAYEILKDESTRAQYDFAIEHPEEVFYNTAQYYRAYYGHKTDPRAVLIGLLLIVSAFQYINQLTRYNQAMKSVKQTPAYKNRLKALEYERTGGIASKKKGIKQVDKKVEEELSNEVELQIHGVEKPSVWRLFGVQFILWPYSVGKALTWKICWFWRYRVKKLPYTWEDACYLTWISLQIPANAWKNMDESRKEDLVRRHLWEKSNMERYTSGTRKEPKRRR

SEQ ID NO: 5196 - protein, 152 aa, Zea mays subsp. mays
  peptide (1)..(152): Ceres Seq. ID no. 12343382
MKSVKQTPAYKNRLKALEYERTGGIASKKKGIKQVDKKVEEELSNEVELQIHGVEKPSVWRLFGVQFILWPYSVGKALTWKICWFWRYRVKKLPYTWEDACYLTWISLQIPANAWKNMDESRKEDLVRRHLWEKSNMERYTSGTRKEPKRRR

SEQ ID NO: 5197 - DNA, 1195 bp, Zea mays subsp. mays
  misc_feature (1)..(1195): Ceres Seq. ID no. 12409665
  misc_feature (1)..(1195): Ortholog of  Ceres SEQ ID NO 14308359 as cited in SEQ ID NO 55097
  misc_feature (1)..(1195): Ortholog of  Ceres SEQ ID NO 15169195 as cited in SEQ ID NO 55200
  misc_feature (1)..(1195): Ortholog of  Ceres SEQ ID NO 15226540 as cited in SEQ ID NO 58479
  misc_feature (1)..(1195): Ortholog of  Ceres SEQ ID NO 13581611 as cited in SEQ ID NO 59028
  misc_feature (1)..(1195): Ortholog of  Ceres SEQ ID NO 14301693 as cited in SEQ ID NO 69246
cgcgactcgcgagcggcaattggacgcatcgcatcggatctcttcctccggtcttctctgacctctgggcctctgactccgcgcccacaccgccactgcctctggcctccagccacctcccgatctggccgagctcgcctccccggaggcggcgcatggatcccgcctcgtcggtggccgccgagttttggcggccgccgtaccaccacctccgggcctcgtccgtcgtcaccgccgccgcccgctccgggggcggctccagcagccgcaggagaccgcggcgcgacgccgcggcgtcgtccgaggaggagccgtccaagctcgtttccacgtcgggcaccgccgccagcagcagcgcgggctgccaggactcggctgacccagaagcaaaacggttgaaacagatagcacctagtgaaaaaaatgacagaaggacagaagctgaaacaaattcagggaacgctagcaagtctgctgataaaaagcctgcacctaaagagccaccaaaagactacatccatgtgagggctagaagaggtcaagcaacggacagccatagcctcgcagaaagagcacgacgagagaagataagtgaacggatgaaagttcttcaagatattgtccctggatgcaacaaggttatcgggaaagcatcagtccttgatgagataataaattacatccagtctttacagcgtcaagtagagtttttgtccatgaaacttgaagcgattaatgctcatgtgagcaatgcaactgtagcttttccaaccaaagattttggtgttgcgccatataatactgctcctagcctgacgttggacccacaaacgccaagggaatacgcccagggctcgatgtcagattggcttcacatgcaggtcggcaacgcatatgaaagagtgacatgaataaaacgaggaatccataaaacaagctgaattccttgtggtagccaataaagagtaccaggatcaaccgagttcacagtaccaggttcattttcttcttcttctcgtggtcatcgtgacgccaaagttagtttattttattcctagtttgggggcattagcgccgtagatgcgtcattccacatccatctaggagggagcactgtcgtttactgtatacggatttcgtgatgtatcccgggaaatttttgtagatcggactcgtagaagaagagattgcaatt

SEQ ID NO: 5198 - protein, 302 aa, Zea mays subsp. mays
  peptide (1)..(302): Ceres Seq. ID no. 12409666
RLASGNWTHRIGSLPPVFSDLWASDSAPTPPLPLASSHLPIWPSSPPRRRRMDPASSVAAEFWRPPYHHLRASSVVTAAARSGGGSSSRRRPRRDAAASSEEEPSKLVSTSGTAASSSAGCQDSADPEAKRLKQIAPSEKNDRRTEAETNSGNASKSADKKPAPKEPPKDYIHVRARRGQATDSHSLAERARREKISERMKVLQDIVPGCNKVIGKASVLDEIINYIQSLQRQVEFLSMKLEAINAHVSNATVAFPTKDFGVAPYNTAPSLTLDPQTPREYAQGSMSDWLHMQVGNAYERVT

SEQ ID NO: 5199 - protein, 251 aa, Zea mays subsp. mays
  peptide (1)..(251): Ceres Seq. ID no. 12409667
MDPASSVAAEFWRPPYHHLRASSVVTAAARSGGGSSSRRRPRRDAAASSEEEPSKLVSTSGTAASSSAGCQDSADPEAKRLKQIAPSEKNDRRTEAETNSGNASKSADKKPAPKEPPKDYIHVRARRGQATDSHSLAERARREKISERMKVLQDIVPGCNKVIGKASVLDEIINYIQSLQRQVEFLSMKLEAINAHVSNATVAFPTKDFGVAPYNTAPSLTLDPQTPREYAQGSMSDWLHMQVGNAYERVT

SEQ ID NO: 5200 - DNA, 923 bp, Zea mays subsp. mays
  misc_feature (1)..(923): Ceres Seq. ID no. 12349077
  misc_feature (1)..(923): Ortholog of  Ceres SEQ ID NO 15174297 as cited in SEQ ID NO 0
atacgccttttctgctgccgctgcatcttccactcgcgtcaagaaacgaaacccagctgcaccagcaacttctgccagcagacccaacgaccgaagcttttttttccctttcttttcatcgccgccgctcggggttcaaggttcagcgcgtccccgaatgacgggcacgtacgaggcctccgaccgtcctcctcctcccaactccgccggccaccggaccgacaaagtccggcggaagcggctgacggcgcagaagaggaaagagatcaaggaggcgttcgacctcttcgacatcgacggctccggcaccatcgatgcaagggagctgaacgtcgcgatgagagcccttggattcgagatgacaccggagcaaatcgggcagatgatcgcggaggtggacaaggacggcagcggcaccatcgacttcgacgagttcgtgcacatgatgacggacaagatgggcgagcgggacgcccgggacgagctgcacaaggcgttccgcatcatcgaccaggacgccaacggaaagatctcggacatggacatccagcggctggccatcgagaccggcgagcacttcacgctcgacgaggtccgggagatgatagaggccgccgacgaggacggcgacggcgagatcgacctggaggagttcatgaagatgatgaagcggacagactttggctctgggttctagtagtcacaggcaagccaatcccaacatacatccccatcggtgaaaaatacatatcacctacgctacatatgactggagtattgggatttatttgagaaataatggcgtacacacaccatacatcatagtgtactaactactgtaatatatgtgtagtgctgtccatgtacatcctagctagctacggcttgtgtatttacctacacgtaatgaaacacatattact

SEQ ID NO: 5201 - protein, 263 aa, Zea mays subsp. mays
  peptide (1)..(263): Ceres Seq. ID no. 12349078
IRLFCCRCIFHSRQETKPSCTSNFCQQTQRPKLFFPFLFIAAARGSRFSASPNDGHVRGLRPSSSSQLRRPPDRQSPAEAADGAEEERDQGGVRPLRHRRLRHHRCKGAERRDESPWIRDDTGANRADDRGGGQGRQRHHRLRRVRAHDDGQDGRAGRPGRAAQGVPHHRPGRQRKDLGHGHPAAGHRDRRALHARRGPGDDRGRRRGRRRRDRPGGVHEDDEADRLWLWVLVVTGKPIPTYIPIGEKYISPTLHMTGVLGFI

SEQ ID NO: 5202 - protein, 231 aa, Zea mays subsp. mays
  peptide (1)..(231): Ceres Seq. ID no. 12349079
YAFSAAAASSTRVKKRNPAAPATSASRPNDRSFFFPFFSSPPLGVQGSARPRMTGTYEASDRPPPPNSAGHRTDKVRRKRLTAQKRKEIKEAFDLFDIDGSGTIDARELNVAMRALGFEMTPEQIGQMIAEVDKDGSGTIDFDEFVHMMTDKMGERDARDELHKAFRIIDQDANGKISDMDIQRLAIETGEHFTLDEVREMIEAADEDGDGEIDLEEFMKMMKRTDFGSGF

SEQ ID NO: 5203 - protein, 179 aa, Zea mays subsp. mays
  peptide (1)..(179): Ceres Seq. ID no. 12349080
MTGTYEASDRPPPPNSAGHRTDKVRRKRLTAQKRKEIKEAFDLFDIDGSGTIDARELNVAMRALGFEMTPEQIGQMIAEVDKDGSGTIDFDEFVHMMTDKMGERDARDELHKAFRIIDQDANGKISDMDIQRLAIETGEHFTLDEVREMIEAADEDGDGEIDLEEFMKMMKRTDFGSGF

SEQ ID NO: 5204 - DNA, 851 bp, Zea mays subsp. mays
  misc_feature (1)..(851): Ceres Seq. ID no. 12353795
  misc_feature (1)..(851): Ortholog of  Ceres SEQ ID NO 13661994 as cited in SEQ ID NO 60568
  misc_feature (1)..(851): Ortholog of  Ceres SEQ ID NO 12584790 as cited in SEQ ID NO 62648
ccttttcgcacccggctggccggctccccacctgctcgcctctcgcgcatcctaccaggagggtgggagacccaggcagcggaggtgtgcgaagctcgcttcgcaccacgcgctgcggcctgcgggggagagatcgaggcctgagctagggtctggtggcggagatgtcgacgccggcgaggaagcgcctgatgcgggacttcaagcgccttcagcaggacccgcccgccggcatcagcggcgcgccgtacgacaacaatatcatgctctggaacgccgtcatattcgggccggatgacacgccgtgggatggaggcacgttcaagctgactctgcaatttacagaagattaccccaacaaacctccaactgttcggtttgtttcgaggatgtttcatcccaaacatctatgcggatggaagcatctgtttggacatcctacaaaatcagtggagccctatatatgatgttgcggcaatattgacctctattcagtccctgctgtgtgacccaaacccaaattctcctgctaactctgaagcagccagaatgttcagcgagaacaagcgtgagtacaaccgcaaagttcgtgaggttgtggagcagagctggacagccgactaaaactttatccgcttcgccaggcggtgtaaataaagcatctgtctttcctacttggccggtctgttttaccgttagaaatcctcagctatcgttgtgttcttgtggttcagtcccttgttgtagtgatgcctgcgggttttcctaatgtagtgctgaacggtttcataaactcggatattggtgcatatgtaacagatatagctaagtcaagttgttgcttggtttgc

SEQ ID NO: 5205 - protein, 100 aa, Zea mays subsp. mays
  peptide (1)..(100): Ceres Seq. ID no. 12353796
MSTPARKRLMRDFKRLQQDPPAGISGAPYDNNIMLWNAVIFGPDDTPWDGGTFKLTLQFTEDYPNKPPTVRFVSRMFHPKHLCGWKHLFGHPTKSVEPYI

SEQ ID NO: 5206 - protein, 98 aa, Zea mays subsp. mays
  peptide (1)..(98): Ceres Seq. ID no. 12353797
LFAPGWPAPHLLASRASYQEGGRPRQRRCAKLASHHALRPAGERSRPELGSGGGDVDAGEEAPDAGLQAPSAGPARRHQRRAVRQQYHALERRHIRAG

SEQ ID NO: 5207 - protein, 91 aa, Zea mays subsp. mays
  peptide (1)..(91): Ceres Seq. ID no. 12353798
MRDFKRLQQDPPAGISGAPYDNNIMLWNAVIFGPDDTPWDGGTFKLTLQFTEDYPNKPPTVRFVSRMFHPKHLCGWKHLFGHPTKSVEPYI

SEQ ID NO: 5208 - DNA, 1598 bp, Zea mays subsp. mays
  misc_feature (1)..(1598): Ceres Seq. ID no. 12369124
  misc_feature (1)..(1598): Ortholog of  Ceres SEQ ID NO 14301676 as cited in SEQ ID NO 67423
atcgcgtacaaaagtagtcacagacatatctcccctctgttccgagaagcaaacagaggccgaagccaaagatgacgaggactacgcagctcgtcgccgccatcgcggtttccttcctgtcagcggcggccgcgtccaacaccaccacgtcactccaaagcctcgtcgccgaagtgtcgcagtggcgggaaatccacctgggcggcggcgcggcggcggcgcatggcgtccggccgagcaccgtcgtggcgtgggcgctctccttcctggccgcgtccgtgtcgagcgccggcggcgtgggcggcgggtcgctgttcctgcccatcctgaacctggtggcggggctgagcctgaagcgcgccactgcctactcgtccttcatggtcaccggcggcgcggcctcgaacgtgctctacaacctcgcctgcacgggcggcggcgggagagggaggctgatcgactacgacatcgcgctactgttccagccgtgcctgctcctgggcgtgagcatcggggtggtgtgcaacgtcatgttcccggagtggctcatcaccctgctcttctccctgttcctcgccttctgcacagccaagacgtgccgcgcgggggtcaagatctggcggtccgagagcagcgggtgcgggtccggggctaggtcctcgcgcggtggacacagccacagcaaggagcccctgctgccccgcggcaccagcgacggcgacgccgagggcggcggcggaaatggcgcggggttcccgtggggagacgtggctctgcttgtcatcatctggctctgcttcttcgccctccatgtcctcattggcgataagcacgggaagggcgtgatcaggattaggccctgcggcgtcgcgtactggctgatcaccttcttccagctacctgccgctgtggctttcacagggtatattgtatacgccaagaggaagaaacgcgctgttcatagcgaaagccaagaggacggcagcaaggcagaccttgcggacgcaggagtggaagccttgccactacctacactacctctcgccgctttcgtcaccggggctctgagcggcctcttcggcatcggaggagggctgcttctgaaccctgtccttcttcagatcggaattcccccgcagaccgcggcagcgacgtcttcgttcatggtcctgttctgtgcgtccatgtccatggtccagttcatcctgctgggcgtggaaggcgtcgggcaggcctgcgtttacgccggggtatgcttcgccggctcggtcgcgggggtcgtcgtgatcgagcgagccgtcagcaagtctggccgggtctcgctcatcgtgttcctcgtcaccgccatcatggcgctcagcgctgtcatcgtcacctgcttcggagcgttagacgtctggatgcagtacaccaccggggaatacatgggcttcaagctaccttgctgacatcttgctcggtgttatgggcttcgttttggttttgcgtttgtgctcttcaccttgtaatgtctggaaagagaggccggagtaggactggttgtgcatgggcactcattgtaatttccaattttcaggttttatatagtgtgaattgtc

SEQ ID NO: 5209 - protein, 458 aa, Zea mays subsp. mays
  peptide (1)..(458): Ceres Seq. ID no. 12369125
MTRTTQLVAAIAVSFLSAAAASNTTTSLQSLVAEVSQWREIHLGGGAAAAHGVRPSTVVAWALSFLAASVSSAGGVGGGSLFLPILNLVAGLSLKRATAYSSFMVTGGAASNVLYNLACTGGGGRGRLIDYDIALLFQPCLLLGVSIGVVCNVMFPEWLITLLFSLFLAFCTAKTCRAGVKIWRSESSGCGSGARSSRGGHSHSKEPLLPRGTSDGDAEGGGGNGAGFPWGDVALLVIIWLCFFALHVLIGDKHGKGVIRIRPCGVAYWLITFFQLPAAVAFTGYIVYAKRKKRAVHSESQEDGSKADLADAGVEALPLPTLPLAAFVTGALSGLFGIGGGLLLNPVLLQIGIPPQTAAATSSFMVLFCASMSMVQFILLGVEGVGQACVYAGVCFAGSVAGVVVIERAVSKSGRVSLIVFLVTAIMALSAVIVTCFGALDVWMQYTTGEYMGFKLPC

SEQ ID NO: 5210 - protein, 355 aa, Zea mays subsp. mays
  peptide (1)..(355): Ceres Seq. ID no. 12369126
MVTGGAASNVLYNLACTGGGGRGRLIDYDIALLFQPCLLLGVSIGVVCNVMFPEWLITLLFSLFLAFCTAKTCRAGVKIWRSESSGCGSGARSSRGGHSHSKEPLLPRGTSDGDAEGGGGNGAGFPWGDVALLVIIWLCFFALHVLIGDKHGKGVIRIRPCGVAYWLITFFQLPAAVAFTGYIVYAKRKKRAVHSESQEDGSKADLADAGVEALPLPTLPLAAFVTGALSGLFGIGGGLLLNPVLLQIGIPPQTAAATSSFMVLFCASMSMVQFILLGVEGVGQACVYAGVCFAGSVAGVVVIERAVSKSGRVSLIVFLVTAIMALSAVIVTCFGALDVWMQYTTGEYMGFKLPC

SEQ ID NO: 5211 - protein, 305 aa, Zea mays subsp. mays
  peptide (1)..(305): Ceres Seq. ID no. 12369127
MFPEWLITLLFSLFLAFCTAKTCRAGVKIWRSESSGCGSGARSSRGGHSHSKEPLLPRGTSDGDAEGGGGNGAGFPWGDVALLVIIWLCFFALHVLIGDKHGKGVIRIRPCGVAYWLITFFQLPAAVAFTGYIVYAKRKKRAVHSESQEDGSKADLADAGVEALPLPTLPLAAFVTGALSGLFGIGGGLLLNPVLLQIGIPPQTAAATSSFMVLFCASMSMVQFILLGVEGVGQACVYAGVCFAGSVAGVVVIERAVSKSGRVSLIVFLVTAIMALSAVIVTCFGALDVWMQYTTGEYMGFKLPC

SEQ ID NO: 5212 - DNA, 916 bp, Zea mays subsp. mays
  misc_feature (1)..(916): Ceres Seq. ID no. 13625767
  misc_feature (1)..(916): Ortholog of  Ceres SEQ ID NO 12610334 as cited in SEQ ID NO 56235
  misc_feature (1)..(916): Ortholog of  Ceres SEQ ID NO 13654825 as cited in SEQ ID NO 62409
ggttggcgagaaagagcagagggacaccgaaacagagaggagcagaggggagcgacgacaggtcagcggagatggaagcagcggcaggaggagtggaggcggagggggtgatgagggtgctggtngtggacgactcccccgtcgaccgccgggggagtcgtcacgcacgcactcctcatcttatcccccgcctcctccggtcctcccgccgctgttgctcacttctgagtcccgacgcacgagctcccaagagctagccatggcgtccaccaccctctcctccgccttcaccctcctatcccgcccctccacctccccgtgccccgccgcctcgctcccgaggtcctcccacgccgcgccccacatccgccggggccgccgcgccgtcgccgtcgcgtgcaccgccaccgagtcccccaagatcctggagctcggggacgccatcgccgggctcacgctcgaggaggcccgcagcctcgtcgaccacctccaggagcggctcggcgtcaccgccgcggccttcgcgccggccgccgtcgtcgcggcgcccggggcgggcggcggggccgcggccgaggaggaggcccccgtcgagaagacggagttcgacgtgatgatcgaagaggtgcccagcagcgcgcgtatcgccactatcaaggtggtgcgcgcgctcaccagcctcgcgctcaaggaggccaaggaccttatcgagggtctccccaagaaggtcaaggaggccgtcagcaaggacgaggccgaggacgccaagaagcagctcgaggaggtcggcgccaaggtgtctatcgcgtgacactaggtatacgaggactcctttttttttttctttagtttcttttgtttgcatccccaatctcttgtatccccactatcgttcgtaaggaattgctgtttcatg

SEQ ID NO: 5213 - protein, 269 aa, Zea mays subsp. mays
  peptide (1)..(269): Ceres Seq. ID no. 13625768
  misc_feature (42)..(42): Xaa is any aa, unknown or other
VGEKEQRDTETERSRGERRQVSGDGSSGRRSGGGGGDEGAGXGRLPRRPPGESSRTHSSSYPPPPPVLPPLLLTSESRRTSSQELAMASTTLSSAFTLLSRPSTSPCPAASLPRSSHAAPHIRRGRRAVAVACTATESPKILELGDAIAGLTLEEARSLVDHLQERLGVTAAAFAPAAVVAAPGAGGGAAAEEEAPVEKTEFDVMIEEVPSSARIATIKVVRALTSLALKEAKDLIEGLPKKVKEAVSKDEAEDAKKQLEEVGAKVSIA

SEQ ID NO: 5214 - protein, 183 aa, Zea mays subsp. mays
  peptide (1)..(183): Ceres Seq. ID no. 13625769
MASTTLSSAFTLLSRPSTSPCPAASLPRSSHAAPHIRRGRRAVAVACTATESPKILELGDAIAGLTLEEARSLVDHLQERLGVTAAAFAPAAVVAAPGAGGGAAAEEEAPVEKTEFDVMIEEVPSSARIATIKVVRALTSLALKEAKDLIEGLPKKVKEAVSKDEAEDAKKQLEEVGAKVSIA

SEQ ID NO: 5215 - DNA, 1220 bp, Zea mays subsp. mays
  misc_feature (1)..(1220): Ceres Seq. ID no. 12376640
  misc_feature (1)..(1220): Ortholog of  Ceres SEQ ID NO 15180781 as cited in SEQ ID NO 0
aagggggaggggagctttccacttcacggctgatgagtgatgaccctaccagaaatcgacccgatacggctcctgcgccagatcgtccatcaatagcccgaatcacactcatcacaagcctcaaacttttccaaaccaatttagatgcggcgtgagtgctaaagcgctctctggactctgtttcgcagtggccgcagctgcagcgtcctcttccctttttgccatccagcatcacctgtgccgccggcgcgtaattgcaccgcggtcactggttaataggaagaagggaaggaggaggggggagcggtgtgccggggtatcgtcgtgcccatgggcgtgcacgccaggtcgatgagctggtatatggggtcgccggcgccggggagcgccgccgagggcgaggggcagcgcgcgctgagaagcagctccggtggcagcgacggcagcttcgacaccaacatggtcatcatcctcgccgcgctgctgttcgcgctcctcttcgcgatgggcctcaactcgctcgcgcgctgcctcatccgctgggcacgccgcgcgccggccggggaggacggcggcgccggcgggctaaagaagcgcgcgctccggagcatccccgtcgaggtgtacggcgcgtgcggcgccgacggggcggcggctgtcgccgccgacgtctgcgccatctgcctcggcgagttcgcggacggcgagaaggtgcgcgtgctgccgcgctgcgcccacggcttccacgtccgctgcgtcgacacctggctcctgtcgcacgactcctgccccacgtgccggggctccgtgctcgacggcgcaaaggccgccgcctctgctcccgccgccgggggcaaccggcggcagggaagcgaggctgctgccatcgcaattgtcattggatgacgtggacgtgtgggggcccgcgtgcccactggtggtggagccacacggtatgcgagactagcttcgttccgtggtagtgagatattttgctgtgatgagaagccgacgagtcgcggcggcccatctctcagtcaagacacagcatggccttcaggatattatcccttcggtctgtacttgtgcatggtcgtcgcagctgatcctgtttgtgtatactaggagtggatgatgaggtatgccgctataggcttgcaataatacagttttgtttgtacatgttcgatttgacacaattttagagcactgagcagagc

SEQ ID NO: 5216 - protein, 191 aa, Zea mays subsp. mays
  peptide (1)..(191): Ceres Seq. ID no. 12376641
MGVHARSMSWYMGSPAPGSAAEGEGQRALRSSSGGSDGSFDTNMVIILAALLFALLFAMGLNSLARCLIRWARRAPAGEDGGAGGLKKRALRSIPVEVYGACGADGAAAVAADVCAICLGEFADGEKVRVLPRCAHGFHVRCVDTWLLSHDSCPTCRGSVLDGAKAAASAPAAGGNRRQGSEAAAIAIVIG

SEQ ID NO: 5217 - protein, 184 aa, Zea mays subsp. mays
  peptide (1)..(184): Ceres Seq. ID no. 12376642
MSWYMGSPAPGSAAEGEGQRALRSSSGGSDGSFDTNMVIILAALLFALLFAMGLNSLARCLIRWARRAPAGEDGGAGGLKKRALRSIPVEVYGACGADGAAAVAADVCAICLGEFADGEKVRVLPRCAHGFHVRCVDTWLLSHDSCPTCRGSVLDGAKAAASAPAAGGNRRQGSEAAAIAIVIG

SEQ ID NO: 5218 - protein, 180 aa, Zea mays subsp. mays
  peptide (1)..(180): Ceres Seq. ID no. 12376643
MGSPAPGSAAEGEGQRALRSSSGGSDGSFDTNMVIILAALLFALLFAMGLNSLARCLIRWARRAPAGEDGGAGGLKKRALRSIPVEVYGACGADGAAAVAADVCAICLGEFADGEKVRVLPRCAHGFHVRCVDTWLLSHDSCPTCRGSVLDGAKAAASAPAAGGNRRQGSEAAAIAIVIG

SEQ ID NO: 5219 - DNA, 1402 bp, Zea mays subsp. mays
  misc_feature (1)..(1402): Ceres Seq. ID no. 12409656
  misc_feature (1)..(1402): Ortholog of  Ceres SEQ ID NO 15171556 as cited in SEQ ID NO 59687
  misc_feature (1)..(1402): Ortholog of  Ceres SEQ ID NO 15177935 as cited in SEQ ID NO 60258
  misc_feature (1)..(1402): Ortholog of  Ceres SEQ ID NO 13659033 as cited in SEQ ID NO 66372
  misc_feature (1)..(1402): Ortholog of  Ceres SEQ ID NO 13655724 as cited in SEQ ID NO 68973
  misc_feature (1)..(1402): Ortholog of  Ceres SEQ ID NO 12625899 as cited in SEQ ID NO 69079
  misc_feature (1)..(1402): Ortholog of  Ceres SEQ ID NO 15180051 as cited in SEQ ID NO 0
  misc_feature (1)..(1402): Ortholog of  Ceres SEQ ID NO 15180366 as cited in SEQ ID NO 0
agaagacagaggccagtcacaaggcgatagcagcaggtggtggcaagatgacggtgctccactctccggttggagttaggagcatcgtgacctccttggtggctttcttcatcctagccagctccatcgtgttcctcctcgacagaggccaggaagagcaagtgcaagtggcagtcgagcatggacgccaagaagtgcaggtgaagctggaatccgggctgcaagaaccggcgataagagggacaacccaagagggggacgccagcaacgaggagtgcaactggtccaggggaaggtgggtgtacgacaacgtgtcccgcccattgtacagcgggctcaagtgctccttcatcttccccgaggtggcctgtgacaagtatggcaggaaggatgccatgtaccagcactggagatggcagcctcatggtcatggatgcgacctcccaagatttgatgccatcaagctgcttgaaaatctgagaaacaagagaatggtgtttgtgggcgactcagtcaacaggaaccaatgggtctctctcgtgtgcatggtggaggcctcaatacctgacgacaggctcaagatacgcaccttcaatggctcactcatctccttcaaggcattggaatacaacgcaacgatagatttctactggtcaccactactggtggaatctaacagcgacaaccccattatccaccgggtggagtaccggatcataagggcagacagaattgagaagcatgccagtgtctggagggatgccgacatcattgtcttcaattcttacctgtggtggaggaagcagaaggatgacatgaggatgaaggtcatgtatggttcattcgaagatggtgatgcaaagttagacgagatggaaatggtcgatggtttcgagatagctctcaagaaactaaccgaatggctgggggagaatattgacaagaacaagactaggatatttttcgcaggatcgtcaccaacacattcctgggctagcaactggggtggagaagacaagaacaagtgccttaacgaaacagagccgatctacaaaaccggatacaaagctgcaactacagactacagcttgatggccaaagctaagcactactttcgaacattggagccgaaaggcatacatgttcagatactgaacatcaccgagctgtctgactaccgcaaggacgggcatcctacggtgtacaggaaacagtttgctcctctgacgaaagagcaaatcgcagacccagccagttacgcggattgcacgcactggtgcctccccggagttccagatgtctggaacgagtttttatatggctacctcgtgcaaaaatgatgtacaaaactgtcagtcaggttcgttttgccccttatatataatgtacaaatggcatactc

SEQ ID NO: 5220 - protein, 445 aa, Zea mays subsp. mays
  peptide (1)..(445): Ceres Seq. ID no. 12409657
KTEASHKAIAAGGGKMTVLHSPVGVRSIVTSLVAFFILASSIVFLLDRGQEEQVQVAVEHGRQEVQVKLESGLQEPAIRGTTQEGDASNEECNWSRGRWVYDNVSRPLYSGLKCSFIFPEVACDKYGRKDAMYQHWRWQPHGHGCDLPRFDAIKLLENLRNKRMVFVGDSVNRNQWVSLVCMVEASIPDDRLKIRTFNGSLISFKALEYNATIDFYWSPLLVESNSDNPIIHRVEYRIIRADRIEKHASVWRDADIIVFNSYLWWRKQKDDMRMKVMYGSFEDGDAKLDEMEMVDGFEIALKKLTEWLGENIDKNKTRIFFAGSSPTHSWASNWGGEDKNKCLNETEPIYKTGYKAATTDYSLMAKAKHYFRTLEPKGIHVQILNITELSDYRKDGHPTVYRKQFAPLTKEQIADPASYADCTHWCLPGVPDVWNEFLYGYLVQK

SEQ ID NO: 5221 - protein, 430 aa, Zea mays subsp. mays
  peptide (1)..(430): Ceres Seq. ID no. 12409658
MTVLHSPVGVRSIVTSLVAFFILASSIVFLLDRGQEEQVQVAVEHGRQEVQVKLESGLQEPAIRGTTQEGDASNEECNWSRGRWVYDNVSRPLYSGLKCSFIFPEVACDKYGRKDAMYQHWRWQPHGHGCDLPRFDAIKLLENLRNKRMVFVGDSVNRNQWVSLVCMVEASIPDDRLKIRTFNGSLISFKALEYNATIDFYWSPLLVESNSDNPIIHRVEYRIIRADRIEKHASVWRDADIIVFNSYLWWRKQKDDMRMKVMYGSFEDGDAKLDEMEMVDGFEIALKKLTEWLGENIDKNKTRIFFAGSSPTHSWASNWGGEDKNKCLNETEPIYKTGYKAATTDYSLMAKAKHYFRTLEPKGIHVQILNITELSDYRKDGHPTVYRKQFAPLTKEQIADPASYADCTHWCLPGVPDVWNEFLYGYLVQK

SEQ ID NO: 5222 - protein, 314 aa, Zea mays subsp. mays
  peptide (1)..(314): Ceres Seq. ID no. 12409659
MYQHWRWQPHGHGCDLPRFDAIKLLENLRNKRMVFVGDSVNRNQWVSLVCMVEASIPDDRLKIRTFNGSLISFKALEYNATIDFYWSPLLVESNSDNPIIHRVEYRIIRADRIEKHASVWRDADIIVFNSYLWWRKQKDDMRMKVMYGSFEDGDAKLDEMEMVDGFEIALKKLTEWLGENIDKNKTRIFFAGSSPTHSWASNWGGEDKNKCLNETEPIYKTGYKAATTDYSLMAKAKHYFRTLEPKGIHVQILNITELSDYRKDGHPTVYRKQFAPLTKEQIADPASYADCTHWCLPGVPDVWNEFLYGYLVQK

SEQ ID NO: 5223 - DNA, 891 bp, Zea mays subsp. mays
  misc_feature (1)..(891): Ceres Seq. ID no. 13498431
  misc_feature (1)..(891): Ortholog of  Ceres SEQ ID NO 12557850 as cited in SEQ ID NO 65
  misc_feature (1)..(891): Ortholog of  Ceres SEQ ID NO 14312702 as cited in SEQ ID NO 0
aagcctcctccaaattaaaccgccggcgcctccgcttcgcgttctcgcctcatctcctcacgctcaggatccggcggcgaaggtaaggcaagatgtacacagcgaggaagaagatccagaaggataagggccttgagccctccgagttcgaggactccgtcgcccaggctttcttcgacctggagaacggtaaccaggagctcaagagcgacctcaaggacctttacatcaacggtgctatccagctggatgttgccgggagcaggaaggctgttgtgatccacgtcccataccgcttgcgcaaggccttcaggaagatccatgtcaggatcgtcagggagctggagaagaaattcagcggcaaggatgtggtaattgttgccacaaggaggatcgtgaggccgcccaagaagggttcagctgttcagcgccctcgcaccaggactctgactgctgtccatgatggcatcctggaggatgttgtcttcccagctgagattgtggggaagcgtgtcaggtaccgtctggatggtgccaagatcatcaagatcttcttggacccaaaggagaggaacaacaccgaatacaagctggacacctacactacggtctaccgcaggctgtgtgggaaagatgtggtctttgagtaccctatggccgaaaatgcataaatatgacgcccggatatccccattttattttgttgaatctggatgtttctttggggtctcaactagactgctccgtatgtacttcaaaaaccatagttttgatgccaaagttgttgcctaggaatttggtactcgggaattggtagcggacgtgaacaatgttaagttttgagcatttaaatttacctttgtcatgataacatgttgcgagtttttattt

SEQ ID NO: 5224 - protein, 192 aa, Zea mays subsp. mays
  peptide (1)..(192): Ceres Seq. ID no. 13498432
MYTARKKIQKDKGLEPSEFEDSVAQAFFDLENGNQELKSDLKDLYINGAIQLDVAGSRKAVVIHVPYRLRKAFRKIHVRIVRELEKKFSGKDVVIVATRRIVRPPKKGSAVQRPRTRTLTAVHDGILEDVVFPAEIVGKRVRYRLDGAKIIKIFLDPKERNNTEYKLDTYTTVYRRLCGKDVVFEYPMAENA

SEQ ID NO: 5225 - protein, 110 aa, Zea mays subsp. mays
  peptide (1)..(110): Ceres Seq. ID no. 13498433
MMASWRMLSSQLRLWGSVSGTVWMVPRSSRSSWTQRRGTTPNTSWTPTLRSTAGCVGKMWSLSTLWPKMHKYDARISPFYFVESGCFFGVSTRLLRMYFKNHSFDAKVVA

SEQ ID NO: 5226 - protein, 109 aa, Zea mays subsp. mays
  peptide (1)..(109): Ceres Seq. ID no. 13498434
MASWRMLSSQLRLWGSVSGTVWMVPRSSRSSWTQRRGTTPNTSWTPTLRSTAGCVGKMWSLSTLWPKMHKYDARISPFYFVESGCFFGVSTRLLRMYFKNHSFDAKVVA

SEQ ID NO: 5227 - DNA, 1442 bp, Zea mays subsp. mays
  misc_feature (1)..(1442): Ceres Seq. ID no. 12434863
  misc_feature (1)..(1442): Ortholog of  Ceres SEQ ID NO 14311938 as cited in SEQ ID NO 51615
  misc_feature (1)..(1442): Ortholog of  Ceres SEQ ID NO 14302059 as cited in SEQ ID NO 68322
acctttggcttttctggctttatataatcattcgttcaccctttatccatcaccacctaatttcccaacaaatttcaatctccatcgatcgattcctcccgaacccgacccgatggcctccgacgccgccgccgagccctcctccggcgtcacccaccccccgcgctacgtcatcggttacgcgctcgcgccgaagaagcagcagagcttcatccagccgtcgctggtggcccaggcggcgtcgcggggcatggacctcgtccccgtggatgcgtcgcagcccctcgcagagcaagggcccttccacctcctcatccacaagctctacggagacgactggcgcgcccagctcgtggccttcgccgcgcgccacccggccgtccccatcgtcgacccgccccacgccatcgaccgcctccacaaccgcatctccatgctccaggtcgtctccgagctcgaccacgccgccgaccaggacagcactttcggtatccccagccaggtcgtcgtctacgacgccgccgcgctcgccgacttcggactccttgccgcgctccgcttcccgctcatcgccaagcccctcgtcgccgacggcaccgccaagtcccacaagatgtcgctcgtctaccaccgcgagggcctcggcaagctccgcccgccgcttgtgctccaggagttcgtcaaccatggcggcgtcatcttcaaggtctacgtcgtcggcggccacgtcacttgcgtcaagcgccgtagccttcccgacgtgtcccccgaggatgacgcatcggcccagggatccgtctccttctcccaggtctccaacctccccactgagcgcacggcggaggagtactacggcgaaaagagtctcgaggacgccgtcgtgccgcccgccgcattcatcaaccagatcgcgggcggcctccgccgcgcgctgggcctgcaactcttcaacttcgacatgatccgcgacgtccgcgccggcgaccgctatctcgtcattgacatcaactacttcccgggctacgccaagatgccaggatacgagactgtcctcacggatttcttctgggagatggtccatgaggacggcgtgggcaaccaacaggaggagaaaggggccaaccatgttgtcgtgaaataagatgatgattgatggcactggatatctggcgaatgctgctgattctggatgcagaattcgatgaggggatttagttggttgtagtatctggcgaatgctgctggttctggatgcagaatttgatgaggggatttagttggatttcaacccacagcatgccgaggacctcctagctctttccagaccagttgtttaggtatcttttctgggtaagtcagcttcatctagtttagtctgtctgaacaaaagagtgggacatgacccaaacggaattctaatgaaaaatgagctctctatctgc

SEQ ID NO: 5228 - protein, 379 aa, Zea mays subsp. mays
  peptide (1)..(379): Ceres Seq. ID no. 12434864
PLAFLALYNHSFTLYPSPPNFPTNFNLHRSIPPEPDPMASDAAAEPSSGVTHPPRYVIGYALAPKKQQSFIQPSLVAQAASRGMDLVPVDASQPLAEQGPFHLLIHKLYGDDWRAQLVAFAARHPAVPIVDPPHAIDRLHNRISMLQVVSELDHAADQDSTFGIPSQVVVYDAAALADFGLLAALRFPLIAKPLVADGTAKSHKMSLVYHREGLGKLRPPLVLQEFVNHGGVIFKVYVVGGHVTCVKRRSLPDVSPEDDASAQGSVSFSQVSNLPTERTAEEYYGEKSLEDAVVPPAAFINQIAGGLRRALGLQLFNFDMIRDVRAGDRYLVIDINYFPGYAKMPGYETVLTDFFWEMVHEDGVGNQQEEKGANHVVVK

SEQ ID NO: 5229 - protein, 342 aa, Zea mays subsp. mays
  peptide (1)..(342): Ceres Seq. ID no. 12434865
MASDAAAEPSSGVTHPPRYVIGYALAPKKQQSFIQPSLVAQAASRGMDLVPVDASQPLAEQGPFHLLIHKLYGDDWRAQLVAFAARHPAVPIVDPPHAIDRLHNRISMLQVVSELDHAADQDSTFGIPSQVVVYDAAALADFGLLAALRFPLIAKPLVADGTAKSHKMSLVYHREGLGKLRPPLVLQEFVNHGGVIFKVYVVGGHVTCVKRRSLPDVSPEDDASAQGSVSFSQVSNLPTERTAEEYYGEKSLEDAVVPPAAFINQIAGGLRRALGLQLFNFDMIRDVRAGDRYLVIDINYFPGYAKMPGYETVLTDFFWEMVHEDGVGNQQEEKGANHVVVK

SEQ ID NO: 5230 - protein, 319 aa, Zea mays subsp. mays
  peptide (1)..(319): Ceres Seq. ID no. 12434866
LWLFWLYIIIRSPFIHHHLISQQISISIDRFLPNPTRWPPTPPPSPPPASPTPRATSSVTRSRRRSSRASSSRRWWPRRRRGAWTSSPWMRRSPSQSKGPSTSSSTSSTETTGAPSSWPSPRATRPSPSSTRPTPSTASTTASPCSRSSPSSTTPPTRTALSVSPARSSSTTPPRSPTSDSLPRSASRSSPSPSSPTAPPSPTRCRSSTTARASASSARRLCSRSSSTMAASSSRSTSSAATSLASSAVAFPTCPPRMTHRPRDPSPSPRSPTSPLSARRRSTTAKRVSRTPSCRPPHSSTRSRAASAARWACNSSTST

SEQ ID NO: 5231 - DNA, 1400 bp, Zea mays subsp. mays
  misc_feature (1)..(1400): Ceres Seq. ID no. 13501217
  misc_feature (1)..(1400): Ortholog of  Ceres SEQ ID NO 15180793 as cited in SEQ ID NO 0
gcacgagaccattacctagaacatcctaatcgaaaagaaagactattcccctcaaccctccaaaagaagagaggactgttgaaacttggatgccatggcatacgtccacacgccaccgtaccagtcgagatcaagacggcaataatagacaagaacaaggtgcgtggcagtgcactcgacgatattaatggagctgctttgcacgggcggcagacagccgtagacagagcagtgacggtcgtcgtacacagatcacgatgctgctcccacactcttcgtcagcctctgcaactgctaccactcgtgggctagcactagcagcagcagcagcagcaccgccgcgtccgaccgctcgcccccggcgcgcgcgcctcctgcctccacgcgcgcgggccgagacgcatgcgacgggcgttggcgccgaccgcgcggccgaggcgcttctccaaagcgggctgcgccgtgagtcgctgccgcggcacgtcgcggtggtgatggacgggaactcgcggtgggcgcgcgagcgggggctgacgcccgcggacggccacaaggccggcggccgcaacctggagcgggtcgttgcgctgtcgcgcgcctggggcatccgcgcgctcaccgccttcgtctgctcccgcgagaacttgnnccgccccaaggccgaggtcgactacatgatgggcttgtccgagtggntgataggcgacaacatcgacaagctctcgaggcaggggatccggctgcaggtgatcggcgacgccgcgaagatgccagcctctctgcggagcgcagcggcgcaggccgacgaggccacgaggcacaactcgcagctgcacgtgatgctggccatctgctacagcgggcgatgggacatggtccaggcgtgccgggagctggcccgggaggcgcaggcgaaccggctcagtccggacgacatcgacgagtcggtcatcgccggcaagctcgcgacgagcgccgccggcgagttctcctgtcccgacctggtcatcagaaccagcggcgagatgaggctcagcaacttcttgctgtggcagtcggcgtactcggagttgttcttcaccggcaagatgtggcctgactttggggaggctgagtacctggaagcgttgcgctccttccagggcagagaccgccgcttcggccaatcaaaattactctaacagtctaactcgatggagccacgaagtggagcgccagtatatgtgaagagttatggattgttcggttagctttcattccatttagattaaataagattgaatgaatttaaatcttaagtaagttaaactttttttaaaatttttttaatcccatcaaataaatgagtaacaggattaatggaacaaagtcttaattggaatttgtcctgttttttaaac

SEQ ID NO: 5232 - protein, 307 aa, Zea mays subsp. mays
  peptide (1)..(307): Ceres Seq. ID no. 13501218
  misc_feature (131)..(131): Xaa is any aa, unknown or other
  misc_feature (147)..(147): Xaa is any aa, unknown or other
MLLPHSSSASATATTRGLALAAAAAAPPRPTARPRRARLLPPRARAETHATGVGADRAAEALLQSGLRRESLPRHVAVVMDGNSRWARERGLTPADGHKAGGRNLERVVALSRAWGIRALTAFVCSRENLXRPKAEVDYMMGLSEWXIGDNIDKLSRQGIRLQVIGDAAKMPASLRSAAAQADEATRHNSQLHVMLAICYSGRWDMVQACRELAREAQANRLSPDDIDESVIAGKLATSAAGEFSCPDLVIRTSGEMRLSNFLLWQSAYSELFFTGKMWPDFGEAEYLEALRSFQGRDRRFGQSKLL

SEQ ID NO: 5233 - protein, 228 aa, Zea mays subsp. mays
  peptide (1)..(228): Ceres Seq. ID no. 13501219
  misc_feature (52)..(52): Xaa is any aa, unknown or other
  misc_feature (68)..(68): Xaa is any aa, unknown or other
MDGNSRWARERGLTPADGHKAGGRNLERVVALSRAWGIRALTAFVCSRENLXRPKAEVDYMMGLSEWXIGDNIDKLSRQGIRLQVIGDAAKMPASLRSAAAQADEATRHNSQLHVMLAICYSGRWDMVQACRELAREAQANRLSPDDIDESVIAGKLATSAAGEFSCPDLVIRTSGEMRLSNFLLWQSAYSELFFTGKMWPDFGEAEYLEALRSFQGRDRRFGQSKLL

SEQ ID NO: 5234 - protein, 168 aa, Zea mays subsp. mays
  peptide (1)..(168): Ceres Seq. ID no. 13501220
  misc_feature (8)..(8): Xaa is any aa, unknown or other
MMGLSEWXIGDNIDKLSRQGIRLQVIGDAAKMPASLRSAAAQADEATRHNSQLHVMLAICYSGRWDMVQACRELAREAQANRLSPDDIDESVIAGKLATSAAGEFSCPDLVIRTSGEMRLSNFLLWQSAYSELFFTGKMWPDFGEAEYLEALRSFQGRDRRFGQSKLL

SEQ ID NO: 5235 - DNA, 1668 bp, Zea mays subsp. mays
  misc_feature (1)..(1668): Ceres Seq. ID no. 12406933
  misc_feature (1)..(1668): Ortholog of  Ceres SEQ ID NO 14311942 as cited in SEQ ID NO 51516
attccacgctgcctcggccggcacctacctcccccacttcgccgccggcgggtggagtcgggccggagcagccgctagctcgcctctgttaccccaaaaaagacaaaaaaaataaagagagagtaccaagcaagccgccggcagctcgggcagccatggggcacggcgtcagctgcgctcgcacgggcgacgagcacaactacttccgcgcggcgcaggtcggggacctcgacgccctggacgcgctcctcgccgccgacccctccctcgcccgccgcgccacgctctacgaccgtctctccgcgctgcacatcaccgccgccaatggccacctcgaggtgatgtccatgatcttgaatcacggggtaccgccggacgccgtgaaccggcacaagcagacgccgctgatgctcgcggcgatgcacggcaagatcgactgcgcgcggaagctcctgcaggccggcgccaatatcctgatgttcgactccctgcacgggcggacctgcctgcaccacgcgtcctacttcggccacgtcgactgcctgcgggccatcctcgcggcggcgcggaccacgccggtggccgactcatggggtttcgcccggttcgtcaacgtcagggacgaccgcggcgccacgccgctgcacctcgccgccaggcagggccgccccgcctgcgtgcaggtgctgctggagaacggcgccattgtctccgccctcaccggctcctacgggttccccggcagcacgtcgctgcatctggccgctcgaagcgggaacctggactgcatccggaaactgctcgcctggggcggggatcgtctccagagggactcagcagggaggattccttacgccgtggcgctgaagcgcaaccacggggcgtgcgcggcgctgctgaacccgtcggcggcggagcccatggtgtggccttccccgctcaagttcatcagcgagctggacccggaggcgaaggctctcctggaagcggcactgatggacgccaatagggagagggaggagaagatcctcaagggcatcaccaagtatccgcaggcatcgcctacttcgccttgcgagcacgatgccattgacgaagcgtcctcggaggccagcgacgcggagctgtgctgcatctgcttcgagcaggcgtgcagcatcgaggtgcaggactgcgggcaccagatgtgcgcggcgtgcacgctggcgctgtgctgccacagcaagccgaacccggcgacgctgacgccgccgtcgccggcctgcccgttctgccgcggcagcatctcgaggctgctggtggcccgggcgagccccgacgccgatgacgacaaggccgccgccgccgcctcgtccccgcagctcgtccggcggcgaccgcacaacctcagctgggcggcggcgacggcgtggacaagcccgagcacgacctgtgatcgccatttgatgctgtgcgtggctgagcagacagcagagcacgaccattttaaaagctgaagcaggcattgccactggctttccaagatgagagacatcacatccaagcgtgattatctactacttgtaatgcatcctcttcttctcccccatgtttggtctatttttgggcgtgctaggatgcacctggccggcatgcagctgcgcgatatggttgagctgagcttgagcc

SEQ ID NO: 5236 - protein, 497 aa, Zea mays subsp. mays
  peptide (1)..(497): Ceres Seq. ID no. 12406934
STLPRPAPTSPTSPPAGGVGPEQPLARLCYPKKDKKNKERVPSKPPAARAAMGHGVSCARTGDEHNYFRAAQVGDLDALDALLAADPSLARRATLYDRLSALHITAANGHLEVMSMILNHGVPPDAVNRHKQTPLMLAAMHGKIDCARKLLQAGANILMFDSLHGRTCLHHASYFGHVDCLRAILAAARTTPVADSWGFARFVNVRDDRGATPLHLAARQGRPACVQVLLENGAIVSALTGSYGFPGSTSLHLAARSGNLDCIRKLLAWGGDRLQRDSAGRIPYAVALKRNHGACAALLNPSAAEPMVWPSPLKFISELDPEAKALLEAALMDANREREEKILKGITKYPQASPTSPCEHDAIDEASSEASDAELCCICFEQACSIEVQDCGHQMCAACTLALCCHSKPNPATLTPPSPACPFCRGSISRLLVARASPDADDDKAAAAASSPQLVRRRPHNLSWAAATAWTSPSTTCDRHLMLCVAEQTAEHDHFKS

SEQ ID NO: 5237 - protein, 446 aa, Zea mays subsp. mays
  peptide (1)..(446): Ceres Seq. ID no. 12406935
MGHGVSCARTGDEHNYFRAAQVGDLDALDALLAADPSLARRATLYDRLSALHITAANGHLEVMSMILNHGVPPDAVNRHKQTPLMLAAMHGKIDCARKLLQAGANILMFDSLHGRTCLHHASYFGHVDCLRAILAAARTTPVADSWGFARFVNVRDDRGATPLHLAARQGRPACVQVLLENGAIVSALTGSYGFPGSTSLHLAARSGNLDCIRKLLAWGGDRLQRDSAGRIPYAVALKRNHGACAALLNPSAAEPMVWPSPLKFISELDPEAKALLEAALMDANREREEKILKGITKYPQASPTSPCEHDAIDEASSEASDAELCCICFEQACSIEVQDCGHQMCAACTLALCCHSKPNPATLTPPSPACPFCRGSISRLLVARASPDADDDKAAAAASSPQLVRRRPHNLSWAAATAWTSPSTTCDRHLMLCVAEQTAEHDHFKS

SEQ ID NO: 5238 - protein, 384 aa, Zea mays subsp. mays
  peptide (1)..(384): Ceres Seq. ID no. 12406936
MSMILNHGVPPDAVNRHKQTPLMLAAMHGKIDCARKLLQAGANILMFDSLHGRTCLHHASYFGHVDCLRAILAAARTTPVADSWGFARFVNVRDDRGATPLHLAARQGRPACVQVLLENGAIVSALTGSYGFPGSTSLHLAARSGNLDCIRKLLAWGGDRLQRDSAGRIPYAVALKRNHGACAALLNPSAAEPMVWPSPLKFISELDPEAKALLEAALMDANREREEKILKGITKYPQASPTSPCEHDAIDEASSEASDAELCCICFEQACSIEVQDCGHQMCAACTLALCCHSKPNPATLTPPSPACPFCRGSISRLLVARASPDADDDKAAAAASSPQLVRRRPHNLSWAAATAWTSPSTTCDRHLMLCVAEQTAEHDHFKS

SEQ ID NO: 5239 - DNA, 1202 bp, Zea mays subsp. mays
  misc_feature (1)..(1202): Ceres Seq. ID no. 12356239
  misc_feature (1)..(1202): Ortholog of  Ceres SEQ ID NO 13596762 as cited in SEQ ID NO 63019
atcctttgctggcacgaccaaaaacttctcttcatccaatctgcaactccctcccgcaccaaaccttacccaggactaggaggaggaaagaaatggaggaataaagcagagtgagaagagaagaggaagcgaggcctctgctccagctcctatacaggagcgagcgacccagacgcctctgcttcggtgcttcccagtgccagtagtcgccaatccgcccaggtctcatgcttcggtccacgcacccacccagccccagcagcggcagctccgacgccacgatggtcgggggcggcgccccgagcggcgccaagctgctgcagatcctcaacgtgcgggtggtgggcagcggcgaccgcgtggtggtgctgtcccacgggttcggcacggaccagtcggcgtggagccgcgtgctcccctacctcacccgcgaccaccgcgtggtgctctacgacctcgtctgcgccggcagcgtcaacccggagcacttcgacttccgccgctacgacacgctggactcgtacgtcgacgacctgctcgccatcctcgacgcgctccgcgtctcgcgctgcgccttcgtcgggcactccgtgtccgccatgatcggcatcctcgcctccatccgccgccccgagctcttcgccaaggctcgtcctcatcggcgcgtcgcccaggttcctgaacgaccacgactaccacggcgggttcgagctgccggagatccagcaggtgttcgacgcgatggcggccaactactcggcgtgggcgaccgggtacgccccgctggcggttggcgcggacgtgcccgcggcggtgcaggagttcagccgcacgctcttcaacatgcggccggacatctcgctccacgtctgccgcaccgtgttcaacacggacctccgcggcgtgctgggcatggtgcgcgccccctgcgtggtggtgcagaccacccgcgacgtctccgtcccggcctccgtcgccgcctacctcaaggcccacctcggcggccgcaccgccgtcgagttcctccagaccgagggccacctcccgcacctcagcgcccccggcctcctcgcccaggtgctccgccgcgcgctcgcccggtactagcagccgggccggccaggcctgtttttaccgcctcgatttacccctgccgagaccgagaatcaagaaatggcgcgactcgcgccgtttgctgtgtc

SEQ ID NO: 5240 - protein, 325 aa, Zea mays subsp. mays
  peptide (1)..(325): Ceres Seq. ID no. 12356240
MLRSTHPPSPSSGSSDATMVGGGAPSGAKLLQILNVRVVGSGDRVVVLSHGFGTDQSAWSRVLPYLTRDHRVVLYDLVCAGSVNPEHFDFRRYDTLDSYVDDLLAILDALRVSRCAFVGHSVSAMIGILASIRRPELFAKARPHRRVAQVPERPRLPRRVRAAGDPAGVRRDGGQLLGVGDRVRPAGGWRGRARGGAGVQPHALQHAAGHLAPRLPHRVQHGPPRRAGHGARPLRGGADHPRRLRPGLRRRLPQGPPRRPHRRRVPPDRGPPPAPQRPRPPRPGAPPRARPVLAAGPARPVFTASIYPCRDRESRNGATRAVCCV

SEQ ID NO: 5241 - protein, 307 aa, Zea mays subsp. mays
  peptide (1)..(307): Ceres Seq. ID no. 12356241
MVGGGAPSGAKLLQILNVRVVGSGDRVVVLSHGFGTDQSAWSRVLPYLTRDHRVVLYDLVCAGSVNPEHFDFRRYDTLDSYVDDLLAILDALRVSRCAFVGHSVSAMIGILASIRRPELFAKARPHRRVAQVPERPRLPRRVRAAGDPAGVRRDGGQLLGVGDRVRPAGGWRGRARGGAGVQPHALQHAAGHLAPRLPHRVQHGPPRRAGHGARPLRGGADHPRRLRPGLRRRLPQGPPRRPHRRRVPPDRGPPPAPQRPRPPRPGAPPRARPVLAAGPARPVFTASIYPCRDRESRNGATRAVCCV

SEQ ID NO: 5242 - protein, 201 aa, Zea mays subsp. mays
  peptide (1)..(201): Ceres Seq. ID no. 12356242
MIGILASIRRPELFAKARPHRRVAQVPERPRLPRRVRAAGDPAGVRRDGGQLLGVGDRVRPAGGWRGRARGGAGVQPHALQHAAGHLAPRLPHRVQHGPPRRAGHGARPLRGGADHPRRLRPGLRRRLPQGPPRRPHRRRVPPDRGPPPAPQRPRPPRPGAPPRARPVLAAGPARPVFTASIYPCRDRESRNGATRAVCCV

SEQ ID NO: 5243 - DNA, 1227 bp, Zea mays subsp. mays
  misc_feature (1)..(1227): Ceres Seq. ID no. 12409649
  misc_feature (1)..(1227): Ortholog of  Ceres SEQ ID NO 15169248 as cited in SEQ ID NO 55022
  misc_feature (1)..(1227): Ortholog of  Ceres SEQ ID NO 14315042 as cited in SEQ ID NO 56959
  misc_feature (1)..(1227): Ortholog of  Ceres SEQ ID NO 12608620 as cited in SEQ ID NO 60192
  misc_feature (1)..(1227): Ortholog of  Ceres SEQ ID NO 15173077 as cited in SEQ ID NO 64566
  misc_feature (1)..(1227): Ortholog of  Ceres SEQ ID NO 13662898 as cited in SEQ ID NO 66199
  misc_feature (1)..(1227): Ortholog of  Ceres SEQ ID NO 14313358 as cited in SEQ ID NO 67347
  misc_feature (1)..(1227): Ortholog of  Ceres SEQ ID NO 13654314 as cited in SEQ ID NO 67914
actacctcaggctgcttgaagtagtatgcatcagcggccctggtcctctctcccgctcccgctcaagggcagcagagaaagcagctgagcgctgactgtggatctcatccgtatcgcgtatatacgtcgtcctgtttggatccaccgcgttttgctaattcccttcgaaccggccggtggccttcgttctcccaccaggcctgtctgtctgctgtatccgccagagcttccatggattccaccctcttcatcatcggcgtcataggcaacatcatctcagttctcgtcttcatatcgcctatcaagacgttctggaggatcgtgcggggcgggacgacggaggagttcgagccggcgccgtacgtgttgacgctgctcaacgcgctgctgtggctctactacggcctcaccaagcccgacggcttcctcgtcgccaccgtcaatggctttggggctgtcatggaggccatctacgtcgtcctcttcatcgtctacgccgccaaccatgccacaagggttaagaccgcaaagctggcagcagcgttggacatcggtggcttcggagtcgtgtttgcggccaccacattcgccatcagtgaatttgaattgagaattatggtgataggaatgatatgtgcctgcctcaatgtgctcatgtacgggtcaccccttgcttctatgaaaacggtgatcacgacaaagagcgtggagttcatgccattcttcctgtccttcttcctcttcctcaacggaggcgtctgggcaacgtacgcggtgcttgaccgcgacatcttcctcgggatccccaatgggataggcttcgtgcttggcaccatccagctgatcgtctacgcgatctacatgaacagcaaggcctcccaatgcagcaaggaaacagcgtcctcgcctcttctgatggcctccgaccggggagaagcatctagccatgtctgatgatgagcttcgatcagtgcgcgcgctggagtatagcatagaagtctcttgctgtcaaaaacttcccagaccaacggtacctaccagcatgcatgcatgcaagaggttaccaatttttattgtttgaaaattcatgtaaaacttgtgacctccatggattgtttctttctttggtataagcttccaagatgttagattattagcacgatagttttgccagagaaggatgttgtcaatataatgaagaaatggtgaaaatccatacctttgatt

SEQ ID NO: 5244 - protein, 240 aa, Zea mays subsp. mays
  peptide (1)..(240): Ceres Seq. ID no. 12409650
MDSTLFIIGVIGNIISVLVFISPIKTFWRIVRGGTTEEFEPAPYVLTLLNALLWLYYGLTKPDGFLVATVNGFGAVMEAIYVVLFIVYAANHATRVKTAKLAAALDIGGFGVVFAATTFAISEFELRIMVIGMICACLNVLMYGSPLASMKTVITTKSVEFMPFFLSFFLFLNGGVWATYAVLDRDIFLGIPNGIGFVLGTIQLIVYAIYMNSKASQCSKETASSPLLMASDRGEASSHV

SEQ ID NO: 5245 - protein, 164 aa, Zea mays subsp. mays
  peptide (1)..(164): Ceres Seq. ID no. 12409651
MEAIYVVLFIVYAANHATRVKTAKLAAALDIGGFGVVFAATTFAISEFELRIMVIGMICACLNVLMYGSPLASMKTVITTKSVEFMPFFLSFFLFLNGGVWATYAVLDRDIFLGIPNGIGFVLGTIQLIVYAIYMNSKASQCSKETASSPLLMASDRGEASSHV

SEQ ID NO: 5246 - DNA, 1718 bp, Zea mays subsp. mays
  misc_feature (1)..(1718): Ceres Seq. ID no. 12409645
  misc_feature (1)..(1718): Ortholog of  Ceres SEQ ID NO 13595953 as cited in SEQ ID NO 68200
attcagcagcaccggcggcaccccgcagtcccggcgtcccgcacccacgccctacaggcagaccaagcaaatggcgatctcgatctcgcaggaggccttcgactccatggtccgggagaacatggaggacctcggcatggaccccgatgaggccctcgctgacgccgttgaggcgctcaccctccagggcgccgatctctcaggtatcgttaagcgcgtgccgggagaggccaccgcggcggaggtgagcccggtggtgcgggttctggacgaactgaaggcctctctcagcgccagcggcggggtcggagcaggatctcgacggactcgtctctctgttcgatgagttgcgcaatctgtgctgctccggcgagggttcggagaatgcagcgatcgcggtacggaatggcgtcgtggaggcgctcgtcgccctgtgcgcgtccgctcgggtcgagcaggagaggttgcttgcttcggccttgaagagtctgagctccgtactccgtgatgtggcaagcactgaaaagttcagacgaagtgagggacccaaaattgtcatggatctcttgcaaggaggctcagaaaattcagatttattggatgctggatttagtgttgtggcagcaggttctgctggcaatgaagttgtgaaagagtcctttatggacctgaaggtcgatgaactcattctgcgggttatgaaggataaatcaaaatctaatgtgcaaagtttgtatgatgccatacgtgttctgttgaaacctgatgacaaccgagtggtagcttctcaggtatatggatactcccggagatttgctgaaatcggggttgcagaagttcttgtcaatgcacttcgtgagcaagtcgctccttccagtttgccatctgcttgtgctgctttaaagtcgattgcagtcaatgatgaaatatgccgttccatatctgaaaatggtggaattgatgtgcttcttcaatgcatcgacgaggcaggtgagcagaagaacaaagttgtagcaagatcttgctgctctttgttgtccaagcttgctgcaagcgatgcaaacaagtccattatcattcagcgaggtggttttgataggttcctaaagttgacatccagattttctgaagatcctgctataattcaagaggttatgtctatggtgacggtcctcacactgaggtcaccagaaaatgcagcacgtgcaatggaagaaggctatgggacactggctatacagtcaatgcaaaggttcccctcctccgggcagactcagaagcaagcatgccttatgattcgcaatcttgttgcccgaaaccctgagaacaggaccgtcctgcttaatgatggtgcagaaaagcttattagaaaggccatggccctgcacggaagctgtaaagatgctgcctcgtctgccttgagggacctgggcctcgacaactacaatgcatagacaccagtgaccagtcacaccatagaaagtgtgcgtcgagttagtttggtcgcggtagaatgttttggaggagaaatacattgtgagttatcgaggtgccgcactgaaatgagtttgtagaattgcgctactgtggttgcatcaatggtttcagtttgttgggcaatcaaacttcagggctattaggttgtctccggtaaatcttacatatgatcatacaatttttttttacagagtgaagtttaaaataggaaatgtttcaag

SEQ ID NO: 5247 - protein, 298 aa, Zea mays subsp. mays
  peptide (1)..(298): Ceres Seq. ID no. 12409646
MDLLQGGSENSDLLDAGFSVVAAGSAGNEVVKESFMDLKVDELILRVMKDKSKSNVQSLYDAIRVLLKPDDNRVVASQVYGYSRRFAEIGVAEVLVNALREQVAPSSLPSACAALKSIAVNDEICRSISENGGIDVLLQCIDEAGEQKNKVVARSCCSLLSKLAASDANKSIIIQRGGFDRFLKLTSRFSEDPAIIQEVMSMVTVLTLRSPENAARAMEEGYGTLAIQSMQRFPSSGQTQKQACLMIRNLVARNPENRTVLLNDGAEKLIRKAMALHGSCKDAASSALRDLGLDNYNA

SEQ ID NO: 5248 - protein, 263 aa, Zea mays subsp. mays
  peptide (1)..(263): Ceres Seq. ID no. 12409647
MDLKVDELILRVMKDKSKSNVQSLYDAIRVLLKPDDNRVVASQVYGYSRRFAEIGVAEVLVNALREQVAPSSLPSACAALKSIAVNDEICRSISENGGIDVLLQCIDEAGEQKNKVVARSCCSLLSKLAASDANKSIIIQRGGFDRFLKLTSRFSEDPAIIQEVMSMVTVLTLRSPENAARAMEEGYGTLAIQSMQRFPSSGQTQKQACLMIRNLVARNPENRTVLLNDGAEKLIRKAMALHGSCKDAASSALRDLGLDNYNA

SEQ ID NO: 5249 - protein, 251 aa, Zea mays subsp. mays
  peptide (1)..(251): Ceres Seq. ID no. 12409648
MKDKSKSNVQSLYDAIRVLLKPDDNRVVASQVYGYSRRFAEIGVAEVLVNALREQVAPSSLPSACAALKSIAVNDEICRSISENGGIDVLLQCIDEAGEQKNKVVARSCCSLLSKLAASDANKSIIIQRGGFDRFLKLTSRFSEDPAIIQEVMSMVTVLTLRSPENAARAMEEGYGTLAIQSMQRFPSSGQTQKQACLMIRNLVARNPENRTVLLNDGAEKLIRKAMALHGSCKDAASSALRDLGLDNYNA

SEQ ID NO: 5250 - DNA, 1636 bp, Zea mays subsp. mays
  misc_feature (1)..(1636): Ceres Seq. ID no. 13498765
  misc_feature (1)..(1636): Ortholog of  Ceres SEQ ID NO 14307879 as cited in SEQ ID NO 54817
acacatttttacccctcgcggcggccccaccgaccgccggggcgcagcggcgtcgccgcgggcaacgccgtcacgtcacgtgcatcacgacaatctcctcctccgcctcgtcttcctgccaggccgcgggagcaccagcccagcggcagatcagtcgacgcgggcgattccagggtttagagaggagcggagatggtgaaggtcatccaggggcgcccggccgagatggggttccggatgccggcggagtgggagccgcacgagcagtgctggatgggatggcctgagcgtccagataactggagggagaatgctggtccagctcaagaggtatttgctagaactgcaattgccatttcaaagtttgaacccgtcacgttatgtgcaagtgccaagcagtaccccaaagtccacgagctgatggaacatgaaaccaacatcagggtcgttgagatgagcatgaacgattcctggttccgcgacatgggccccacttttgtcactcataaaggggattcaggaattgcagaacaaacaatagcaggaattgattggcaattcaatgcctggggaggaatctatgacgactggagtcttgacagcgatgttgccaagaaaatagtcgagatcgagaggatccctaggtttccccaaaaaattatccttgagggtggaagcattcatgtagatggagaaggtacatgcattacaacggaagaatgcttgctgaatcctaataggaaccccaacatgaccaaactagagatagagaatgagctgaaggattttcttggagtctcgaaggtcatctggatacctcgtggactttatggtgacgaggatacaaacggccacgttgacaacctgtgctgcttcatcaaacccggtgtgatcctgctgtcgtggaccgacgacgagaaggaccatcagtacgaacggtcggtcgaggcgctgtctgttctctcccagtccgtcgacgcgaaagggcggcagctccaagtggtgaagatccacgtccccgggcctctgtacatgacagaggaagaggcacagggcgttgtttcatcggggcattctgtaccgaggccagcgggcacgaggttggccgcctcgtacgtcaacttctacatcgccaatggggggatcatagcgccttccttcggtgacaggtgggacgaggaggcgtatgcggttctccagaaggcgtttcctgatcacgaggtggtgatggtcgaaggcggacgggagatcgcgctgggaggtgggaacattcactgcatcacgcagcagcagcccgtgcgcccgtcctaggtgaaaccggcgtcgacgcgaagcgatgaagagtatgctgctcctgtgtttaagcaggtgggttggtcccctgtcgttattacgctcaccaatacgcgcgcgaaataagccgtaggtacaagttccttgacaaatactgtatgagtactattaggccttgttggtgggtcggaacgattcctaaccgaattgtttatctaatttatataaattttgattagctggaacgattccgggtgtaatccgatagaaacgaacaaggccttatactatacggcacaaatgccacagtcgtggatcaaaatggtactagttcctgtctacg

SEQ ID NO: 5251 - protein, 372 aa, Zea mays subsp. mays
  peptide (1)..(372): Ceres Seq. ID no. 13498766
MVKVIQGRPAEMGFRMPAEWEPHEQCWMGWPERPDNWRENAGPAQEVFARTAIAISKFEPVTLCASAKQYPKVHELMEHETNIRVVEMSMNDSWFRDMGPTFVTHKGDSGIAEQTIAGIDWQFNAWGGIYDDWSLDSDVAKKIVEIERIPRFPQKIILEGGSIHVDGEGTCITTEECLLNPNRNPNMTKLEIENELKDFLGVSKVIWIPRGLYGDEDTNGHVDNLCCFIKPGVILLSWTDDEKDHQYERSVEALSVLSQSVDAKGRQLQVVKIHVPGPLYMTEEEAQGVVSSGHSVPRPAGTRLAASYVNFYIANGGIIAPSFGDRWDEEAYAVLQKAFPDHEVVMVEGGREIALGGGNIHCITQQQPVRPS

SEQ ID NO: 5252 - protein, 361 aa, Zea mays subsp. mays
  peptide (1)..(361): Ceres Seq. ID no. 13498767
MGFRMPAEWEPHEQCWMGWPERPDNWRENAGPAQEVFARTAIAISKFEPVTLCASAKQYPKVHELMEHETNIRVVEMSMNDSWFRDMGPTFVTHKGDSGIAEQTIAGIDWQFNAWGGIYDDWSLDSDVAKKIVEIERIPRFPQKIILEGGSIHVDGEGTCITTEECLLNPNRNPNMTKLEIENELKDFLGVSKVIWIPRGLYGDEDTNGHVDNLCCFIKPGVILLSWTDDEKDHQYERSVEALSVLSQSVDAKGRQLQVVKIHVPGPLYMTEEEAQGVVSSGHSVPRPAGTRLAASYVNFYIANGGIIAPSFGDRWDEEAYAVLQKAFPDHEVVMVEGGREIALGGGNIHCITQQQPVRPS

SEQ ID NO: 5253 - protein, 357 aa, Zea mays subsp. mays
  peptide (1)..(357): Ceres Seq. ID no. 13498768
MPAEWEPHEQCWMGWPERPDNWRENAGPAQEVFARTAIAISKFEPVTLCASAKQYPKVHELMEHETNIRVVEMSMNDSWFRDMGPTFVTHKGDSGIAEQTIAGIDWQFNAWGGIYDDWSLDSDVAKKIVEIERIPRFPQKIILEGGSIHVDGEGTCITTEECLLNPNRNPNMTKLEIENELKDFLGVSKVIWIPRGLYGDEDTNGHVDNLCCFIKPGVILLSWTDDEKDHQYERSVEALSVLSQSVDAKGRQLQVVKIHVPGPLYMTEEEAQGVVSSGHSVPRPAGTRLAASYVNFYIANGGIIAPSFGDRWDEEAYAVLQKAFPDHEVVMVEGGREIALGGGNIHCITQQQPVRPS

SEQ ID NO: 5254 - DNA, 964 bp, Zea mays subsp. mays
  misc_feature (1)..(964): Ceres Seq. ID no. 12409637
  misc_feature (1)..(964): Ortholog of  Ceres SEQ ID NO 13585560 as cited in SEQ ID NO 64470
cccaccatcccagggccgccgcgctgcttctctttcccgtcgcacctccaacgctgccgccgcggcagattaatccaacaccgggccgggatacgtgacaggtttctgagctcgcagctctacgccagcgatgccggagacggcggcgccgatcggcctgtcatgggcgcccaagcttccttccttcgcaacgaccagcggcggcagcaagagcgaccacgcgccgaacccgagcgctgcgcagggatcgctctggaaccgcgcgagcgacctcgtggacgggctgttcgttgccccgagggaccctaggcagctgaataagctggccaggaagaacgtcaaggacactgccggcaagggctggttcgacatgccagctccgaccatcactcccgagttgaagaaggatctcgagattttgcagctgaggcacgtaattgacccaaaaaggcacttcaagcgggcaggaaaatccaaggcccttcccaagtacttccaagtcggtacggtcgttgagcctgcatctgagttctactcaagtaggctgaaaaatagggaacgcaaggcaacattggttgacgagctgttatcagatcaatctctgaagagctacaggatgcgcaaggtacgtgaaattcaggagatccgtacaccaggaggcaaccaaaagtggaagaacaagggcaagaaaacgctcaagagggccaaggataggaggaaatgagactggcgtgctagccttgtggtccagttgtgagagaacagattggagaagtgaaccaaggagcgccttcaaataccccctctctcgatttgtgcggggtatatagattctggttccagtgtagtgtggtgaacttcagtaacatgatgaattgctttagatacttcaaaaaatgttgctgtaagtctgtaacacacatgtatggttttcagcccgtggttatcaattctgtcggttggg

SEQ ID NO: 5255 - protein, 197 aa, Zea mays subsp. mays
  peptide (1)..(197): Ceres Seq. ID no. 12409638
MPETAAPIGLSWAPKLPSFATTSGGSKSDHAPNPSAAQGSLWNRASDLVDGLFVAPRDPRQLNKLARKNVKDTAGKGWFDMPAPTITPELKKDLEILQLRHVIDPKRHFKRAGKSKALPKYFQVGTVVEPASEFYSSRLKNRERKATLVDELLSDQSLKSYRMRKVREIQEIRTPGGNQKWKNKGKKTLKRAKDRRK

SEQ ID NO: 5256 - protein, 117 aa, Zea mays subsp. mays; identical to SEQ ID NO: 2272
  peptide (1)..(117): Ceres Seq. ID no. 12409639

SEQ ID NO: 5257 - protein, 102 aa, Zea mays subsp. mays
  peptide (1)..(102): Ceres Seq. ID no. 12409640
PTIPGPPRCFSFPSHLQRCRRGRLIQHRAGIRDRFLSSQLYASDAGDGGADRPVMGAQASFLRNDQRRQQERPRAEPERCAGIALEPRERPRGRAVRCPEGP

SEQ ID NO: 5258 - DNA, 1140 bp, Zea mays subsp. mays; identical to SEQ ID NO: 4797
  misc_feature (1)..(1140): Ceres Seq. ID no. 12386869
  misc_feature (1)..(1140): Ortholog of  Ceres SEQ ID NO 14301423 as cited in SEQ ID NO 52204
  misc_feature (1)..(1140): Ortholog of  Ceres SEQ ID NO 12621037 as cited in SEQ ID NO 66448
  misc_feature (1)..(1140): Ortholog of  Ceres SEQ ID NO 12635639 as cited in SEQ ID NO 0
  misc_feature (1)..(1140): Ortholog of  Ceres SEQ ID NO 14305144 as cited in SEQ ID NO 0

SEQ ID NO: 5259 - protein, 274 aa, Zea mays subsp. mays; identical to SEQ ID NO: 4798
  peptide (1)..(274): Ceres Seq. ID no. 12386870

SEQ ID NO: 5260 - protein, 212 aa, Zea mays subsp. mays; identical to SEQ ID NO: 4799
  peptide (1)..(212): Ceres Seq. ID no. 12386871

SEQ ID NO: 5261 - protein, 178 aa, Zea mays subsp. mays; identical to SEQ ID NO: 4800
  peptide (1)..(178): Ceres Seq. ID no. 12386872

SEQ ID NO: 5262 - DNA, 1635 bp, Zea mays subsp. mays
  misc_feature (1)..(1635): Ceres Seq. ID no. 12358682
  misc_feature (1)..(1635): Ortholog of  Ceres SEQ ID NO 13659881 as cited in SEQ ID NO 66938
aaggagatagagagagagggagtgagaagaaggagacgcgaggagagagagagagcggcaggcaggcaggcaggcaataaatggcagttttggtgcgcgcaggctgatggcggcgtggcaggtcctctctgtcgcctcaccgtcttaactccggccgcgcgccggcaccacaaaccacaccgctcggctgcgagcacgcgggttttaatccgtcgcagagcgcatgagcacgccgcccagagcgcagactacgacgagcagccgtctgtagagggggagggaccgagggagagatcagggcgtcaggccgttgtctctcagcttcaccttcaccttgccgggcacggcgaacggcacggcggcctatggatttggccacatggcggggttccctctaggtggaggaggccacagccgcgacgcccccgcgtcgtccgtcccgccggtgcacccctccgacgcagcgtccttcctctacgccgcgcgcgcgggagcgggcctgcagctatggcagcagcacgagcagcaacagcagcacccgttctacacctccaacatcatccgcttctccgatgacccgaccggcgccccgccctcgctcacgggcgccgcgtcgtcgtcgtcttcgcgcggcacgaggggccggcgcgggaagcggcggcggaggcggcggcggggtcagctgccaggactgcggcaaccaggccaagaaggactgcgtgcaccagcgctgccgcacctgctgcaagagccgcggcttcacctgcagcacccacgtcaagtccacctgggtccctgccgccaagagacgcgagcgccagcagcagctcgccgtgctagcggcctccgccgccgccacaaccgccggcgccggcccatcccgcgacccgaccaagcgccctcgcgcgcgcctctccgtcgccacccccgccacgtcctcggatggtcacggtcgcggagaggttcccacgggaggtgagctcggaggcggtgttccggtgcgtgcgcctggggccggtcgaccaggccgaggcggaggtcgcgtaccagaccaccgtcagcatcggcggccacgtgttcaagggcatccttcacgacgttggccctcacagcttgcctgccgctggagtcggaggcggcgccatcgagtaccacttccgccacgccggggacggattgccgccgagcacggcagccactggcgaagcaggcggcggtggcgtggggagtgtcgtcgtgtcatcggctgtggtgatggacccgtacccgacgcccggaccctacgccgccttccccgccggcgcgccgttcttccacggccacccgagacagtgaccgccggctcgctcgctcgccagcagccgtcccgctgtgtaacgacatcacgactcccatctctggctcgctcgatctgtcaatttcgttagcttcctaatttcttagcctcttgttgagatgcataaattcatgttccttctagagcctagctagctagcttaggcgcgggttagacttgtttgcttcttgagatcaattcatgaggtgagtagcaatatactcagtggctgcaagtggctaaaaatctgacatttaggaaccttgatgagacatttgagatggtttcttgcactgtgc

SEQ ID NO: 5263 - protein, 284 aa, Zea mays subsp. mays
  peptide (1)..(284): Ceres Seq. ID no. 12358683
MTRPAPRPRSRAPRRRRLRAARGAGAGSGGGGGGGVSCQDCGNQAKKDCVHQRCRTCCKSRGFTCSTHVKSTWVPAAKRRERQQQLAVLAASAAATTAGAGPSRDPTKRPRARLSVATPATSSDGHGRGEVPTGGELGGGVPVRAPGAGRPGRGGGRVPDHRQHRRPRVQGHPSRRWPSQLACRWSRRRRHRVPLPPRRGRIAAEHGSHWRSRRRWRGECRRVIGCGDGPVPDARTLRRLPRRRAVLPRPPETVTAGSLARQQPSRCVTTSRLPSLARSICQFR

SEQ ID NO: 5264 - protein, 199 aa, Zea mays subsp. mays
  peptide (1)..(199): Ceres Seq. ID no. 12358684
MAGFPLGGGGHSRDAPASSVPPVHPSDAASFLYAARAGAGLQLWQQHEQQQQHPFYTSNIIRFSDDPTGAPPSLTGAASSSSSRGTRGRRGKRRRRRRRGQLPGLRQPGQEGLRAPALPHLLQEPRLHLQHPRQVHLGPCRQETRAPAAARRASGLRRRHNRRRRPIPRPDQAPSRAPLRRHPRHVLGWSRSRRGSHGR

SEQ ID NO: 5265 - protein, 191 aa, Zea mays subsp. mays
  peptide (1)..(191): Ceres Seq. ID no. 12358685
KEIEREGVRRRRREERERAAGRQAGNKWQFWCAQADGGVAGPLCRLTVLTPAARRHHKPHRSAASTRVLIRRRAHEHAAQSADYDEQPSVEGEGPRERSGRQAVVSQLHLHLAGHGERHGGLWIWPHGGVPSRWRRPQPRRPRVVRPAGAPLRRSVLPLRRARGSGPAAMAAARAATAAPVLHLQHHPLLR

SEQ ID NO: 5266 - DNA, 1544 bp, Zea mays subsp. mays
  misc_feature (1)..(1544): Ceres Seq. ID no. 12566452
  misc_feature (1)..(1544): Ortholog of  Ceres SEQ ID NO 13654989 as cited in SEQ ID NO 63117
aagtacacagagatacaaatacagagaggcagagggcaggcggaggcaccatctccctcccttcttcatcgcccacacaagtcctctcatctcctctctgtttcgtgcaagaaacttccttggacaaagatgggagtgcagagttactacaggttattctgctgcgggtgcggcgccaatgcggcggccggcgaccgggaaggcgacgaggacgggggtttcgaggcgttcgccgacaagggggccgccgaagccgggccgcgggggctgtcgtgggcgcaggtggaggcgatgacgggcaggttcacctcggccgtcgtcggcgagggcgggttcagcaccgtgtacctcgcgcgcctctccggcggcgcgctggccgccgtcaaggtccaccgcagcagcgagcgcctccaccgcgtgttccgccaggagctcgacgcgctccgacgcgtccgccacccgcacatcgtccgcctccttgccttctgcgaccagcaagaggaaggcgtgctggtgctggagttcgcggcgaacgggaacctgcacgagcggctccacggcgggggcaaggcggcgggcacgatgccgtgggcgcggcgggtgtcggcggcgctgcaggtggcgcgggcgctcgagtacctgcacgaccgctgcgagccgcaggtggtgcacggcgacgtgaaggcctccaacgtgctcctggacgcggccatgtccgccaagctgtgcgacttcgggtcggcgcggacggggttctcggccgccgtgcgcccgcggccgtccgcgcgcaccgccatgctcggctccccggggtacgtcgacccgcactacatccgctcgggcgtcgtcaccaagaagaccgacgtgtacagcttcggcgtcctgctcctggagctcctcacggggatggaggccttctgcgcggaggagggcggccgcctcctcaccgccgccgtcgcgccgcggctcagggccggcgacccgccccgcgggatggtcgacgagaggctcggcaccgcctacgacgccgccgaggccgccgccgtggcggcgctggccgctgcctgtgtcggcgagaaccccagcctccggccgtccatggccgacgtggtgcgcaccctggagcagagcgcgcagggatccatctccgccgtggggatggcatcggacggtcactggaaggtgtgagtcaccagtggaaagtcgtcgcctccgccgacgcgctcagatctggctccccgagtcgttaacttgcggtgctcatgcgcatgcgtcgcgcacgtggcgcccatccattggttgcgaggagaacaaagcgttgttagtaggcgagcatatcaaaaagaaagaggggacaaaagcgtggtgaaaaaacgttgatttccatagctaaattaggggaagacttggggagataaaaaggcagagctaagttgtgtgctgatggggatttccatcatattatgccaaagcggcatctacttgagagagacaaaaaaaagagaggatctttgcagcgcacgattccaagattttgttgattc

SEQ ID NO: 5267 - protein, 415 aa, Zea mays subsp. mays
  peptide (1)..(415): Ceres Seq. ID no. 12566453
VHRDTNTERQRAGGGTISLPSSSPTQVLSSPLCFVQETSLDKDGSAELLQVILLRVRRQCGGRRPGRRRGRGFRGVRRQGGRRSRAAGAVVGAGGGDDGQVHLGRRRRGRVQHRVPRAPLRRRAGRRQGPPQQRAPPPRVPPGARRAPTRPPPAHRPPPCLLRPARGRRAGAGVRGEREPARAAPRRGQGGGHDAVGAAGVGGAAGGAGARVPARPLRAAGGARRREGLQRAPGRGHVRQAVRLRVGADGVLGRRAPAAVRAHRHARLPGVRRPALHPLGRRHQEDRRVQLRRPAPGAPHGDGGLLRGGGRPPPHRRRRAAAQGRRPAPRDGRREARHRLRRRRGRRRGGAGRCLCRREPQPPAVHGRRGAHPGAERAGIHLRRGDGIGRSLEGVSHQWKVVASADALRSGSPSR

SEQ ID NO: 5268 - protein, 395 aa, Zea mays subsp. mays
  peptide (1)..(395): Ceres Seq. ID no. 12566454
KYTEIQIQRGRGQAEAPSPSLLHRPHKSSHLLSVSCKKLPWTKMGVQSYYRLFCCGCGANAAAGDREGDEDGGFEAFADKGAAEAGPRGLSWAQVEAMTGRFTSAVVGEGGFSTVYLARLSGGALAAVKVHRSSERLHRVFRQELDALRRVRHPHIVRLLAFCDQQEEGVLVLEFAANGNLHERLHGGGKAAGTMPWARRVSAALQVARALEYLHDRCEPQVVHGDVKASNVLLDAAMSAKLCDFGSARTGFSAAVRPRPSARTAMLGSPGYVDPHYIRSGVVTKKTDVYSFGVLLLELLTGMEAFCAEEGGRLLTAAVAPRLRAGDPPRGMVDERLGTAYDAAEAAAVAALAAACVGENPSLRPSMADVVRTLEQSAQGSISAVGMASDGHWKV

SEQ ID NO: 5269 - protein, 352 aa, Zea mays subsp. mays
  peptide (1)..(352): Ceres Seq. ID no. 12566455
MGVQSYYRLFCCGCGANAAAGDREGDEDGGFEAFADKGAAEAGPRGLSWAQVEAMTGRFTSAVVGEGGFSTVYLARLSGGALAAVKVHRSSERLHRVFRQELDALRRVRHPHIVRLLAFCDQQEEGVLVLEFAANGNLHERLHGGGKAAGTMPWARRVSAALQVARALEYLHDRCEPQVVHGDVKASNVLLDAAMSAKLCDFGSARTGFSAAVRPRPSARTAMLGSPGYVDPHYIRSGVVTKKTDVYSFGVLLLELLTGMEAFCAEEGGRLLTAAVAPRLRAGDPPRGMVDERLGTAYDAAEAAAVAALAAACVGENPSLRPSMADVVRTLEQSAQGSISAVGMASDGHWKV

SEQ ID NO: 5270 - DNA, 1415 bp, Zea mays subsp. mays
  misc_feature (1)..(1415): Ceres Seq. ID no. 12409621
  misc_feature (1)..(1415): Ortholog of  Ceres SEQ ID NO 14307670 as cited in SEQ ID NO 59594
gtcggcgaccccaaacctctgtcgagagtttcacctccggtcgctggtttcctccaatctccgtggtagttcagcgcgagcgggcggcggggtttgagctcgatggccacttccggcgaacaatcggctggcggcgggtctgcggcgagggcgtcgaagctgcggtacccgctgcggtcggcgagcaaggggaaggcggcggtcgttcccccggcggctgatgctcctcccaccatctctgctccgcgacgggcaaaaccatcttcagatgtcagcaagagcatgtgtttagacctttctgtgaaggataattctgccaaacccccacggaggcactcaatacaaaccaagctaggagctagtccaaggccaacaccttctggaactgtgactccggtgtctggggttcggtcaaagagatcggaaagccaggggaggtttgataccccgacatcagaagtgtccatgtccatctcaaggcgcaagttcagcacgctttcttcaatctcgtactggatgacacagatcaggctggcagaggctgcttccaagcactcggtttctctgggcttctttaagcttgctcttgaatcagaatgtgagcctttggaccggatgagggaagaactcaagtcctacgtagcacggcatggcctggcgacagaattggaggacccagttaaggacattctccaggtttatgatattttggatgattttgagaagctgaagatctctgcagagccctcacagcaaccaaaaaagtctgacaaggctgctcgtactgccacaaatgcgtcaccgaatggtaacctgaagccaagatcactgaactctgatgctactgaaagcaaggatgctgtaaagaaagagggcatccagaaagtaaatcctggtgcaagggtcagaggctcctgtaacaggaatccagtcaaaaacaccaccgcaaaggaagcagttgccaagaacaccggtaaggaaaccaagaaaggggccaagggtcagcaggaagttagcgaggctccgtcagcccttccaaatcaggaatctgctgatgttgtgaaggagatgacccatgaagataaagagaacaatggcgatattgaaatggcagtggatgttgccgtagcccaagatatctagaacagccggaccaacttcagattcgatccccttttttttctatcgctgaagatgaagtgttagcgtgtggttgcttattttggttttcaattgttaatatgttattagtagagcttgtctgtgtgattgctgtctggctggaccttgaacggtcttcaagagcgtgtcataagttgatgattgctttcattcctctgtcaagtttgcggctttgcatgtgataatccgtgcaactgaatatagttgaatttatctattctcgtggttcctcc

SEQ ID NO: 5271 - protein, 346 aa, Zea mays subsp. mays
  peptide (1)..(346): Ceres Seq. ID no. 12409622
MATSGEQSAGGGSAARASKLRYPLRSASKGKAAVVPPAADAPPTISAPRRAKPSSDVSKSMCLDLSVKDNSAKPPRRHSIQTKLGASPRPTPSGTVTPVSGVRSKRSESQGRFDTPTSEVSMSISRRKFSTLSSISYWMTQIRLAEAASKHSVSLGFFKLALESECEPLDRMREELKSYVARHGLATELEDPVKDILQVYDILDDFEKLKISAEPSQQPKKSDKAARTATNASPNGNLKPRSLNSDATESKDAVKKEGIQKVNPGARVRGSCNRNPVKNTTAKEAVAKNTGKETKKGAKGQQEVSEAPSALPNQESADVVKEMTHEDKENNGDIEMAVDVAVAQDI

SEQ ID NO: 5272 - protein, 286 aa, Zea mays subsp. mays
  peptide (1)..(286): Ceres Seq. ID no. 12409623
MCLDLSVKDNSAKPPRRHSIQTKLGASPRPTPSGTVTPVSGVRSKRSESQGRFDTPTSEVSMSISRRKFSTLSSISYWMTQIRLAEAASKHSVSLGFFKLALESECEPLDRMREELKSYVARHGLATELEDPVKDILQVYDILDDFEKLKISAEPSQQPKKSDKAARTATNASPNGNLKPRSLNSDATESKDAVKKEGIQKVNPGARVRGSCNRNPVKNTTAKEAVAKNTGKETKKGAKGQQEVSEAPSALPNQESADVVKEMTHEDKENNGDIEMAVDVAVAQDI

SEQ ID NO: 5273 - protein, 225 aa, Zea mays subsp. mays
  peptide (1)..(225): Ceres Seq. ID no. 12409624
MSISRRKFSTLSSISYWMTQIRLAEAASKHSVSLGFFKLALESECEPLDRMREELKSYVARHGLATELEDPVKDILQVYDILDDFEKLKISAEPSQQPKKSDKAARTATNASPNGNLKPRSLNSDATESKDAVKKEGIQKVNPGARVRGSCNRNPVKNTTAKEAVAKNTGKETKKGAKGQQEVSEAPSALPNQESADVVKEMTHEDKENNGDIEMAVDVAVAQDI

SEQ ID NO: 5274 - DNA, 1097 bp, Zea mays subsp. mays; identical to SEQ ID NO: 3807
  misc_feature (1)..(1097): Ceres Seq. ID no. 13494437
  misc_feature (1)..(1097): Ortholog of  Ceres SEQ ID NO 14304202 as cited in SEQ ID NO 56346
  misc_feature (1)..(1097): Ortholog of  Ceres SEQ ID NO 12613472 as cited in SEQ ID NO 60611

SEQ ID NO: 5275 - protein, 225 aa, Zea mays subsp. mays; identical to SEQ ID NO: 3808
  peptide (1)..(225): Ceres Seq. ID no. 13494438

SEQ ID NO: 5276 - protein, 149 aa, Zea mays subsp. mays; identical to SEQ ID NO: 3809
  peptide (1)..(149): Ceres Seq. ID no. 13494439

SEQ ID NO: 5277 - protein, 125 aa, Zea mays subsp. mays; identical to SEQ ID NO: 3810
  peptide (1)..(125): Ceres Seq. ID no. 13494440

SEQ ID NO: 5278 - DNA, 1465 bp, Zea mays subsp. mays
  misc_feature (1)..(1465): Ceres Seq. ID no. 12409617
  misc_feature (1)..(1465): Ortholog of  Ceres SEQ ID NO 15170239 as cited in SEQ ID NO 54977
  misc_feature (1)..(1465): Ortholog of  Ceres SEQ ID NO 12615622 as cited in SEQ ID NO 62802
  misc_feature (1)..(1465): Ortholog of  Ceres SEQ ID NO 13596203 as cited in SEQ ID NO 68499
agctgcagccagagccacccaccttatcgtcatcctcgctcgctcctcatcgccagcgcctcctcctcctcctccttcttccccaccgctgccgacatggctgcgcaagaagagaagaccgctgttgttgttgctgctgctgccgatgtcgcgacagaggagcctacgccggcggcggagcagcaacctcagccggctggggcggcgcgcagggcaggaccatcggcgcccggcggggctccgcccaaccccttcgacttctccaccatgatgaaccttctcaatgaccctagcatcaaggagatggcagagcagatcgccaaggacccggcgttcacggagatggcggagcagctgcagaagacggtggtgtccccgcggcagcaacagcagcagcaggcgcggcagcagcagcagcagctggacccgcagaagtacgtggcgacgatgcagcagctgatgcagaacccgcagttcgtggccatggcggagcggctaggcagcgcgctgatgcaggaccctgccatgtccgccatgctggggggcctcaccaacccggcgcacaaggagcagctggaggcccgcgtcgcgcgcatgaaagaggaccccacgctcaagcccatcctcgacgagatcgagtccggcggccccgccgccatgatgaagtactggaacgaccctgaggctctgcagaagttcggccgcgcgatgggcgtcggcgtcggcccgtccggcgaggccggcggtgcggagcacgccgaggcggaggacgacgctggggaggaaggcgagtatgaggacgagtccatcgtccaccacaccgccagtgttggcgacgtcgagggcctcaagaaagcgctggaggacggcgcggacaaggacgaggaggactcggaagggcggcgtggcctccacttcgcgtgcggctacggcgagctccagtgcgcgcaggcgctcctggaggccggcgccgcggtggacgccgtcgacaagaacaagaacaccgcgctgcactacgccgccggatacggccgcaaggactgcgtcgcgctccttctcgagagcggcgccgccgtgacgctgcagaacctggacgggaagacgcccatcgacgtggccaagctcaacaaccaggatgacgtcctcaagctgctggagaagcacgccttcgtatagacgtcccatgccgccggccggcccgtcttgctcgtctgctcctgtcgccgccgccgccgccacgtcgcttgcctctgctactgctgctgccgccaccgccattaatgctttgttaatttctctcctggtgtagacaacgcaggttccttcatcacttcactgttgagtatttgcattgggtgtgtatgtatcggattttgctttgcgtgatcacggtatcatatttatttgtcggactcctcgttcatcaggaggttttcgtaatgaataaggaagaaatttccatttc

SEQ ID NO: 5279 - protein, 391 aa, Zea mays subsp. mays
  peptide (1)..(391): Ceres Seq. ID no. 12409618
SCSQSHPPYRHPRSLLIASASSSSSFFPTAADMAAQEEKTAVVVAAAADVATEEPTPAAEQQPQPAGAARRAGPSAPGGAPPNPFDFSTMMNLLNDPSIKEMAEQIAKDPAFTEMAEQLQKTVVSPRQQQQQQARQQQQQLDPQKYVATMQQLMQNPQFVAMAERLGSALMQDPAMSAMLGGLTNPAHKEQLEARVARMKEDPTLKPILDEIESGGPAAMMKYWNDPEALQKFGRAMGVGVGPSGEAGGAEHAEAEDDAGEEGEYEDESIVHHTASVGDVEGLKKALEDGADKDEEDSEGRRGLHFACGYGELQCAQALLEAGAAVDAVDKNKNTALHYAAGYGRKDCVALLLESGAAVTLQNLDGKTPIDVAKLNNQDDVLKLLEKHAFV

SEQ ID NO: 5280 - protein, 359 aa, Zea mays subsp. mays
  peptide (1)..(359): Ceres Seq. ID no. 12409619
MAAQEEKTAVVVAAAADVATEEPTPAAEQQPQPAGAARRAGPSAPGGAPPNPFDFSTMMNLLNDPSIKEMAEQIAKDPAFTEMAEQLQKTVVSPRQQQQQQARQQQQQLDPQKYVATMQQLMQNPQFVAMAERLGSALMQDPAMSAMLGGLTNPAHKEQLEARVARMKEDPTLKPILDEIESGGPAAMMKYWNDPEALQKFGRAMGVGVGPSGEAGGAEHAEAEDDAGEEGEYEDESIVHHTASVGDVEGLKKALEDGADKDEEDSEGRRGLHFACGYGELQCAQALLEAGAAVDAVDKNKNTALHYAAGYGRKDCVALLLESGAAVTLQNLDGKTPIDVAKLNNQDDVLKLLEKHAFV

SEQ ID NO: 5281 - protein, 302 aa, Zea mays subsp. mays
  peptide (1)..(302): Ceres Seq. ID no. 12409620
MMNLLNDPSIKEMAEQIAKDPAFTEMAEQLQKTVVSPRQQQQQQARQQQQQLDPQKYVATMQQLMQNPQFVAMAERLGSALMQDPAMSAMLGGLTNPAHKEQLEARVARMKEDPTLKPILDEIESGGPAAMMKYWNDPEALQKFGRAMGVGVGPSGEAGGAEHAEAEDDAGEEGEYEDESIVHHTASVGDVEGLKKALEDGADKDEEDSEGRRGLHFACGYGELQCAQALLEAGAAVDAVDKNKNTALHYAAGYGRKDCVALLLESGAAVTLQNLDGKTPIDVAKLNNQDDVLKLLEKHAFV

SEQ ID NO: 5282 - DNA, 1486 bp, Zea mays subsp. mays
  misc_feature (1)..(1486): Ceres Seq. ID no. 12356243
  misc_feature (1)..(1486): Ortholog of  Ceres SEQ ID NO 14315455 as cited in SEQ ID NO 56988
  misc_feature (1)..(1486): Ortholog of  Ceres SEQ ID NO 13596921 as cited in SEQ ID NO 62368
acgggaccggtaacttctagaacccaccaccttccatccttccttcctttcctctctctctctctctcctcgcgcccacggtgcccgccagccagatccgcgcgttcaccggcgccatggccgccgagcatgccaccgccgcggtgggtgagccgcctcccgccacgtcgcagccggcggagggcgtgacggcggcggcgggccagaggtccgtgcccacgccgttcctcagcaagacgtaccagctggtggacgacccggcggtggacgacatcatctcgtggaacgacgacgggtctgccttcatcgtgtggcgcccggcggagttcgcgcgcgatctgttgcccaagtacttcaagcacaacaacttctccagcttcgtgcgccagctcaacacctacgggttcaggaagatcgtgccggacaggtgggagttcgcgaacgactgcttccgccgaggggagaagcggctgctctgcgacatacaccgccggaaggtgtcgccggccacgggggcggtcacggtggccgccgccgccgctgcggccatcccgatggcgctgcccgtgggctctccggtgtactccggcgaggagcaggtgctgtcaagctcgtccccggagcccccgtcgctgcagcagcacccgccggcgccgtccgggtcgggctccggcggggtggtctcgggcgacgtgggcgaggagaacgagcggttgcggcgggagaacgcgcggctggcgcgcgagctcggacagatgaagaagctctgcaacaacatcctcctcctcatgtccaagtacgccgccactcagcagccggacgccgccaaggaggcggccgccgggaactgcaccggcgagtcgtcggatgccgccgcggcgcctccgctcccttcgatcctggagctcctaccctcgtgccgcgccgaccccgcgcccgctgnagccggaacggatcacgaggatgacgaaaaggcgggcgctaggctgttcggcgtctccatcgggcggaaacgaatgcgggacgagagcgaccaccacgccggcgtctgcgcagcggaggtgaaagccgagccggtggacgcgcgtcccgaccagcagcggcagcgcaacgccacggagccgcagtcgtggcccatttaccggcccaggcctgtgtaccacccgctccgggcctgcaacggctcgggcagcgctgggagcgaccacgacgggtccaacgactcgaggtgacgggagcaatcgtcgatctgccctcagtaaattagtattacacttactaatggtactaggtaactatattacaggttaaactaggatgtgagctctaaatctctaattatgtggggatttactgaccgatcctatgtaaaaatctccagtgtttatgtagttgatctcatattactgcaagtaccgagtatcctttctgtaccataaaactagaggttaacttatgcacagtagactaatattttctttaagtc

SEQ ID NO: 5283 - protein, 371 aa, Zea mays subsp. mays
  peptide (1)..(371): Ceres Seq. ID no. 12356244
  misc_feature (276)..(276): Xaa is any aa, unknown or other
MAAEHATAAVGEPPPATSQPAEGVTAAAGQRSVPTPFLSKTYQLVDDPAVDDIISWNDDGSAFIVWRPAEFARDLLPKYFKHNNFSSFVRQLNTYGFRKIVPDRWEFANDCFRRGEKRLLCDIHRRKVSPATGAVTVAAAAAAAIPMALPVGSPVYSGEEQVLSSSSPEPPSLQQHPPAPSGSGSGGVVSGDVGEENERLRRENARLARELGQMKKLCNNILLLMSKYAATQQPDAAKEAAAGNCTGESSDAAAAPPLPSILELLPSCRADPAPAXAGTDHEDDEKAGARLFGVSIGRKRMRDESDHHAGVCAAEVKAEPVDARPDQQRQRNATEPQSWPIYRPRPVYHPLRACNGSGSAGSDHDGSNDSR

SEQ ID NO: 5284 - protein, 225 aa, Zea mays subsp. mays
  peptide (1)..(225): Ceres Seq. ID no. 12356245
  misc_feature (130)..(130): Xaa is any aa, unknown or other
MALPVGSPVYSGEEQVLSSSSPEPPSLQQHPPAPSGSGSGGVVSGDVGEENERLRRENARLARELGQMKKLCNNILLLMSKYAATQQPDAAKEAAAGNCTGESSDAAAAPPLPSILELLPSCRADPAPAXAGTDHEDDEKAGARLFGVSIGRKRMRDESDHHAGVCAAEVKAEPVDARPDQQRQRNATEPQSWPIYRPRPVYHPLRACNGSGSAGSDHDGSNDSR

SEQ ID NO: 5285 - DNA, 1513 bp, Zea mays subsp. mays
  misc_feature (1)..(1513): Ceres Seq. ID no. 12409609
  misc_feature (1)..(1513): Ortholog of  Ceres SEQ ID NO 14306667 as cited in SEQ ID NO 52925
  misc_feature (1)..(1513): Ortholog of  Ceres SEQ ID NO 15177522 as cited in SEQ ID NO 0
accccacccccacgcgaagaggaagaggaagaacccagccaaatcctcagtcctcaggctgctcacagttcgtgctatccgctcgcgctcccggtagtctgcctgctcggcaattcggcatggcgctccaggccgcgacgtccttcctcccctcggccctctcggcgcgcaaggaggggtcgtcggtgaaggactcggcgttcttgggtgtccatctcgcggacgatggcctcaagctggagaccgctgctctgggcctacgcaccaagagggtgatcacgtcggtggccatccgcgcgcaggcggcagcggtgtcctcaccatcagtaacccccgcgtcgccgtccggcaagaagacgctccgcaagggcacggcgatcataaccggcgcgtcgtccggtctcggcctggccacggcgaaggccctggcggagaccggcaagtggcacgtcatcatggcctgccgcgattttctcaaggcgtcgcgcgcggccaaagcggccggcatggacaaggacagcttcaccgtcgtgcacctggacctcgcctccctcgacagcgtccgccagttcgtcaagaacgtgcgccagctggagatgcccgtcgacgtggtggtctgcaacgccgccgtgtaccagcccaccgccaaggagccgtcctacaccgccgacggcttcgagatgagcgtcggcgtcaaccacctcggccacttcctcctcgcccgcgagctcctcagcgacctccagtcctccgactatccctccaagcgcctcatcatcgtcggctccatcaccgggaacacgaacacgctggcggggaacgtgccgccgaaggcgaacctgggtgacctgcgcggcctcgccggcggcctcaacggcattggcggctccgcgatgatcgacggcggggagttcgacggggccaaggcatacaaggacagcaaggtgtgcaacatgctgacgatgcaggagttccaccgccggtaccacgaggagacgggcgtgaccttcgcgtcgctctaccccggctgcatcgccaccacgggcctgttccgcgagcacatcccgctgttccgcctgctcttcccgccattccagaagtacatcaccaaggggtacgtctccgaggaggaggccgggaagcggctgtcgcaggtcgtgagcgaccccagcctgaccaagtccggcgtgtactggagctggaacaagaactcggcgtccttcgagaaccagctctctgaggaggccagcgacgccgacaaggccaagaagctctgggagatcagcgagaagctcgtcggcttggcgtgacgacctgatgcccaccgtggccggcgccggcagccggtgacagttttttcctaggacatgttcgttacttgatctcagtcgacgcgtggtgcactcgtgtcagagtgacaggagaggaagtgtgtacactgtacacgtgtaggcatgtttggttgacttttttgttacgaggttttctgataatatagctgtggagagaatct

SEQ ID NO: 5286 - protein, 435 aa, Zea mays subsp. mays
  peptide (1)..(435): Ceres Seq. ID no. 12409610
PTPTRRGRGRTQPNPQSSGCSQFVLSARAPGSLPARQFGMALQAATSFLPSALSARKEGSSVKDSAFLGVHLADDGLKLETAALGLRTKRVITSVAIRAQAAAVSSPSVTPASPSGKKTLRKGTAIITGASSGLGLATAKALAETGKWHVIMACRDFLKASRAAKAAGMDKDSFTVVHLDLASLDSVRQFVKNVRQLEMPVDVVVCNAAVYQPTAKEPSYTADGFEMSVGVNHLGHFLLARELLSDLQSSDYPSKRLIIVGSITGNTNTLAGNVPPKANLGDLRGLAGGLNGIGGSAMIDGGEFDGAKAYKDSKVCNMLTMQEFHRRYHEETGVTFASLYPGCIATTGLFREHIPLFRLLFPPFQKYITKGYVSEEEAGKRLSQVVSDPSLTKSGVYWSWNKNSASFENQLSEEASDADKAKKLWEISEKLVGLA

SEQ ID NO: 5287 - protein, 396 aa, Zea mays subsp. mays
  peptide (1)..(396): Ceres Seq. ID no. 12409611
MALQAATSFLPSALSARKEGSSVKDSAFLGVHLADDGLKLETAALGLRTKRVITSVAIRAQAAAVSSPSVTPASPSGKKTLRKGTAIITGASSGLGLATAKALAETGKWHVIMACRDFLKASRAAKAAGMDKDSFTVVHLDLASLDSVRQFVKNVRQLEMPVDVVVCNAAVYQPTAKEPSYTADGFEMSVGVNHLGHFLLARELLSDLQSSDYPSKRLIIVGSITGNTNTLAGNVPPKANLGDLRGLAGGLNGIGGSAMIDGGEFDGAKAYKDSKVCNMLTMQEFHRRYHEETGVTFASLYPGCIATTGLFREHIPLFRLLFPPFQKYITKGYVSEEEAGKRLSQVVSDPSLTKSGVYWSWNKNSASFENQLSEEASDADKAKKLWEISEKLVGLA

SEQ ID NO: 5288 - protein, 284 aa, Zea mays subsp. mays
  peptide (1)..(284): Ceres Seq. ID no. 12409612
MACRDFLKASRAAKAAGMDKDSFTVVHLDLASLDSVRQFVKNVRQLEMPVDVVVCNAAVYQPTAKEPSYTADGFEMSVGVNHLGHFLLARELLSDLQSSDYPSKRLIIVGSITGNTNTLAGNVPPKANLGDLRGLAGGLNGIGGSAMIDGGEFDGAKAYKDSKVCNMLTMQEFHRRYHEETGVTFASLYPGCIATTGLFREHIPLFRLLFPPFQKYITKGYVSEEEAGKRLSQVVSDPSLTKSGVYWSWNKNSASFENQLSEEASDADKAKKLWEISEKLVGLA

SEQ ID NO: 5289 - DNA, 848 bp, Zea mays subsp. mays
  misc_feature (1)..(848): Ceres Seq. ID no. 13498757
  misc_feature (1)..(848): Ortholog of  Ceres SEQ ID NO 15180555 as cited in SEQ ID NO 1214
  misc_feature (1)..(848): Ortholog of  Ceres SEQ ID NO 13594498 as cited in SEQ ID NO 51322
  misc_feature (1)..(848): Ortholog of  Ceres SEQ ID NO 15179033 as cited in SEQ ID NO 0
acacaccccagtttcttccttccttcctcggtctaaagaagcaagcagccatggacggcgacgtcgcgaccggcggcgtgcgggggcaccagcatccacatcacggcgctggacggcatcgtgaacgtgaattcgctcttcaccctggccgccttcctgggcctggcgtggcggccctcctccgacgggccggggctcgccgacggcgccgaccgcacgggcaacccctgcgccgcgggggaccgcgccgagtcggacctcgtctccttccacgtgctcgccttcgcctgcttcctcttctccagcctcgtcgcgctctgcctcaagcagctcgtccgcacctaccccgcgccccaccgccgccgcgccgcctccgcctccgcctccgccgccggcggcccgcaccgcgcggatcaaccgcgcggcgctccgcgtcgggatcctcgcgtccgccgtggggtccgtcgccggatgcggcttcctgatgatggccctcgtcaacgtggtgcaggtgaagctcgggcgactcgggtgcggcgccggcggggccgccgcctgggccgccgtcgtgccgctcgtcaccctcgtcccttccgccatgctcatctacatcggcaccgtcttctacgccttcacacgctagtcggtggcggatcaaggaacactctgaccaaagcacccgtttttcgatcagatctttatctgtgtgatccctcctcagtctttcttgtgtgtgattggtggtgatggcgtgagagaacttccaggggggaacaatgcagctgacttttgtagatttaagatatgtaaaatccatgcgatattatgattgtgttttggagttttgg

SEQ ID NO: 5290 - protein, 160 aa, Zea mays subsp. mays
  peptide (1)..(160): Ceres Seq. ID no. 13498758
TPQFLPSFLGLKKQAAMDGDVATGGVRGHQHPHHGAGRHREREFALHPGRLPGPGVAALLRRAGARRRRRPHGQPLRRGGPRRVGPRLLPRARLRLLPLLQPRRALPQAARPHLPRAPPPPRRLRLRLRRRRPAPRGSTARRSASGSSRPPWGPSPDAAS

SEQ ID NO: 5291 - protein, 144 aa, Zea mays subsp. mays
  peptide (1)..(144): Ceres Seq. ID no. 13498759
MDGDVATGGVRGHQHPHHGAGRHREREFALHPGRLPGPGVAALLRRAGARRRRRPHGQPLRRGGPRRVGPRLLPRARLRLLPLLQPRRALPQAARPHLPRAPPPPRRLRLRLRRRRPAPRGSTARRSASGSSRPPWGPSPDAAS

SEQ ID NO: 5292 - protein, 91 aa, Zea mays subsp. mays
  peptide (1)..(91): Ceres Seq. ID no. 13498760
MRLPDDGPRQRGAGEARATRVRRRRGRRLGRRRAARHPRPFRHAHLHRHRLLRLHTLVGGGSRNTLTKAPVFRSDLYLCDPSSVFLVCDWW

SEQ ID NO: 5293 - DNA, 1629 bp, Zea mays subsp. mays
  misc_feature (1)..(1629): Ceres Seq. ID no. 12409598
  misc_feature (1)..(1629): Ortholog of  Ceres SEQ ID NO 15170659 as cited in SEQ ID NO 67270
actaccgtcctgctccacgctcctcggttcccgtgctcgtgtcatcgaccgccggggcccactcaccagtctcccaacacgcagcgagcggcagctcctcctcgtctctcaaagtcgagccgccactcgattaagcgattccaaggcggagcggtgaggtggctatggagtacaggagggtgaaggatcagatttatgatgatttatctcagaaggatgtggaaagcctgagtgggaggacactatctagtgccaatactacagctattggtcccgcttctgcaggaggcgcaaaagccaactctagttggaagctaaagtctgttgttactcttgcattgacattgctaacaagttctcaggcaatattaattgtgtggtcaaaaagagctggaaaatatgaatatagtgtcacaacagctaatttttcggtggaggctttaaaatgccttctatcactagctgctctttttaggacgtggaactgccatggtgtcactgatgataatagattaaccacatcttttgatgaagttggtgtatatccgattcctgctgttctttacatggtaaagaacttattgcagtactatatctttgtctacgtggatgcaccagcttatcaaatcttgaagaacctaaatatcatcagcacaggtgttttgtaccgcatcattttgaagaaaaagctaagtgaaattcagtgggcagcatttgttcttctatgtgctggttgcacaacagctcaacttaatccttcgtctgaccatgtgcttcaaactcctattcaaggttggatgatggcaattgtgatggctcttttgagtggttttgctggggtgtatacagaagctatcattaaaaaacggccatcaagaaacatcaacgtgcagaacttttggctatacatatttggggtgatcttcaatctagttgcaatttgtgttcaggattatgatgcagtcatgaataaaggctttttccatgggtattcattcatcacagttttgatgattctgaaccacgcactgagtggaattgctgtttcaatggtgatgaaatatgctgataacatagtcaaggtctattcaacttcagttgcaatgcttctgacagcagttgtatctgtcttcttgttcaacttccatttatccctcgcattcttccttggatccacagttgtttccgtctcagtgtacctgcactcaattggaaaacttcaaccacagaaataaggattggtgaagatggaatatgggattcattatcggtgtttggtgctttgaggctataagaaaagcttcagtggagatgagatttgattgcatagttgtgaaagttagtaggtggtcaaagtaagaaccagaaatgtatttttggaggggttctagctattatccggtctagtttttgttctattctatcaagtcgagttcgttgatcgctaaccgcatccgtgcctagtttttgatatatcaaacgcacatttattgtaatgctagtattttgaaatactaggtagtacccaattgttgtatggagctagttgtcttttcattctaatgtatagaattaccattctttttaccaccgagcgtgtggaccgatgttgaggccctttttactccc

SEQ ID NO: 5294 - protein, 356 aa, Zea mays subsp. mays
  peptide (1)..(356): Ceres Seq. ID no. 12409599
MEYRRVKDQIYDDLSQKDVESLSGRTLSSANTTAIGPASAGGAKANSSWKLKSVVTLALTLLTSSQAILIVWSKRAGKYEYSVTTANFSVEALKCLLSLAALFRTWNCHGVTDDNRLTTSFDEVGVYPIPAVLYMVKNLLQYYIFVYVDAPAYQILKNLNIISTGVLYRIILKKKLSEIQWAAFVLLCAGCTTAQLNPSSDHVLQTPIQGWMMAIVMALLSGFAGVYTEAIIKKRPSRNINVQNFWLYIFGVIFNLVAICVQDYDAVMNKGFFHGYSFITVLMILNHALSGIAVSMVMKYADNIVKVYSTSVAMLLTAVVSVFLFNFHLSLAFFLGSTVVSVSVYLHSIGKLQPQK

SEQ ID NO: 5295 - protein, 222 aa, Zea mays subsp. mays
  peptide (1)..(222): Ceres Seq. ID no. 12409600
MVKNLLQYYIFVYVDAPAYQILKNLNIISTGVLYRIILKKKLSEIQWAAFVLLCAGCTTAQLNPSSDHVLQTPIQGWMMAIVMALLSGFAGVYTEAIIKKRPSRNINVQNFWLYIFGVIFNLVAICVQDYDAVMNKGFFHGYSFITVLMILNHALSGIAVSMVMKYADNIVKVYSTSVAMLLTAVVSVFLFNFHLSLAFFLGSTVVSVSVYLHSIGKLQPQK

SEQ ID NO: 5296 - DNA, 1710 bp, Zea mays subsp. mays
  misc_feature (1)..(1710): Ceres Seq. ID no. 12366888
  misc_feature (1)..(1710): Ortholog of  Ceres SEQ ID NO 13596857 as cited in SEQ ID NO 62924
gcacgagaccattacctagaacatcctaatcgaaaaattgcgattaatcctcccatcatccatgtccattatatactatactccctagctagctcctagcaggcagagcagtgagctagctgtgtaagaagaagaggaggactggaggaggaagaagactatcgatcgatcgatccatccatccatccatccatcgaattaatggcggcgacaacaccgtacaagcccaagaggatcctgatcacgggcgccgcggggttcatcgcgtcccacgtggcgatccgcatcgtgaacaggtaccctgagtacaaggtggtggtgctggacaagcttgactactgctccaacctcaagaacctcctccccgtcatgggctccggcggcaacaacaacttcaagttcgtcaagggcgacatcgccagcgccgacctcgtcagcttcatcctggccaccgagggcatcgacaccgtgatgcacttcgcggcgcagacccacgtggacaactccttcggcaactccttggagttcaccaagaacaacatctacggcacccacgtcctcctcgagtcctgccgcaccgccgccgcccagatccgccgcttcatccacgtcagcaccgacgaggtgtacggcgagactgacggcgacgccgtggtgggcaaccacgaggcgtcgcagctgctgccccaccaacccgtacgcggccaccaaggcccggggcccgagatgctggtgatggcgtacggccggagctacggcctccccgtcatcaccacgcgcgggaacaacgtgtacgggcccaaccagttcccggagaagctcatccccaagttcatgctgctggccatgaggggccagcgcctgcccatccacggcgacggctccaacgtccgcagctacctctactgcgacgacgtggccgaggcgttcgaggtcgtcctccaccgcggcgaggtgggccacgtctacaacatcggcaccaagaaggagcgcacggtgatggacgtggccagggacatcagcggcctcttcggcgtgcgcccggaggaggccatccagttcgtcgacaacaggcccttcaacgaccagaggtacttcctcgacgacgagaagctcaaggggctcggctggcgcgagaggacgcgctgggaggatggcctcaggaagaccatggagtggtacgtggccaaccccgactactggggggacgtgtccggggcgctgctgccgcatcccaaggcgggcggcgtcagcgtcatgaccaccacgacggaccacggcgcccggagatcgtcgtcggagatgctcgacgatcgtttcatttccatcccctcttctccgggagcggcgacggttgcaggaaacgacgatgacggcgcaccagctgcaatgccgtacagcaatggcggcgccaccaatggaaccaccaccgtgcattgattgcatgcctgcctgggtcgtcgtttcgtcatatcacatcacatccacacctgaacaattataattgttttttcaagctattatttgtattatttgctactactactagatcgagtattattgttatgtagtatgttgtttgagtccgcacgtgccgttgtattccgctgttttgttggatccatcacctcccgttggattaaagtgagtatttaaactgtaaggacaaatttattattttaaaatggatatatatgaaatttgttgttg

SEQ ID NO: 5297 - protein, 412 aa, Zea mays subsp. mays
  peptide (1)..(412): Ceres Seq. ID no. 12366889
MAATTPYKPKRILITGAAGFIASHVAIRIVNRYPEYKVVVLDKLDYCSNLKNLLPVMGSGGNNNFKFVKGDIASADLVSFILATEGIDTVMHFAAQTHVDNSFGNSLEFTKNNIYGTHVLLESCRTAAAQIRRFIHVSTDEVYGETDGDAVVGNHEASQLLPHQPVRGHQGPGPEMLVMAYGRSYGLPVITTRGNNVYGPNQFPEKLIPKFMLLAMRGQRLPIHGDGSNVRSYLYCDDVAEAFEVVLHRGEVGHVYNIGTKKERTVMDVARDISGLFGVRPEEAIQFVDNRPFNDQRYFLDDEKLKGLGWRERTRWEDGLRKTMEWYVANPDYWGDVSGALLPHPKAGGVSVMTTTTDHGARRSSSEMLDDRFISIPSSPGAATVAGNDDDGAPAAMPYSNGGATNGTTTVH

SEQ ID NO: 5298 - protein, 356 aa, Zea mays subsp. mays
  peptide (1)..(356): Ceres Seq. ID no. 12366890
MGSGGNNNFKFVKGDIASADLVSFILATEGIDTVMHFAAQTHVDNSFGNSLEFTKNNIYGTHVLLESCRTAAAQIRRFIHVSTDEVYGETDGDAVVGNHEASQLLPHQPVRGHQGPGPEMLVMAYGRSYGLPVITTRGNNVYGPNQFPEKLIPKFMLLAMRGQRLPIHGDGSNVRSYLYCDDVAEAFEVVLHRGEVGHVYNIGTKKERTVMDVARDISGLFGVRPEEAIQFVDNRPFNDQRYFLDDEKLKGLGWRERTRWEDGLRKTMEWYVANPDYWGDVSGALLPHPKAGGVSVMTTTTDHGARRSSSEMLDDRFISIPSSPGAATVAGNDDDGAPAAMPYSNGGATNGTTTVH

SEQ ID NO: 5299 - protein, 322 aa, Zea mays subsp. mays
  peptide (1)..(322): Ceres Seq. ID no. 12366891
MHFAAQTHVDNSFGNSLEFTKNNIYGTHVLLESCRTAAAQIRRFIHVSTDEVYGETDGDAVVGNHEASQLLPHQPVRGHQGPGPEMLVMAYGRSYGLPVITTRGNNVYGPNQFPEKLIPKFMLLAMRGQRLPIHGDGSNVRSYLYCDDVAEAFEVVLHRGEVGHVYNIGTKKERTVMDVARDISGLFGVRPEEAIQFVDNRPFNDQRYFLDDEKLKGLGWRERTRWEDGLRKTMEWYVANPDYWGDVSGALLPHPKAGGVSVMTTTTDHGARRSSSEMLDDRFISIPSSPGAATVAGNDDDGAPAAMPYSNGGATNGTTTVH

SEQ ID NO: 5300 - DNA, 1318 bp, Zea mays subsp. mays
  misc_feature (1)..(1318): Ceres Seq. ID no. 12365440
  misc_feature (1)..(1318): Ortholog of  Ceres SEQ ID NO 14313147 as cited in SEQ ID NO 54166
  misc_feature (1)..(1318): Ortholog of  Ceres SEQ ID NO 13598882 as cited in SEQ ID NO 0
gctcactcgcccctcctcttctcctcgctcgcagcaagccgggaacgtacgaacagcacgagcaggggggaggggaagaagaggaggagacctaccataccatagattcagagccagatacccaatcagtatcctgctgtaccattaccaccaggcacgcaccagcaggttaccaaaatctcgtgtggagggaaatggcgcccagcagctacgaggtggcggcttccatcctcctctgcgccgaggacagcagcagcatcctggacctcgaagcggaggccgaggaggaagcgctactggcgcggagcggggagccccgcggcggcgcggagttccccgtgccgtccgaggaatgcgtcgccggtttcctggagactgaggcggcgcacatgccgcgggaggactacgccgagaggctgcgcggcgcggggatggatctccgcgtccggacggacgccatcgactggatttggaaggttcacacgtgctacggtttcggccctctcactgcctgcttggccgtcaactacctggaccgcttcctctcgctctaccagcttccggaaggcaaggcttggatgacacagctgctgtccgtggcgtgcttgtccctggccgccaagatggaggagacctacgtcccttcgtccctggacctgcaggccggggacgcgcggtacgtgttcgaggcgaagacgatccagaggatggagctcctggtcctcagcacgctcaagtggaggatgcaagcggtcacccccttgtcgtacgtcgactacttcctccaccggctccgaggcggcgccgcgccgagcagacgcgccgtcctccgatccgcggagctcatcctgtgcatcgccagagggacgcactgcttggatttcaggccctcggagatcgccttggccgtcgccgccaccgtggccggcgaagagcgcgccgtggacatcgacagggccttcacccaccgtgtacataaggagagggtgtcgcgatgcctcgaagcgatccagcaggccaccgccaccatggccctgccgcagccgctgaaaagtgaaggcccgagcagcagcggccgcagggcctcgtcttcctcggccaccgtgccgcggagccccaccggggtgctggacgctggctgcctgagctacaggagagccgccgccgccgccgcctcgcacgcgagctccagctggcgcgacgaggacgacgacgactgccccccggctgtctgcagcaagaggaggaagattagcagatgattaaagccaatgatggacggatgaaaaagtcaagcggtttttgatcgcactgactg

SEQ ID NO: 5301 - protein, 419 aa, Zea mays subsp. mays
  peptide (1)..(419): Ceres Seq. ID no. 12365441
SLAPPLLLARSKPGTYEQHEQGGGEEEEETYHTIDSEPDTQSVSCCTITTRHAPAGYQNLVWREMAPSSYEVAASILLCAEDSSSILDLEAEAEEEALLARSGEPRGGAEFPVPSEECVAGFLETEAAHMPREDYAERLRGAGMDLRVRTDAIDWIWKVHTCYGFGPLTACLAVNYLDRFLSLYQLPEGKAWMTQLLSVACLSLAAKMEETYVPSSLDLQAGDARYVFEAKTIQRMELLVLSTLKWRMQAVTPLSYVDYFLHRLRGGAAPSRRAVLRSAELILCIARGTHCLDFRPSEIALAVAATVAGEERAVDIDRAFTHRVHKERVSRCLEAIQQATATMALPQPLKSEGPSSSGRRASSSSATVPRSPTGVLDAGCLSYRRAAAAAASHASSSWRDEDDDDCPPAVCSKRRKISR

SEQ ID NO: 5302 - protein, 355 aa, Zea mays subsp. mays
  peptide (1)..(355): Ceres Seq. ID no. 12365442
MAPSSYEVAASILLCAEDSSSILDLEAEAEEEALLARSGEPRGGAEFPVPSEECVAGFLETEAAHMPREDYAERLRGAGMDLRVRTDAIDWIWKVHTCYGFGPLTACLAVNYLDRFLSLYQLPEGKAWMTQLLSVACLSLAAKMEETYVPSSLDLQAGDARYVFEAKTIQRMELLVLSTLKWRMQAVTPLSYVDYFLHRLRGGAAPSRRAVLRSAELILCIARGTHCLDFRPSEIALAVAATVAGEERAVDIDRAFTHRVHKERVSRCLEAIQQATATMALPQPLKSEGPSSSGRRASSSSATVPRSPTGVLDAGCLSYRRAAAAAASHASSSWRDEDDDDCPPAVCSKRRKISR

SEQ ID NO: 5303 - protein, 290 aa, Zea mays subsp. mays
  peptide (1)..(290): Ceres Seq. ID no. 12365443
MPREDYAERLRGAGMDLRVRTDAIDWIWKVHTCYGFGPLTACLAVNYLDRFLSLYQLPEGKAWMTQLLSVACLSLAAKMEETYVPSSLDLQAGDARYVFEAKTIQRMELLVLSTLKWRMQAVTPLSYVDYFLHRLRGGAAPSRRAVLRSAELILCIARGTHCLDFRPSEIALAVAATVAGEERAVDIDRAFTHRVHKERVSRCLEAIQQATATMALPQPLKSEGPSSSGRRASSSSATVPRSPTGVLDAGCLSYRRAAAAAASHASSSWRDEDDDDCPPAVCSKRRKISR

SEQ ID NO: 5304 - DNA, 1855 bp, Zea mays subsp. mays
  misc_feature (1)..(1855): Ceres Seq. ID no. 12409594
  misc_feature (1)..(1855): Ortholog of  Ceres SEQ ID NO 15176423 as cited in SEQ ID NO 53228
agccccgccctgtgcctctcgcggtcgcggcacggacggcaccctcgggcctcaggtcccaccctcgcctccgcccgcgccccgggcggtaccctcaccgccgggtccacctcgcctccgcccgcacaaacagccgaccgcccccctggccgcgacccgcgcccagaccacacgagcgcagtgcacgcaggcagaggagggccgcgcgagctctgcgcggtggcctgtggtggggcgagggaagcgaggcgaggcggcccggcagccgcctcctgactcagtcggtgggagctggaggtgcgagctgacggtccgggtcaccgaccggcagcacggcggccacagcggaggcaaccggcgggggcggcgaccccggggccgcggcgaggcagcgctgggacctgccggccggaaacattgcaatggggaaagaagttgttgatatgtctactgatgaagaatcagattgcgtagttatgtgtccacctaacagaaatgctgatcatgaggaagctgtgagtggcagccatgatgaagattcttcaggaaggcaagagaacccttatgctgtgaactcacatatgaacacccgtggccaggaagatgtgtctgtaaacccagacctgctcaagctgattcatcagcaggagtcttctgtcagcaattcaccatcaaaacctgcaggagctagacagcaagggtctagccatactgtccctgagtcatgcactattgcacctgaaagaaggtcatctggagcaggaacttgtgctccaatttcttatcccaccagcagcggggaaaaactttcagatataagtagctcctcaccaagaagcatgacaaagagtccatcagtcacatgcaggaagcctctccaatctgacaatacttctcacagtcaagaagaggactcatattctgtcacttcttcaactgtaacttcagcgagagctggaaaaactaagaagacaacggttgctgttgcacctacatttgtctgtgataatcgtgctgagaagagaggagagttttacacaaaattagaagaaaagcgcaaggctttggaagaggagaaactccaagcagaggccagaaagcaggaagaggaagaagaagctctaagacaactgaggaagaacttggtcgtccgagcgaaacccgtgccgagcttctaccaagaacccccaccaaaggttgaacttaagaaggtgcctccaactcgtgccaagtcaccaaagctgacgcggaggaagagctgcagcganacccntnacacaccagagggaggaaacggcggcggcggcgcagtgtgctgccggctgcaccgccacagcatcgggaactccaaagacgtcggcagcaaggcacaatgctctccaaagactggaccagctgctaagtccagggcgcccccaaatccagggaagacccgagggcttccatgaagaaagcgggacagcagccaagcgccgccgctgtacaaacctgacccgtgaagcatccattgcaatgccgtttttcatcttaatccatataccctcacatcacccggaaagatggcctcatgccccggcagcagacagtgtgcctggtgctggattgttttcttttttggggcgttgcccttgtaagaacctggctgcctgccagagaccgtgcgctgtgtccgtatctgtaaatttgctgcaagttttgtatggggtgaccgagtcggtcctgtgtgagaaccaaacggccgggcatattgtcattgcgtgggggcagcattcgctgatactatgtaatgtgacctgagtgagctgttgtaacctgttgtgggcacatattggcaaagcgattctgattgctgttg

SEQ ID NO: 5305 - protein, 341 aa, Zea mays subsp. mays
  peptide (1)..(341): Ceres Seq. ID no. 12409595
  misc_feature (282)..(282): Xaa is any aa, unknown or other
  misc_feature (284)..(284): Xaa is any aa, unknown or other
  misc_feature (285)..(285): Xaa is any aa, unknown or other
MGKEVVDMSTDEESDCVVMCPPNRNADHEEAVSGSHDEDSSGRQENPYAVNSHMNTRGQEDVSVNPDLLKLIHQQESSVSNSPSKPAGARQQGSSHTVPESCTIAPERRSSGAGTCAPISYPTSSGEKLSDISSSSPRSMTKSPSVTCRKPLQSDNTSHSQEEDSYSVTSSTVTSARAGKTKKTTVAVAPTFVCDNRAEKRGEFYTKLEEKRKALEEEKLQAEARKQEEEEEALRQLRKNLVVRAKPVPSFYQEPPPKVELKKVPPTRAKSPKLTRRKSCSXTXXTPEGGNGGGGAVCCRLHRHSIGNSKDVGSKAQCSPKTGPAAKSRAPPNPGKTRGLP

SEQ ID NO: 5306 - protein, 334 aa, Zea mays subsp. mays
  peptide (1)..(334): Ceres Seq. ID no. 12409596
  misc_feature (275)..(275): Xaa is any aa, unknown or other
  misc_feature (277)..(277): Xaa is any aa, unknown or other
  misc_feature (278)..(278): Xaa is any aa, unknown or other
MSTDEESDCVVMCPPNRNADHEEAVSGSHDEDSSGRQENPYAVNSHMNTRGQEDVSVNPDLLKLIHQQESSVSNSPSKPAGARQQGSSHTVPESCTIAPERRSSGAGTCAPISYPTSSGEKLSDISSSSPRSMTKSPSVTCRKPLQSDNTSHSQEEDSYSVTSSTVTSARAGKTKKTTVAVAPTFVCDNRAEKRGEFYTKLEEKRKALEEEKLQAEARKQEEEEEALRQLRKNLVVRAKPVPSFYQEPPPKVELKKVPPTRAKSPKLTRRKSCSXTXXTPEGGNGGGGAVCCRLHRHSIGNSKDVGSKAQCSPKTGPAAKSRAPPNPGKTRGLP

SEQ ID NO: 5307 - protein, 323 aa, Zea mays subsp. mays
  peptide (1)..(323): Ceres Seq. ID no. 12409597
  misc_feature (264)..(264): Xaa is any aa, unknown or other
  misc_feature (266)..(266): Xaa is any aa, unknown or other
  misc_feature (267)..(267): Xaa is any aa, unknown or other
MCPPNRNADHEEAVSGSHDEDSSGRQENPYAVNSHMNTRGQEDVSVNPDLLKLIHQQESSVSNSPSKPAGARQQGSSHTVPESCTIAPERRSSGAGTCAPISYPTSSGEKLSDISSSSPRSMTKSPSVTCRKPLQSDNTSHSQEEDSYSVTSSTVTSARAGKTKKTTVAVAPTFVCDNRAEKRGEFYTKLEEKRKALEEEKLQAEARKQEEEEEALRQLRKNLVVRAKPVPSFYQEPPPKVELKKVPPTRAKSPKLTRRKSCSXTXXTPEGGNGGGGAVCCRLHRHSIGNSKDVGSKAQCSPKTGPAAKSRAPPNPGKTRGLP

SEQ ID NO: 5308 - DNA, 1227 bp, Zea mays subsp. mays
  misc_feature (1)..(1227): Ceres Seq. ID no. 12414078
  misc_feature (1)..(1227): Ortholog of  Ceres SEQ ID NO 14305743 as cited in SEQ ID NO 52462
  misc_feature (1)..(1227): Ortholog of  Ceres SEQ ID NO 13623029 as cited in SEQ ID NO 0
ctttccgcccaaaacacttcccagccctccacgcaccccgctgccgcggctcgaacataaaccctagagccgccggcccggtcgcgctagcgacacaaatctcaaatcacccggagagaactcgctcgcgaaggctgaactcatggctcgcgtcttcgttgggaacctggatccgcgtgtcacggcgcgggagattgaggacgagttccgcacgtttggggttctgaagagtgtatgggttgctaggaaaccaccagggtttgccttcattgacttcgatgaccgcagggatgcacaagatgccattcgcgatttggatggtaagaatggttggagggttgagctgtcaaccaaagatggtggtggccgtggccgagaccgtaatggttctgatatgaagtgctatgagtgtggtgaagttggccactttgcacgtgaatgtcgcttacggattggttcgggagggctgggtagtggaaggcgtcgcagccgaagtcctagatatcgcagccggagccgaagtcgcagccggagcccaagacatcgaaggagcccaagctatggcagaaggagctacagcccacgagatcgttctcctaggaggcgaagttacagcaggtcgccgccactgccaccaccgcctcctagaaataacagcatgtcaccacggggagcccgagaaatgagcagatcgtcaccaccacctcccaaaaataacagcagttcaccacgggaagcccgagaaatgagcagatcgccaccaccacctgccaaaaataaccgcagttcaccacgggaagcccgagaaatgagcagatcgccgccgccaccacctcccagaaataacagcaggtcaccaccgggagctcgagatgtgagcaggtcgccgccaccacctcctgatgccagaagaagctatagcagatccccagaacagcagccccagcacgagtccccatatgccaatgacgcctgagaatatttagctgctcaaagatgctggaaaatgctaaggggcccagcatgttttgcccatgcgcgtcggtacaacttataggatccagtctgagattttgctcgtgttttgggtttcccttggacacaccgctgctgataccattgtagagggaggagcataacgtttccgtttcgagttgactttgggcacttatagctgtcaagacatgacctggttcttgttagatttatatcactagattgcttttg

SEQ ID NO: 5309 - protein, 277 aa, Zea mays subsp. mays
  peptide (1)..(277): Ceres Seq. ID no. 12414079
MARVFVGNLDPRVTAREIEDEFRTFGVLKSVWVARKPPGFAFIDFDDRRDAQDAIRDLDGKNGWRVELSTKDGGGRGRDRNGSDMKCYECGEVGHFARECRLRIGSGGLGSGRRRSRSPRYRSRSRSRSRSPRHRRSPSYGRRSYSPRDRSPRRRSYSRSPPLPPPPPRNNSMSPRGAREMSRSSPPPPKNNSSSPREAREMSRSPPPPAKNNRSSPREAREMSRSPPPPPPRNNSRSPPGARDVSRSPPPPPDARRSYSRSPEQQPQHESPYANDA

SEQ ID NO: 5310 - protein, 193 aa, Zea mays subsp. mays
  peptide (1)..(193): Ceres Seq. ID no. 12414080
MKCYECGEVGHFARECRLRIGSGGLGSGRRRSRSPRYRSRSRSRSRSPRHRRSPSYGRRSYSPRDRSPRRRSYSRSPPLPPPPPRNNSMSPRGAREMSRSSPPPPKNNSSSPREAREMSRSPPPPAKNNRSSPREAREMSRSPPPPPPRNNSRSPPGARDVSRSPPPPPDARRSYSRSPEQQPQHESPYANDA

SEQ ID NO: 5311 - DNA, 647 bp, Zea mays subsp. mays
  misc_feature (1)..(647): Ceres Seq. ID no. 12357877
  misc_feature (1)..(647): Ortholog of  Ceres SEQ ID NO 15173178 as cited in SEQ ID NO 64574
ctagccgcctgcctctcctcctccagagctcgtcgccaccggccaccgccaccctcgatcacgccgtccgtcgaggtaaggtcagcatggtgagggtcagtgtgctcaacgatgcgctcaagtccatgtacaacgctgagaagattggcaagaggcaggtcatgatcaggccgtcatccaaggtcatcatcaagttcctgacggtcatgcagcgccatggctacattggagagttcgagtacgttgatgaccaccgatcgggcaagattgtggtcgaactcaacgggaggctgaacaagtgcggcgtcatcagccctcgctttgatattggcgtgaaagacatcgagggatggactgcaaggctgctcccgtccaggcagttcggatacatcgtcctcacgacttcggcaggcatcatggaccacgaggaggcccgccggaagagcgtcggaggcaaggttctaggtttcttctattgaagaagctgagaatctttgttatggcctgcctgcctgtcttactctctcagactagagtacctgttattttactttaatatgtctctctcagactagagagccttcttttacttgaatattggttactgcattggtctttcactttaaaatcggtgactgcattgatcg

SEQ ID NO: 5312 - protein, 158 aa, Zea mays subsp. mays
  peptide (1)..(158): Ceres Seq. ID no. 12357878
SRLPLLLQSSSPPATATLDHAVRRGKVSMVRVSVLNDALKSMYNAEKIGKRQVMIRPSSKVIIKFLTVMQRHGYIGEFEYVDDHRSGKIVVELNGRLNKCGVISPRFDIGVKDIEGWTARLLPSRQFGYIVLTTSAGIMDHEEARRKSVGGKVLGFFY

SEQ ID NO: 5313 - protein, 130 aa, Zea mays subsp. mays; identical to SEQ ID NO: 3127
  peptide (1)..(130): Ceres Seq. ID no. 12357879

SEQ ID NO: 5314 - protein, 117 aa, Zea mays subsp. mays; identical to SEQ ID NO: 3129
  peptide (1)..(117): Ceres Seq. ID no. 12357880

SEQ ID NO: 5315 - DNA, 1531 bp, Zea mays subsp. mays
  misc_feature (1)..(1531): Ceres Seq. ID no. 12435048
  misc_feature (1)..(1531): Ortholog of  Ceres SEQ ID NO 14304148 as cited in SEQ ID NO 57313
  misc_feature (1)..(1531): Ortholog of  Ceres SEQ ID NO 13598513 as cited in SEQ ID NO 64102
gcacgagaccattacctagaacatcctaatcgaaaaaagtcgcatcgcacgccatcagcagctagcgcgctcctcgagcccagcagagaaaggccggcagcgctaatcgtaatagccatgggctccaccgccgccgacgtggccgcggtggtggacgaggaggcgtgcatgtacgcgatgcagctggcgtcgtcgtccatcctgccctgaagaacgccatcgagctgggcctgctggaggtgctgcagaaggaggccggcggcggcaaggcggcgctggcgccgaggaggtggtggcgcggatgcccgcggcgcccagcgaccccgccgccgccgcgncattggtggaccgcatgctccgcctgctcgcctcctacgacgtcgtccggtgccagatggaggaccgggacggccggtacgagcgccgctactccgccgcgcccgtctgcaagtggctcacccccaacgaggacggcgtgtccatggccgccctcgcgctcatgaaccaggacaaggtcctcatggagagctggtactatctcaaggacgcggtgctggacggcggcatcccgttcaacaaggcgtacgggatgacggcgttcgagtaccacggcacggacgcgcgcttcaaccgcgtgttcaacgagggcatgaagaaccactcggtgatcatcaccaagaagctgctggacttctacacgggcttcgagggcgtgtcgacgctggtggacgtgggcggcggcgtgggcgccacgctgcacgccatcacgtcccgccacccgcacatctccggggtcaacttcgacctgccgcacgtcatctccgaggcgccgccgttccccggcgtgcgccacgtgggcggggacatgttcgcgtccgtgcccgccggcgacgccatcctcatgaagtggatcctccacgactggagcgacgcgcactgcgccacgctgctcaagaactgctacgacgcgctgccggaaaatggcaaggtcatcgtcgtcgagtgcgtgctgccggtcaacacggaggccacccccaaggcgcagggcgtgttccacgtcgacatgatcatgctcgcgcacaaccccggcggcaaggagcggtacgagcgcgagttccgcgagctcgccaagggcgccggcttctccgggttcaaggccacctacatctacgccaacgcctgggccatcgagttcatcaagtgaatacggctaccaccgtcgccgcgatgagatgcatggctgccacatgcatgcttgcttgcttggtcctcgtatcgtacgtcgccgtcgtcgtcttcttctggttgcgctgctaccttgctgctctcgccctcgcgtatgcatgtacttttgcttaattttctttcttcatatcatgcactctggctggcctagactgcccccgatccatggtggccatgtcttcggtacgtcttgtcgagctcttgcatgtcgtggattctaaattcttcttctgcgtcgaattgtctctgccatgtgcgagtaataacaatcaaggttatacttacc

SEQ ID NO: 5316 - protein, 300 aa, Zea mays subsp. mays
  peptide (1)..(300): Ceres Seq. ID no. 12435049
  misc_feature (13)..(13): Xaa is any aa, unknown or other
MPAAPSDPAAAAXLVDRMLRLLASYDVVRCQMEDRDGRYERRYSAAPVCKWLTPNEDGVSMAALALMNQDKVLMESWYYLKDAVLDGGIPFNKAYGMTAFEYHGTDARFNRVFNEGMKNHSVIITKKLLDFYTGFEGVSTLVDVGGGVGATLHAITSRHPHISGVNFDLPHVISEAPPFPGVRHVGGDMFASVPAGDAILMKWILHDWSDAHCATLLKNCYDALPENGKVIVVECVLPVNTEATPKAQGVFHVDMIMLAHNPGGKERYEREFRELAKGAGFSGFKATYIYANAWAIEFIK

SEQ ID NO: 5317 - protein, 283 aa, Zea mays subsp. mays
  peptide (1)..(283): Ceres Seq. ID no. 12435050
MLRLLASYDVVRCQMEDRDGRYERRYSAAPVCKWLTPNEDGVSMAALALMNQDKVLMESWYYLKDAVLDGGIPFNKAYGMTAFEYHGTDARFNRVFNEGMKNHSVIITKKLLDFYTGFEGVSTLVDVGGGVGATLHAITSRHPHISGVNFDLPHVISEAPPFPGVRHVGGDMFASVPAGDAILMKWILHDWSDAHCATLLKNCYDALPENGKVIVVECVLPVNTEATPKAQGVFHVDMIMLAHNPGGKERYEREFRELAKGAGFSGFKATYIYANAWAIEFIK

SEQ ID NO: 5318 - protein, 269 aa, Zea mays subsp. mays
  peptide (1)..(269): Ceres Seq. ID no. 12435051
MEDRDGRYERRYSAAPVCKWLTPNEDGVSMAALALMNQDKVLMESWYYLKDAVLDGGIPFNKAYGMTAFEYHGTDARFNRVFNEGMKNHSVIITKKLLDFYTGFEGVSTLVDVGGGVGATLHAITSRHPHISGVNFDLPHVISEAPPFPGVRHVGGDMFASVPAGDAILMKWILHDWSDAHCATLLKNCYDALPENGKVIVVECVLPVNTEATPKAQGVFHVDMIMLAHNPGGKERYEREFRELAKGAGFSGFKATYIYANAWAIEFIK

SEQ ID NO: 5319 - DNA, 1131 bp, Zea mays subsp. mays
  misc_feature (1)..(1131): Ceres Seq. ID no. 12409590
  misc_feature (1)..(1131): Ortholog of  Ceres SEQ ID NO 15173410 as cited in SEQ ID NO 61812
  misc_feature (1)..(1131): Ortholog of  Ceres SEQ ID NO 13596922 as cited in SEQ ID NO 62353
ctaatcaaaaatcgctcactacgcgaccgctagctactcgatcggatcctgaccacgcccgcctaccagaccaccaccaccaccaccaccaccacccacaaatccccaatggcgaggcgcatcgccgtggcggcagcgttcctggcgctggccgtggtggctcccgccgcgctggcgcaggctcccgggcccgcggcgacgccgagcgggccgcccgaacgtgacggcgatcctggagaagggcgggcagttcaccatgttcatgcggctgatgaaggagacgcagcaggacacgcagctgaacagccagctgaacagctcgtactgccagcagcggcggcgggtacacggtgttcgcgcccaccgacaacgccttcaacaacctcaagcccggcacgctcaactcgctgacgcagcagcagcaggtggcgctggtgcagggccacgtcctgccccagttctacagcatggactccttccagaccgccagcaaccccgtccgcacccaggcctccggccgcgacgggccctacacgctcaacatcaccgccaccgccaacaaccaggtcaacgtctcctcgggcgtcgccgaggtcaccatcaacaacgcgctcagcgccgtcaagcccctcgccgtctactccgtcgacaaggtgctcctgcccctggagctgttcggggccaaggcgcccgccgccgngcccgccgcgtcccaggggaagcccaagaagggcgggtcctcggacgctccctccgggtcggccggctccgacgacgccgcgccaacgggcgccgccggcgccagggccgtcggctggagcttcgccggcctcgccgccgtccttggctgcctgttgtgagagtgagaccgtgcgtcgtttctagggacggacggacggacgacaagctagttgaagatgagaatgccatgaccgaggccgggcatgggcgccttcttccatttccatctttgtctgagattgtcagtggccgtgttcccttgcccttctttctctctgtttatttatttaaacttctttcatctcgctagtttctttaatttgtactattggtggtttgtaagattggcttatgtgattcaatttatgcgcctgccgctgttgatactgc

SEQ ID NO: 5320 - protein, 264 aa, Zea mays subsp. mays
  peptide (1)..(264): Ceres Seq. ID no. 12409591
  misc_feature (148)..(148): Xaa is any aa, unknown or other
MFMRLMKETQQDTQLNSQLNSSYCQQRRRVHGVRAHRQRLQQPQARHAQLADAAAAGGAGAGPRPAPVLQHGLLPDRQQPRPHPGLRPRRALHAQHHRHRQQPGQRLLGRRRGHHQQRAQRRQAPRRLLRRQGAPAPGAVRGQGARRXARRVPGEAQEGRVLGRSLRVGRLRRRRANGRRRRQGRRLELRRPRRRPWLPVVRVRPCVVSRDGRTDDKLVEDENAMTEAGHGRLLPFPSLSEIVSGRVPLPFFLSVYLFKLLSSR

SEQ ID NO: 5321 - protein, 262 aa, Zea mays subsp. mays
  peptide (1)..(262): Ceres Seq. ID no. 12409592
  misc_feature (146)..(146): Xaa is any aa, unknown or other
MRLMKETQQDTQLNSQLNSSYCQQRRRVHGVRAHRQRLQQPQARHAQLADAAAAGGAGAGPRPAPVLQHGLLPDRQQPRPHPGLRPRRALHAQHHRHRQQPGQRLLGRRRGHHQQRAQRRQAPRRLLRRQGAPAPGAVRGQGARRXARRVPGEAQEGRVLGRSLRVGRLRRRRANGRRRRQGRRLELRRPRRRPWLPVVRVRPCVVSRDGRTDDKLVEDENAMTEAGHGRLLPFPSLSEIVSGRVPLPFFLSVYLFKLLSSR

SEQ ID NO: 5322 - protein, 259 aa, Zea mays subsp. mays
  peptide (1)..(259): Ceres Seq. ID no. 12409593
  misc_feature (143)..(143): Xaa is any aa, unknown or other
MKETQQDTQLNSQLNSSYCQQRRRVHGVRAHRQRLQQPQARHAQLADAAAAGGAGAGPRPAPVLQHGLLPDRQQPRPHPGLRPRRALHAQHHRHRQQPGQRLLGRRRGHHQQRAQRRQAPRRLLRRQGAPAPGAVRGQGARRXARRVPGEAQEGRVLGRSLRVGRLRRRRANGRRRRQGRRLELRRPRRRPWLPVVRVRPCVVSRDGRTDDKLVEDENAMTEAGHGRLLPFPSLSEIVSGRVPLPFFLSVYLFKLLSSR

SEQ ID NO: 5323 - DNA, 1562 bp, Zea mays subsp. mays
  misc_feature (1)..(1562): Ceres Seq. ID no. 12341687
  misc_feature (1)..(1562): Ortholog of  Ceres SEQ ID NO 12609146 as cited in SEQ ID NO 52118
  misc_feature (1)..(1562): Ortholog of  Ceres SEQ ID NO 14316158 as cited in SEQ ID NO 52413
  misc_feature (1)..(1562): Ortholog of  Ceres SEQ ID NO 13594056 as cited in SEQ ID NO 55691
  misc_feature (1)..(1562): Ortholog of  Ceres SEQ ID NO 13638136 as cited in SEQ ID NO 58644
  misc_feature (1)..(1562): Ortholog of  Ceres SEQ ID NO 13596868 as cited in SEQ ID NO 62806
  misc_feature (1)..(1562): Ortholog of  Ceres SEQ ID NO 12587035 as cited in SEQ ID NO 63605
  misc_feature (1)..(1562): Ortholog of  Ceres SEQ ID NO 14301886 as cited in SEQ ID NO 64201
  misc_feature (1)..(1562): Ortholog of  Ceres SEQ ID NO 13595885 as cited in SEQ ID NO 69265
  misc_feature (1)..(1562): Ortholog of  Ceres SEQ ID NO 12566239 as cited in SEQ ID NO 0
  misc_feature (1)..(1562): Ortholog of  Ceres SEQ ID NO 13599119 as cited in SEQ ID NO 0
  misc_feature (1)..(1562): Ortholog of  Ceres SEQ ID NO 14308987 as cited in SEQ ID NO 0
  misc_feature (1)..(1562): Ortholog of  Ceres SEQ ID NO 15179992 as cited in SEQ ID NO 0
aagagattgataataataataatagttcggtgcctttttctagcggggaggaggcaggcggcgcaatctggcaccggccatcacgttccctccggccgcttccccctccctgccctccctttccccagatccgaagccattaaaaccagcggatctcacctcggggcgcgtccgcggcatctgggcaagcgagtggtagagcccgcagccatgagatggtatgcatcggtagcctcctgagggcgctggtcctgagtgcggcggcgtctgcgggcaggcgccgggggcccaggatcctgtgtggccacgaggcggatgtacgcgtgactcctcggcacggacacggctggcgcagattccgggcagtcacgggaaggatgatgctggactcctctgactgtgcctctgctgccgccgccgcggagacggggcaggtgcagccgcagcgccgcgcggtgggggccgtgcccctggcgcacgacggcggctacgccagcggcggatgggagagagaagatggcaaactgagttgtggatactcaagttttagaggcaagagagctacgatggaagatttctatgatgtaaaactaactgaaattgatggacaagctgttagcctgtttggtgttttcgacggtcatggaggatcacgtgctgctgagtatttgagggagcacttgtttgataaccttctcaagcaccctgatttcttgacagatacaaagcttgcgataagtgaaacatatcagaaaacagatacagatttcttggaatcagaagcaagcgctttcagggatgatggttcaacagcttcaactgcacttttggtgggtgaccatttatatgttgcaaatgttggtgattctcgtgccgttatttcaaaagctggcaaagctatggcgctttcagaagatcacaaacctaacagaattgatgagcgaaagagaattgaaaatgctggtggtattgtcatttgggctggcacttggagggtgggtggtgtattggcaatgtcccgtgcatttggcaatcgtttactgaagccatatgtggtggcagaacctgaaattcaggaagaacaggtcagtggtgggctggaatgcctggttcttgctagtgatgggctttgggatgttgtggaaaatgaggaagctgttttccttgggagatcggaggacacgccagagtctgcagctaggaaattgacagagattgcttactctcgcggcagcgctgacaatatcacatgcatcgtggtccaatttcaccatgacaaaaccggatgagccgtatggctgccaatttcagttgtaccctgcttcagtctattattatcctgcaagctgggtggtggccggtgggcttctcccagatttaccctgcttcatgctattattatcctgcaagccgggcggtggggtttctcagatctatcgctcatgtagcaactttcaagcactcgtccattgattcttttgttgtcttgtaggaaacatttgttccgacaggtgtagtagacacttttaaactgataattcaataaacgtatgtttacggct

SEQ ID NO: 5324 - protein, 357 aa, Zea mays subsp. mays
  peptide (1)..(357): Ceres Seq. ID no. 12341688
MVCIGSLLRALVLSAAASAGRRRGPRILCGHEADVRVTPRHGHGWRRFRAVTGRMMLDSSDCASAAAAAETGQVQPQRRAVGAVPLAHDGGYASGGWEREDGKLSCGYSSFRGKRATMEDFYDVKLTEIDGQAVSLFGVFDGHGGSRAAEYLREHLFDNLLKHPDFLTDTKLAISETYQKTDTDFLESEASAFRDDGSTASTALLVGDHLYVANVGDSRAVISKAGKAMALSEDHKPNRIDERKRIENAGGIVIWAGTWRVGGVLAMSRAFGNRLLKPYVVAEPEIQEEQVSGGLECLVLASDGLWDVVENEEAVFLGRSEDTPESAARKLTEIAYSRGSADNITCIVVQFHHDKTG

SEQ ID NO: 5325 - protein, 303 aa, Zea mays subsp. mays
  peptide (1)..(303): Ceres Seq. ID no. 12341689
MMLDSSDCASAAAAAETGQVQPQRRAVGAVPLAHDGGYASGGWEREDGKLSCGYSSFRGKRATMEDFYDVKLTEIDGQAVSLFGVFDGHGGSRAAEYLREHLFDNLLKHPDFLTDTKLAISETYQKTDTDFLESEASAFRDDGSTASTALLVGDHLYVANVGDSRAVISKAGKAMALSEDHKPNRIDERKRIENAGGIVIWAGTWRVGGVLAMSRAFGNRLLKPYVVAEPEIQEEQVSGGLECLVLASDGLWDVVENEEAVFLGRSEDTPESAARKLTEIAYSRGSADNITCIVVQFHHDKTG

SEQ ID NO: 5326 - protein, 302 aa, Zea mays subsp. mays
  peptide (1)..(302): Ceres Seq. ID no. 12341690
MLDSSDCASAAAAAETGQVQPQRRAVGAVPLAHDGGYASGGWEREDGKLSCGYSSFRGKRATMEDFYDVKLTEIDGQAVSLFGVFDGHGGSRAAEYLREHLFDNLLKHPDFLTDTKLAISETYQKTDTDFLESEASAFRDDGSTASTALLVGDHLYVANVGDSRAVISKAGKAMALSEDHKPNRIDERKRIENAGGIVIWAGTWRVGGVLAMSRAFGNRLLKPYVVAEPEIQEEQVSGGLECLVLASDGLWDVVENEEAVFLGRSEDTPESAARKLTEIAYSRGSADNITCIVVQFHHDKTG

SEQ ID NO: 5327 - DNA, 1223 bp, Zea mays subsp. mays
  misc_feature (1)..(1223): Ceres Seq. ID no. 12341691
  misc_feature (1)..(1223): Ortholog of  Ceres SEQ ID NO 13505109 as cited in SEQ ID NO 58983
  misc_feature (1)..(1223): Ortholog of  Ceres SEQ ID NO 14302303 as cited in SEQ ID NO 62365
  misc_feature (1)..(1223): Ortholog of  Ceres SEQ ID NO 13599066 as cited in SEQ ID NO 0
gtcggccttggcccaagccaaggaccctttcgcttctctcagtctacgactaggcggcggcggcggccttcacgcacgagccttcgccgcctatacttgcgcttcgtcgagccggtgaattgtggtctaagaacaagagggaaggatctttctccagacttcgcaattttggacgacgaggttttgtgttatctggtttgtcgggatggatgccaaaaagttcctgcagctggtcgaagagaagaaaaggaggatcctcgagaagaaagaagccccactaaagtggcagcagaagcttgaagcagcagttaacgtcaaagctgatgcagaagcgaaggcgaaaaaactaaaatcaagaaagcataggaggagaggagattcttcctcggactctgacagtgactatgacagcgatgttgatcggaaacaccggaggaggaaggatcgtagaaggaacaagaagcatgagcattctgactctgatgatgccaggagacgcaagcataggtccagaaagggctcagactcaagtgatgagagcaaccgtgaatatgaaagcgggtctgaagaagaacgtacaaagaagaagcgttcgcacagaagaaagcatcacagacactcttcaatgtcagactctgaagacaacagtgatgaggatgagcggagatctgccaaggaccattctcagccccgcagacgccaccatcagtcttctgatgatggctcggacaagatcaggtcgagacatgggaagcgtctgagatcaagttacgagaatgctcggccagattccaacaaccataagcatctcaggagccaatccttggaggagtcatcagatgatagagatgatgatggatcagagaagataagaaatggcaaaaggtatcacaagaatcatcaccgtcaccaccatcatcatcgtcaccatcagcaccaccatgaaagacataatagctcagcagaacctaatgacaggaggcaagtactgaaagatgaccagagggcccttgaaggtagcagtgcagactgaaggtatccaccagaggacggaaagattgattctccattcgtgatgttcccagttatttgttgtgctgataacatttctttgatttgggctatgaaacgtggtcattctaccaattatgttggttttgagaatttggtaatactgagttaacaatgaagcatgattatctgaaatgtttaagtattagatc

SEQ ID NO: 5328 - protein, 275 aa, Zea mays subsp. mays
  peptide (1)..(275): Ceres Seq. ID no. 12341692
MDAKKFLQLVEEKKRRILEKKEAPLKWQQKLEAAVNVKADAEAKAKKLKSRKHRRRGDSSSDSDSDYDSDVDRKHRRRKDRRRNKKHEHSDSDDARRRKHRSRKGSDSSDESNREYESGSEEERTKKKRSHRRKHHRHSSMSDSEDNSDEDERRSAKDHSQPRRRHHQSSDDGSDKIRSRHGKRLRSSYENARPDSNNHKHLRSQSLEESSDDRDDDGSEKIRNGKRYHKNHHRHHHHHRHHQHHHERHNSSAEPNDRRQVLKDDQRALEGSSAD

SEQ ID NO: 5329 - DNA, 1217 bp, Zea mays subsp. mays
  misc_feature (1)..(1217): Ceres Seq. ID no. 12405631
  misc_feature (1)..(1217): Ortholog of  Ceres SEQ ID NO 13593831 as cited in SEQ ID NO 53828
acgccgctgctccaagaaaccaccgccgagcccaaccgcacaagcgcgcgaggcaggagagagagagagagagagagagagagagagaggcggggagcaaaacaatggaggggaaagaggaggacgtgcgcctgggcgccaacaagttctcggagcgccagcccatcgggacggcggcgcagggcgccgctgacgacaaggactacaaggagcccccgccggcgccgctgttcgagcccggggagctcaagtcctggtccttctaccgcgcgggcatcgccgagttcgtcgccaccttcctcttcctctacatcaccatcctcaccgtcatgggcgtctccaagtccacctccaagtgcgccaccgtcggcatccagggcatcgcctggtccttcggaggaatgatcttcgcgctcgtctactgcaccgccggcatctccggaggacacatcaacccagctgtgactttcgggctgttcttagccaggaagctgtccctgactaggggccctcttctacatcatcatgcaatgcctgggtgccatctgtggagctggagtggtgaagggcttccagcagggactttacatgggcaacggtggtggcgccaatgttgtcgcacctggctacaccaagggtgatggccttggcgctgagattgttggcaccttcatcctagtctacaccgtcttctcagccaccgatgccaagaggaatgccagggactcccatgttcctatccttgccccactgccaattgggttcgcggtgttcctggtccaccttgccaccatccccattactggcactggcatcaacccagctaggagccttggcgctgccatcatctacaacagggatcacgcctggaacgaccattggatcttctgggtcggccccttcattggcgctgccctggctgccatctaccaccaggtgatcatcagagccatcccgttcaagagcaggtcttaagctgccgtggccgtgccgagacatgccagtccgaagaacgggcgtcttcctgtgatgtcttcttgtctgcccacgcctagtttctctgtcgattcctattcgtcgtctcttcagggctggtgctcactgctgcgccgttctgttaaccgaaacaagaactctgtgtattcctgtaccgagctgtgcatgtttttttttttttctttccatcgtggagaatttaagttattatccgtttgctg

SEQ ID NO: 5330 - protein, 212 aa, Zea mays subsp. mays
  peptide (1)..(212): Ceres Seq. ID no. 12405632
AAAPRNHRRAQPHKRARQEREREREREREAGSKTMEGKEEDVRLGANKFSERQPIGTAAQGAADDKDYKEPPPAPLFEPGELKSWSFYRAGIAEFVATFLFLYITILTVMGVSKSTSKCATVGIQGIAWSFGGMIFALVYCTAGISGGHINPAVTFGLFLARKLSLTRGPLLHHHAMPGCHLWSWSGEGLPAGTLHGQRWWRQCCRTWLHQG

SEQ ID NO: 5331 - protein, 178 aa, Zea mays subsp. mays
  peptide (1)..(178): Ceres Seq. ID no. 12405633
MEGKEEDVRLGANKFSERQPIGTAAQGAADDKDYKEPPPAPLFEPGELKSWSFYRAGIAEFVATFLFLYITILTVMGVSKSTSKCATVGIQGIAWSFGGMIFALVYCTAGISGGHINPAVTFGLFLARKLSLTRGPLLHHHAMPGCHLWSWSGEGLPAGTLHGQRWWRQCCRTWLHQG

SEQ ID NO: 5332 - protein, 149 aa, Zea mays subsp. mays
  peptide (1)..(149): Ceres Seq. ID no. 12405634
MQCLGAICGAGVVKGFQQGLYMGNGGGANVVAPGYTKGDGLGAEIVGTFILVYTVFSATDAKRNARDSHVPILAPLPIGFAVFLVHLATIPITGTGINPARSLGAAIIYNRDHAWNDHWIFWVGPFIGAALAAIYHQVIIRAIPFKSRS

SEQ ID NO: 5333 - DNA, 1024 bp, Zea mays subsp. mays
  misc_feature (1)..(1024): Ceres Seq. ID no. 12593662
  misc_feature (1)..(1024): Ortholog of  Ceres SEQ ID NO 13595808 as cited in SEQ ID NO 50995
  misc_feature (1)..(1024): Ortholog of  Ceres SEQ ID NO 12609096 as cited in SEQ ID NO 52019
  misc_feature (1)..(1024): Ortholog of  Ceres SEQ ID NO 15177207 as cited in SEQ ID NO 58287
  misc_feature (1)..(1024): Ortholog of  Ceres SEQ ID NO 15178854 as cited in SEQ ID NO 0
gccacaaccgtagcctgtagcttcatccgttgcgctgctcccggttccatcgcgcggtgcggaatttaacatggccgtgccggaggtggtggtcgacggcgtcgtcttcccgccggtggcccgcccgccgggctccgccggctcgcacttcctcggcggcgcaggcgtgcgaggcctcgagatcggaggcaacttcatcaagttcacggccatcggcgtgtacctggaggacgcggccgtgcccgcgctggccaagaagtggggcggcaagacggccgacgagctcgcctccgacgccgccttcttccgcgacgtcgtcacgggcgacttcgagaagttcacgagggtgacgatgatcctcccgctgacgggcgagcagtacgcggagaaagtgacggagaactgcgtggcgttctggaaggccgccggcctgtacacggacgccgagggcgtcgccgtggagaagttcagggaggtgttcaagccagagactttcgcgccgggcgcctccatcctcttcacgcactcgcccgccggagtcctcaccgtcgccttctccaaggactcgtcggtgccagcggccggcggcgtggcgatcgagaacaagcgcctctgcgaggccgtgctggagtccatcatcggggagcgcggcgtgtcgccggccgcgaagctgagcctcgccgcgagggtgtcggagctcctcgccaaggagaccgccgcgcccgccgacgcgccgcaggcggagcccgtctccatcaccgcctgaggcgaggagcgggcgggcgagcgaacgaaccgcgaggagaaagaaagcaaccagacggttgggcggcacggcgtctcacacctgccgcctgcgcttgcgtgctccggaccggagagatgccgcgcgggtgcagtgcagccgtcgcgtcatgtctgtccgcgctctggcgtcgtgttcctgcctttctggtcgcgtagttgtcttgtgttcgctgttggtcgttctgggtaacatttgaataaaacaagcggatttgtt

SEQ ID NO: 5334 - protein, 231 aa, Zea mays subsp. mays
  peptide (1)..(231): Ceres Seq. ID no. 12593663
MAVPEVVVDGVVFPPVARPPGSAGSHFLGGAGVRGLEIGGNFIKFTAIGVYLEDAAVPALAKKWGGKTADELASDAAFFRDVVTGDFEKFTRVTMILPLTGEQYAEKVTENCVAFWKAAGLYTDAEGVAVEKFREVFKPETFAPGASILFTHSPAGVLTVAFSKDSSVPAAGGVAIENKRLCEAVLESIIGERGVSPAAKLSLAARVSELLAKETAAPADAPQAEPVSITA

SEQ ID NO: 5335 - protein, 137 aa, Zea mays subsp. mays
  peptide (1)..(137): Ceres Seq. ID no. 12593664
MILPLTGEQYAEKVTENCVAFWKAAGLYTDAEGVAVEKFREVFKPETFAPGASILFTHSPAGVLTVAFSKDSSVPAAGGVAIENKRLCEAVLESIIGERGVSPAAKLSLAARVSELLAKETAAPADAPQAEPVSITA

SEQ ID NO: 5336 - DNA, 1238 bp, Zea mays subsp. mays
  misc_feature (1)..(1238): Ceres Seq. ID no. 12349046
  misc_feature (1)..(1238): Ortholog of  Ceres SEQ ID NO 13504028 as cited in SEQ ID NO 56107
ctatctaatgcatgccgagtatcattttctccagaaggtcccatatctgaagaggcgcttgagagagtccgtgcactgttagatatgataagacctctagatgtcggcctagataatgaagcccaaattgcacgcaattggagtagttctacgcgtccatcaaatgggagacgaggacgcaatggggctaaccagttcgcggctccaatcaaatatttgcacattcatgaatgtgaaagcttctctatgggtatattttgtatgccaccttcttcagttatcccacttcataatcatcctggaatgactgtacttagcaagcttctttatggacgtctgcatgctgaatcttatgactgggttgacatacctgatcatccaattgatcaattacaaacaaggccagccaagcttgttaaagattgtgaaatgactgctccagagacaactattctttaccctaatgcaggtggtaacatccacactttcagagccattacaccttgtgctctctttgacgttctttctccaccatactccgctgaggatgggcgacactgttcatacttccgaaaatctcagatgaatcagccacctgttgttttgcctgctgagatagatagctctcaggtagtttggttggaggagttggaggaccatcagcccccagaaggctttgttgttgcaagaggtctgtataaaggccctgtaattaggagataatttgctttggagcgcagaatcaaccaagctgcaaatcagctgaaagacgatgcaggcttgtagtgcctagtgcaagcatcgtcaggtcatgtgcagcctacggtttatttgtacatctcaaagtgatctttgataatttaacagcagttttacagaacaggaacggatgttttttgtttggctgccattttaactgtgtcccactgctggagtatctctgacctagttatggagctcttatcagatcaagaccatggagaacatacttttgatgtaccagcatagctattgtcatgatgtaccagggaagatcaagacaagtgtttccatttggtgatttcagaaagaatttggtgtggggctaccattttgtctgtgtaatagcagcattactattttggagcaagactgtaaattacgggagaggaactataataatatcattaggtttatcatgaaatatattttcatggtgtatctatttaggccttgtttggaaggagatctttttctgc

SEQ ID NO: 5337 - protein, 240 aa, Zea mays subsp. mays
  peptide (1)..(240): Ceres Seq. ID no. 12349047
LSNACRVSFSPEGPISEEALERVRALLDMIRPLDVGLDNEAQIARNWSSSTRPSNGRRGRNGANQFAAPIKYLHIHECESFSMGIFCMPPSSVIPLHNHPGMTVLSKLLYGRLHAESYDWVDIPDHPIDQLQTRPAKLVKDCEMTAPETTILYPNAGGNIHTFRAITPCALFDVLSPPYSAEDGRHCSYFRKSQMNQPPVVLPAEIDSSQVVWLEELEDHQPPEGFVVARGLYKGPVIRR

SEQ ID NO: 5338 - protein, 212 aa, Zea mays subsp. mays
  peptide (1)..(212): Ceres Seq. ID no. 12349048
MIRPLDVGLDNEAQIARNWSSSTRPSNGRRGRNGANQFAAPIKYLHIHECESFSMGIFCMPPSSVIPLHNHPGMTVLSKLLYGRLHAESYDWVDIPDHPIDQLQTRPAKLVKDCEMTAPETTILYPNAGGNIHTFRAITPCALFDVLSPPYSAEDGRHCSYFRKSQMNQPPVVLPAEIDSSQVVWLEELEDHQPPEGFVVARGLYKGPVIRR

SEQ ID NO: 5339 - protein, 158 aa, Zea mays subsp. mays
  peptide (1)..(158): Ceres Seq. ID no. 12349049
MGIFCMPPSSVIPLHNHPGMTVLSKLLYGRLHAESYDWVDIPDHPIDQLQTRPAKLVKDCEMTAPETTILYPNAGGNIHTFRAITPCALFDVLSPPYSAEDGRHCSYFRKSQMNQPPVVLPAEIDSSQVVWLEELEDHQPPEGFVVARGLYKGPVIRR

SEQ ID NO: 5340 - DNA, 1634 bp, Zea mays subsp. mays
  misc_feature (1)..(1634): Ceres Seq. ID no. 12356246
  misc_feature (1)..(1634): Ortholog of  Ceres SEQ ID NO 13592961 as cited in SEQ ID NO 20522
  misc_feature (1)..(1634): Ortholog of  Ceres SEQ ID NO 12583469 as cited in SEQ ID NO 51031
  misc_feature (1)..(1634): Ortholog of  Ceres SEQ ID NO 14303071 as cited in SEQ ID NO 67114
  misc_feature (1)..(1634): Ortholog of  Ceres SEQ ID NO 13595998 as cited in SEQ ID NO 68161
aagcatagcagcagcccattgcctgcctttcggcttaccctctctctctctctctcacacacacacacaaccactcacactgccggttggtttcccttccgttgtggttggtgcgtacttagtggcggccggccatggcgcggaggaggggcttctcggcggtggtgccgccggcgtggctgccggcggtgctcctgtgcctggcaggcgcggcgtcgggcgagccgctgccgcagtactacaatgccatcttcagcttcggcgactccttctccgacacgggcaacttcgtcatcatcaactcgggcaagctgcccaacatgcccaagttcccgccgccgtacgcgaggtgctccaacggccgcctcgtgatcgacttcctggccgaggcgttcggtctcccgctgctccctccgtcggcgaacaagggcaccaacttcagccagggcgccaacttcgcggtgatgggcgcgacggcgcttgacctcaagtacttcaaggacaacaacgtgtggagcatcccgcccttcaacacgtccatgggcgtgcagctggagtggttccaggaggtgaagcgcagcatctgccccgacgaccccggcgcgtgccgcgccctgttcgggagggccctgttcgtgttcggcgagttcggcggcaacgactacagcttcgcgtggaaggcggactggtcgctggagaaggtgaagacgatggtgccggcggtggtggcgtcgctggtgggcggcgtggagcggctgctggacgagggcgcccgccacgtcgtggtgccgggcaacctccccgccggatgcatccccatcacgctcaccatgtacccgtccgaggaccgctccgagtacgacccgcgcaccggctgcctcaagaagtacaacagcgtcgcgctctaccacaacgccatgctccgcgtcgcgctcgaccgcctgcagcgcccccgcccggagtccccgcgtcgtctacgccgactactacacgccctacatacagttcgcgcgcacaccgcacctctacggctacaagcgcggcgctctgcgggcttgctgcggcggcggcgggccgtacaactacaacgtgagcgcgtcgtgcgggctccccggcgccaccacctgcgaggaccccgacgcgcacgtcagctgggacggcatccacctcaccgaggcgccctaccgcttcatcgccaacacctgggtcaagggcccctacgcgcacccgccgctcgccaccgtcgtgctcgaggacatggtcgactgatcctcttgtggtttggcacaagggaagagctgatatgtaacgtgaattccattcgttcatgtccatgtatattgggtactaccggagcggagtaacaaaaaaaaaatatatatgttagtcttttctgtttttttttcgtcgtgcacctgtgtgccgtgcagtcgcatagatcaatgaagaaaccactccagctgtttttgatgattggtttaggcggacttgcaagcggtcgagcctgcttatgttgggcagtgtactgtacacgctaaggccttgttcgtttctgtcggatcggtgggtcggaacgattccaaaccggattgcttctctaatttatataaactttgattgagtggaacgattcc

SEQ ID NO: 5341 - protein, 409 aa, Zea mays subsp. mays
  peptide (1)..(409): Ceres Seq. ID no. 12356247
MARRRGFSAVVPPAWLPAVLLCLAGAASGEPLPQYYNAIFSFGDSFSDTGNFVIINSGKLPNMPKFPPPYARCSNGRLVIDFLAEAFGLPLLPPSANKGTNFSQGANFAVMGATALDLKYFKDNNVWSIPPFNTSMGVQLEWFQEVKRSICPDDPGACRALFGRALFVFGEFGGNDYSFAWKADWSLEKVKTMVPAVVASLVGGVERLLDEGARHVVVPGNLPAGCIPITLTMYPSEDRSEYDPRTGCLKKYNSVALYHNAMLRVALDRLQRPRPESPRRLRRLLHALHTVRAHTAPLRLQARRSAGLLRRRRAVQLQRERVVRAPRRHHLRGPRRARQLGRHPPHRGALPLHRQHLGQGPLRAPAARHRRARGHGRLILLWFGTREELICNVNSIRSCPCILGTTGAE

SEQ ID NO: 5342 - protein, 347 aa, Zea mays subsp. mays
  peptide (1)..(347): Ceres Seq. ID no. 12356248
MPKFPPPYARCSNGRLVIDFLAEAFGLPLLPPSANKGTNFSQGANFAVMGATALDLKYFKDNNVWSIPPFNTSMGVQLEWFQEVKRSICPDDPGACRALFGRALFVFGEFGGNDYSFAWKADWSLEKVKTMVPAVVASLVGGVERLLDEGARHVVVPGNLPAGCIPITLTMYPSEDRSEYDPRTGCLKKYNSVALYHNAMLRVALDRLQRPRPESPRRLRRLLHALHTVRAHTAPLRLQARRSAGLLRRRRAVQLQRERVVRAPRRHHLRGPRRARQLGRHPPHRGALPLHRQHLGQGPLRAPAARHRRARGHGRLILLWFGTREELICNVNSIRSCPCILGTTGAE

SEQ ID NO: 5343 - protein, 299 aa, Zea mays subsp. mays
  peptide (1)..(299): Ceres Seq. ID no. 12356249
MGATALDLKYFKDNNVWSIPPFNTSMGVQLEWFQEVKRSICPDDPGACRALFGRALFVFGEFGGNDYSFAWKADWSLEKVKTMVPAVVASLVGGVERLLDEGARHVVVPGNLPAGCIPITLTMYPSEDRSEYDPRTGCLKKYNSVALYHNAMLRVALDRLQRPRPESPRRLRRLLHALHTVRAHTAPLRLQARRSAGLLRRRRAVQLQRERVVRAPRRHHLRGPRRARQLGRHPPHRGALPLHRQHLGQGPLRAPAARHRRARGHGRLILLWFGTREELICNVNSIRSCPCILGTTGAE

SEQ ID NO: 5344 - DNA, 1128 bp, Zea mays subsp. mays
  misc_feature (1)..(1128): Ceres Seq. ID no. 12387077
  misc_feature (1)..(1128): Ortholog of  Ceres SEQ ID NO 13504028 as cited in SEQ ID NO 56107
atcctcctcctcctgctgctctggcctctggagtcgccgcccctcccaagaacaccaggctctaatttaatttaagcggagggaagcttgatcgatcagtctgacactgccctcgttaagttatagcaaatgcctcccgcttcgacggatgcaaacaacgcgatccagaagctgtacgaggtctgcagagcctcactgtccgagaaggggcctctatctcctcctgactactctctcgacaacgtccgtgctgcgttagacatggttaccccgtccgacgtcggccttgaacgcgaggctggagctgtgcgtgcttggaggagcccacgggcggccctgggtcggaagaggattttccattccagcccagccatcagatatcgccatatatacgagtgcgcaagcttctcgattgggatgttttgcatgccggcatcatccatcatcccgctccacaaccatcctggaatgaccgtgctcggcaaggttttgtacggcgcggcgcacgtcagatcgtaccgctggattgaatcagccggatcgtccattaacctgtcgaaagcgaggccagccaaggttgtaagggacggcgagatgtccgcgccgtgcggagcgatggttcttcgtccggaggaaggcggcgacgtccacgccttgagagccatcactccctgcgccgtcctccacatcctgacgcccccgtactcctcgcaggacgggaggcactgctcctacttccggagacgcccaagatcacacccatcgggcgttttattgaaccgaacaggggggtctgagttcgtgtggctggaagaataccagccacgtcacaacttcatcattagaagggacctgtacacaggacccgctttaaagttatgatgacatcatgacaaacaggggggataattatatatatacgcttcccctttggcttcttattaagttatatcgatggacaagcacttagctatatgtgcttggcacttttttatttatatggtagtattaaaaagacagttgattatcctacgtacagggccgcctgctgtatgtattattctaagataatgttattgtacatctgatgatgtcacccactgacagaatgttatttatataataatt

SEQ ID NO: 5345 - protein, 250 aa, Zea mays subsp. mays
  peptide (1)..(250): Ceres Seq. ID no. 12387078
MPPASTDANNAIQKLYEVCRASLSEKGPLSPPDYSLDNVRAALDMVTPSDVGLEREAGAVRAWRSPRAALGRKRIFHSSPAIRYRHIYECASFSIGMFCMPASSIIPLHNHPGMTVLGKVLYGAAHVRSYRWIESAGSSINLSKARPAKVVRDGEMSAPCGAMVLRPEEGGDVHALRAITPCAVLHILTPPYSSQDGRHCSYFRRRPRSHPSGVLLNRTGGSEFVWLEEYQPRHNFIIRRDLYTGPALKL

SEQ ID NO: 5346 - protein, 206 aa, Zea mays subsp. mays
  peptide (1)..(206): Ceres Seq. ID no. 12387079
MVTPSDVGLEREAGAVRAWRSPRAALGRKRIFHSSPAIRYRHIYECASFSIGMFCMPASSIIPLHNHPGMTVLGKVLYGAAHVRSYRWIESAGSSINLSKARPAKVVRDGEMSAPCGAMVLRPEEGGDVHALRAITPCAVLHILTPPYSSQDGRHCSYFRRRPRSHPSGVLLNRTGGSEFVWLEEYQPRHNFIIRRDLYTGPALKL

SEQ ID NO: 5347 - protein, 154 aa, Zea mays subsp. mays
  peptide (1)..(154): Ceres Seq. ID no. 12387080
MFCMPASSIIPLHNHPGMTVLGKVLYGAAHVRSYRWIESAGSSINLSKARPAKVVRDGEMSAPCGAMVLRPEEGGDVHALRAITPCAVLHILTPPYSSQDGRHCSYFRRRPRSHPSGVLLNRTGGSEFVWLEEYQPRHNFIIRRDLYTGPALKL

SEQ ID NO: 5348 - DNA, 871 bp, Zea mays subsp. mays
  misc_feature (1)..(871): Ceres Seq. ID no. 12413307
  misc_feature (1)..(871): Ortholog of  Ceres SEQ ID NO 13654738 as cited in SEQ ID NO 62613
ataattattatcgtttttgggacaggccggcaaggaagcgtaaagggtagggcggtggttggtgacagcagcaggcctccttcctcctcgctcgcggcgcctccgcctatacctgttgcggcaggcaacaaggcaggcaggcagcagcggagtgccttggtgatctacgaagaggatggattccaggatctcgctcctctgcgccctcgtcctcgcctcctccctcctgcactgcgccagatccgacggcaatgacgcgcagctcctcaagggcatcaacagctacaggtcctcgctcaaggtccccggcgctggccgagaacaagaacgcggcgtgcctggccgagcagctcgcgagacagttcaaggggcaggagtgcaccaacacgacgggcgccaacaccgtcatcggcaccgagcagcagttcccggactaccccaggtacctggaccgctgccacctcaacgcgtcggtgaccgaggacggccaggtgatgccggcgtgcgtgccgggcctcgtccccgccgtcgtcctcgccaactacaccaagtcgcagtacaaccggttcctcaacgacagccagttctccggcgccgggatcgcgagcgagggcgactgggtcgtggtcgtgctcagcaccagcacgggatccggcgactactcgccggctccgccgggctccaactgggcggtctcggcagctcggccgttcggcttcggccagctggtccttttgttggtggggtttgtagttttgctggtgaaatgatgagtgtttagtacgcatgcaccaacatcttcgtggcttatgttgtcacgttcaggtctcgttggctttattaagctttttttcacttgaaaagattgatt

SEQ ID NO: 5349 - protein, 201 aa, Zea mays subsp. mays
  peptide (1)..(201): Ceres Seq. ID no. 12413308
MDSRISLLCALVLASSLLHCARSDGNDAQLLKGINSYRSSLKVPGAGREQERGVPGRAARETVQGAGVHQHDGRQHRHRHRAAVPGLPQVPGPLPPQRVGDRGRPGDAGVRAGPRPRRRPRQLHQVAVQPVPQRQPVLRRRDRERGRLGRGRAQHQHGIRRLLAGSAGLQLGGLGSSAVRLRPAGPFVGGVCSFAGEMMSV

SEQ ID NO: 5350 - protein, 172 aa, Zea mays subsp. mays
  peptide (1)..(172): Ceres Seq. ID no. 12413309
MTRSSSRASTATGPRSRSPALAENKNAACLAEQLARQFKGQECTNTTGANTVIGTEQQFPDYPRYLDRCHLNASVTEDGQVMPACVPGLVPAVVLANYTKSQYNRFLNDSQFSGAGIASEGDWVVVVLSTSTGSGDYSPAPPGSNWAVSAARPFGFGQLVLLLVGFVVLLVK

SEQ ID NO: 5351 - DNA, 1664 bp, Zea mays subsp. mays
  misc_feature (1)..(1664): Ceres Seq. ID no. 12406665
  misc_feature (1)..(1664): Ortholog of  Ceres SEQ ID NO 14313038 as cited in SEQ ID NO 59520
  misc_feature (1)..(1664): Ortholog of  Ceres SEQ ID NO 13595464 as cited in SEQ ID NO 59792
  misc_feature (1)..(1664): Ortholog of  Ceres SEQ ID NO 14316416 as cited in SEQ ID NO 60078
atttccccaatcgagagtccgagacccgagaggaggcacaggcacctgcgctagctgcagctgcaaatcgtcttccccagatccggcgccgcctagttcgctcctgctcgcgacagcgcccagagccgtccgcgtgcgcccgcagagatcgtttcggggacagccgagcagagcagagcagagcagagctgactctgccgcttgttgcccgttcttggctgctgttgctggcgagagcgcgcaggaggagcggctgatttttgattctctctgtccctccctccctcgcttcgctcgcgcggggtgcgtgcacgtaccatgagaagatgatgcgcgccaggcccaaaggtacattcgccgacgcgatgagggagagctcccctcctcctcctccccctccggctccggcttcggcagcggtgaaagaggacgagtgggaggtgcggcccggcgggatgctggtgcagaagcggagccccgacgccgacgcccccgccggggcgcccgtccccaccatccgcgtcaaggtcaagttcaacggcgtgtaccacgagatctacatcaactcccaggcctccttcggtgagctgaagaagatgctgtcggcgcggaccgggctgcaccccgaggaccagaagctggtgtacaaggacaaggagcgggactccaaggcgttcctggacatggccggcgtcaaggaccgctccaagatggtgctgctcgaggaccccgccgcgcaggccaagcgcctcctcgagcagcgccgcaccgacaaggcggagcgcgccgccaagtccatctcccgcatcggcctcgacgtcgacaagctcgccaccaaggtgtcggcgctggaggccatcgtcagcaagggcggcaaggtggtggacgctgacgtggtcgccctcaccgaggcgctcatgaacgagctggtcaagctggactccatcgccgccgacggcgaagtcaaggtgcagcgacgaatgcaggagaagcgggtgcagaagtacgtggagacgctggacgctatccgcgccaagaacgcggcggcgcccaaggccaaggccaaggccaacggcgacatgaatgggcacgccaaggcccgcgcgccgcaactcccgccgcgcccgccgcccgtgtcgcagaggcggaacttccagcagccctccccggcgccagcgccgcccacgcagggctgggagtcgttcgacctgctgtcgtcggtgccgtccacgtcctcggccaccgtgaccaccaccatggcggccgcgaccaccaccacctcgccggccggcgtctccccgatcccgcggttcgactgggagctcttctgaagccctccctcctcgcggcgcgtcggcgtgccggttggtcgatcagacggtacctacctcccttgtccatggatcttccctgctctcatcagtagtgccattgtttcttctgtggattctttccatttcttttcgcctcattctctcttcttttcttccatttcctttcgaatttgtatatctactatatgtctacaaaaagaacagagagaccgacgcggtgcggtgagtgtgttcactgggtcaaaagtccgtcagttgacaactcctcctcgtgaggatccatccatgcatgttgttcagtcacagcaaataagtggtggtcttattatg

SEQ ID NO: 5352 - protein, 334 aa, Zea mays subsp. mays
  peptide (1)..(334): Ceres Seq. ID no. 12406666
MMRARPKGTFADAMRESSPPPPPPPAPASAAVKEDEWEVRPGGMLVQKRSPDADAPAGAPVPTIRVKVKFNGVYHEIYINSQASFGELKKMLSARTGLHPEDQKLVYKDKERDSKAFLDMAGVKDRSKMVLLEDPAAQAKRLLEQRRTDKAERAAKSISRIGLDVDKLATKVSALEAIVSKGGKVVDADVVALTEALMNELVKLDSIAADGEVKVQRRMQEKRVQKYVETLDAIRAKNAAAPKAKAKANGDMNGHAKARAPQLPPRPPPVSQRRNFQQPSPAPAPPTQGWESFDLLSSVPSTSSATVTTTMAAATTTTSPAGVSPIPRFDWELF

SEQ ID NO: 5353 - protein, 333 aa, Zea mays subsp. mays
  peptide (1)..(333): Ceres Seq. ID no. 12406667
MRARPKGTFADAMRESSPPPPPPPAPASAAVKEDEWEVRPGGMLVQKRSPDADAPAGAPVPTIRVKVKFNGVYHEIYINSQASFGELKKMLSARTGLHPEDQKLVYKDKERDSKAFLDMAGVKDRSKMVLLEDPAAQAKRLLEQRRTDKAERAAKSISRIGLDVDKLATKVSALEAIVSKGGKVVDADVVALTEALMNELVKLDSIAADGEVKVQRRMQEKRVQKYVETLDAIRAKNAAAPKAKAKANGDMNGHAKARAPQLPPRPPPVSQRRNFQQPSPAPAPPTQGWESFDLLSSVPSTSSATVTTTMAAATTTTSPAGVSPIPRFDWELF

SEQ ID NO: 5354 - protein, 321 aa, Zea mays subsp. mays
  peptide (1)..(321): Ceres Seq. ID no. 12406668
MRESSPPPPPPPAPASAAVKEDEWEVRPGGMLVQKRSPDADAPAGAPVPTIRVKVKFNGVYHEIYINSQASFGELKKMLSARTGLHPEDQKLVYKDKERDSKAFLDMAGVKDRSKMVLLEDPAAQAKRLLEQRRTDKAERAAKSISRIGLDVDKLATKVSALEAIVSKGGKVVDADVVALTEALMNELVKLDSIAADGEVKVQRRMQEKRVQKYVETLDAIRAKNAAAPKAKAKANGDMNGHAKARAPQLPPRPPPVSQRRNFQQPSPAPAPPTQGWESFDLLSSVPSTSSATVTTTMAAATTTTSPAGVSPIPRFDWELF

SEQ ID NO: 5355 - DNA, 1337 bp, Zea mays subsp. mays
  misc_feature (1)..(1337): Ceres Seq. ID no. 12352345
  misc_feature (1)..(1337): Ortholog of  Ceres SEQ ID NO 15177221 as cited in SEQ ID NO 53046
  misc_feature (1)..(1337): Ortholog of  Ceres SEQ ID NO 15170209 as cited in SEQ ID NO 58562
  misc_feature (1)..(1337): Ortholog of  Ceres SEQ ID NO 14315134 as cited in SEQ ID NO 59476
  misc_feature (1)..(1337): Ortholog of  Ceres SEQ ID NO 12616332 as cited in SEQ ID NO 63449
  misc_feature (1)..(1337): Ortholog of  Ceres SEQ ID NO 13597498 as cited in SEQ ID NO 64648
  misc_feature (1)..(1337): Ortholog of  Ceres SEQ ID NO 14308053 as cited in SEQ ID NO 67790
atggagaagcttccttcagtgagtcctccctttccgtttaaggcagcaagcaggagcagacaggaggcgccgagagcccagcgtcggagatctccgccgccatggagacgctggccagcgccatgcggcgcgagaaccgccggtccaaggccccgccctcctcctctgcttcctccgccctcgcctcgggcagggtccctctcgtcatggccttcctctcctgcctcgcctggctctacgtcgccggccgtttgtggcaggacgcgcagacccgggcgatcctgtccggcctcctcgagaagagctctaccagcgtcccgaaggtgctctcggtggaggacaagcttaggaaccttgggtgcaaggcgattggaaggaaaattgttgaggcggagatggacctgaccaaggccaagagcgaggggtacctgtgggggaacaggactgcagctgtggactccgacaagaagcagcaccttcttgccgtcattggagtttacactgggtttggctcccgtctcaagaggaacgtcttccgtggctcctggatgccaagaggtgatgctctgaagaagcttgaggaaaagggtgtagctattcgttttgttattggtcggagtgcaaatcgaggtgatagcttggaccgtaatattgatgatgaaaatcggcagacaaaggacttcttgattcttgaaagtcatgaagaggctgcagaagaattaccgagcaaagcaaaaattttcttcagtgctgcagttgaagcctgggatgcagaattttatgtcaaagttgaagataacattaatcttgacttagctgggttaattgagatgctcgaaggccgtcgaggtagccaaggattgtacatgggttgtatgaaatcagggatggtcataagtgaagagggccaacaatggtatgaacctgagtggtggaaatttggagattcaaaaacgtattttcgacacgcttctggttctttgtttatcctctcaaaaaatttggctcgctacatcaacataaatagtgcgtcactgcagagttatgcacacgatgatatatcagtaggttcatggatgatgggactgaatgcaacttacgtggatgatgaccggttgtgctgcagcagttccagacaagagaaaatctgttccaatgcttgagcggaaggcgtggctgctggcctgttgctgtacatcctgatgaagattttgcacacctgtcattttgtatacactgctttcgtgaaccggaaaaggctactatccagatagaaacggcttgcaccaaaatttaggaacttccatcaaaaagaaaaaaaaagaacaattttttcc

SEQ ID NO: 5356 - protein, 353 aa, Zea mays subsp. mays
  peptide (1)..(353): Ceres Seq. ID no. 12352346
METLASAMRRENRRSKAPPSSSASSALASGRVPLVMAFLSCLAWLYVAGRLWQDAQTRAILSGLLEKSSTSVPKVLSVEDKLRNLGCKAIGRKIVEAEMDLTKAKSEGYLWGNRTAAVDSDKKQHLLAVIGVYTGFGSRLKRNVFRGSWMPRGDALKKLEEKGVAIRFVIGRSANRGDSLDRNIDDENRQTKDFLILESHEEAAEELPSKAKIFFSAAVEAWDAEFYVKVEDNINLDLAGLIEMLEGRRGSQGLYMGCMKSGMVISEEGQQWYEPEWWKFGDSKTYFRHASGSLFILSKNLARYININSASLQSYAHDDISVGSWMMGLNATYVDDDRLCCSSSRQEKICSNA

SEQ ID NO: 5357 - protein, 346 aa, Zea mays subsp. mays
  peptide (1)..(346): Ceres Seq. ID no. 12352347
MRRENRRSKAPPSSSASSALASGRVPLVMAFLSCLAWLYVAGRLWQDAQTRAILSGLLEKSSTSVPKVLSVEDKLRNLGCKAIGRKIVEAEMDLTKAKSEGYLWGNRTAAVDSDKKQHLLAVIGVYTGFGSRLKRNVFRGSWMPRGDALKKLEEKGVAIRFVIGRSANRGDSLDRNIDDENRQTKDFLILESHEEAAEELPSKAKIFFSAAVEAWDAEFYVKVEDNINLDLAGLIEMLEGRRGSQGLYMGCMKSGMVISEEGQQWYEPEWWKFGDSKTYFRHASGSLFILSKNLARYININSASLQSYAHDDISVGSWMMGLNATYVDDDRLCCSSSRQEKICSNA

SEQ ID NO: 5358 - protein, 318 aa, Zea mays subsp. mays
  peptide (1)..(318): Ceres Seq. ID no. 12352348
MAFLSCLAWLYVAGRLWQDAQTRAILSGLLEKSSTSVPKVLSVEDKLRNLGCKAIGRKIVEAEMDLTKAKSEGYLWGNRTAAVDSDKKQHLLAVIGVYTGFGSRLKRNVFRGSWMPRGDALKKLEEKGVAIRFVIGRSANRGDSLDRNIDDENRQTKDFLILESHEEAAEELPSKAKIFFSAAVEAWDAEFYVKVEDNINLDLAGLIEMLEGRRGSQGLYMGCMKSGMVISEEGQQWYEPEWWKFGDSKTYFRHASGSLFILSKNLARYININSASLQSYAHDDISVGSWMMGLNATYVDDDRLCCSSSRQEKICSNA

SEQ ID NO: 5359 - DNA, 1301 bp, Zea mays subsp. mays
  misc_feature (1)..(1301): Ceres Seq. ID no. 12365448
  misc_feature (1)..(1301): Ortholog of  Ceres SEQ ID NO 13594359 as cited in SEQ ID NO 58086
agatagacctcgcccttggctcccatggcttccgggctccggcttcttctcctcgccgtcgcgtgagactgcgctaaaacctaggctttgagacaccaatggcctccgcgacggcgacggcgcccacattcgctctcgcatcgtccttctcgcgcggcggcttccttccgctccctcgtcacgccggccggcccatgcttcagtctctgcgactcgtcgcgtcagccgtgaagcggcggcgcggcgcggtcgtggtggcagcggacgcggcggcggcggccgggagcgcggagttcggcgacgaggagaacccgtatgagcttctgggcatcaggccgcttgatagcttcgatcacatgaaaatggcctacaagaagaagcgcaaggacgccgaggagactggagacgacgagttccttgccaagttggacagggcctatgacactgtcatgatgcagcagctgcagtatcggaagaagggagtcacatacgggtctgttcaggtgtccaaggatatcaagtatgctgacaatcaaccagtggtgccttggggaccaagattctcccgatcaacaatgaaggacatgcgcataaatatggcagtatcagcagcatttgttgtttggatagctattatgggcaatgcagactggaagcctttgcagttcctttgttttgctttcttctacagaatactacagaagctaagagctactgaaccaccaattactccaatatacaatgaatatggcgaggtcgaaggacgagggataagaatggcaaaaagagtagtccgtgctttgggtttgatatttggatgtgtgttcgctgcatccctgggttatacagcagctattaacttgatcgagctttcaatgcagtacactccccgccttgtttattactaccaggagctgattgttacggcggctacctccgttcttctgtgcatcacagcctcatactaccgatgaacacgacgacgagcagtgatggcctggctgaggcgattgtgagatagccgagaatccacaaattttgtagcatacttccaccagcacctgtcagctttgaggcagagagttcttagtgcaggatcatacatgaccacttgtggcacaatgcagatgaccaatggatgaaaaacatttggcgtgaatgcttcaacagcagtgttgtgtgtgtgcaatttttaattaggtcttggacatgttagacaacagggttagctgcaatgtgcatgtgctttgttttgcctcgatcaacgaatgaatgaaagtactagctgctgcttctttgct

SEQ ID NO: 5360 - protein, 291 aa, Zea mays subsp. mays
  peptide (1)..(291): Ceres Seq. ID no. 12365449
MASATATAPTFALASSFSRGGFLPLPRHAGRPMLQSLRLVASAVKRRRGAVVVAADAAAAAGSAEFGDEENPYELLGIRPLDSFDHMKMAYKKKRKDAEETGDDEFLAKLDRAYDTVMMQQLQYRKKGVTYGSVQVSKDIKYADNQPVVPWGPRFSRSTMKDMRINMAVSAAFVVWIAIMGNADWKPLQFLCFAFFYRILQKLRATEPPITPIYNEYGEVEGRGIRMAKRVVRALGLIFGCVFAASLGYTAAINLIELSMQYTPRLVYYYQELIVTAATSVLLCITASYYR

SEQ ID NO: 5361 - protein, 259 aa, Zea mays subsp. mays
  peptide (1)..(259): Ceres Seq. ID no. 12365450
MLQSLRLVASAVKRRRGAVVVAADAAAAAGSAEFGDEENPYELLGIRPLDSFDHMKMAYKKKRKDAEETGDDEFLAKLDRAYDTVMMQQLQYRKKGVTYGSVQVSKDIKYADNQPVVPWGPRFSRSTMKDMRINMAVSAAFVVWIAIMGNADWKPLQFLCFAFFYRILQKLRATEPPITPIYNEYGEVEGRGIRMAKRVVRALGLIFGCVFAASLGYTAAINLIELSMQYTPRLVYYYQELIVTAATSVLLCITASYYR

SEQ ID NO: 5362 - protein, 205 aa, Zea mays subsp. mays
  peptide (1)..(205): Ceres Seq. ID no. 12365451
MKMAYKKKRKDAEETGDDEFLAKLDRAYDTVMMQQLQYRKKGVTYGSVQVSKDIKYADNQPVVPWGPRFSRSTMKDMRINMAVSAAFVVWIAIMGNADWKPLQFLCFAFFYRILQKLRATEPPITPIYNEYGEVEGRGIRMAKRVVRALGLIFGCVFAASLGYTAAINLIELSMQYTPRLVYYYQELIVTAATSVLLCITASYYR

SEQ ID NO: 5363 - DNA, 1068 bp, Zea mays subsp. mays
  misc_feature (1)..(1068): Ceres Seq. ID no. 12365452
  misc_feature (1)..(1068): Ortholog of  Ceres SEQ ID NO 14315257 as cited in SEQ ID NO 52552
  misc_feature (1)..(1068): Ortholog of  Ceres SEQ ID NO 13597574 as cited in SEQ ID NO 64677
  misc_feature (1)..(1068): Ortholog of  Ceres SEQ ID NO 13597843 as cited in SEQ ID NO 64850
  misc_feature (1)..(1068): Ortholog of  Ceres SEQ ID NO 13597678 as cited in SEQ ID NO 65375
  misc_feature (1)..(1068): Ortholog of  Ceres SEQ ID NO 13596180 as cited in SEQ ID NO 67941
  misc_feature (1)..(1068): Ortholog of  Ceres SEQ ID NO 13591190 as cited in SEQ ID NO 68044
  misc_feature (1)..(1068): Ortholog of  Ceres SEQ ID NO 13595961 as cited in SEQ ID NO 68223
ctacccgatcggcccggtcctgcctctcaagccgccgtccgcgcccggcgacggcgagcaggtagtagcacagcggcacgagtgcgtgaggtggctcgacgcgcagcccccagcgtccgtcgtgctgctctgctttgggagcatgggcggcagcttcccgtcgccccaggtccgcgagatcgccgacggcctcgagcgcagcgggcaccgcttcctgtgggtgctccgtggcccgccaccgccggacggttccaagtacccgacggacgccaacgtccacgagctgctcccggaagggttcctggagaggacgaagggccgaggcctcgtgtggcccacgtgggcgccgcagaaggacatcctcgccaaccccgccgtcggcggcttcgtcacccactgcggctggaactccatcctcgagagcctgtggcacggcgtgccgatggtgccctggccgcagttcgcggagcagcacctgaacgcgttcgagctcgtgtccgtcatgggcgtcgccgttgccatgcaggtggacaggaagcgcggcaacttcgtcgaggcggcggagctggagcgcgcggtccggtgcctgatgggcgggtcggaggaggaggggaggaaggcgcgggagaaggcgacggaggcgaaggccctgagccagaacggcgtggccagcggcgggtcgtcggacgcgtcggtgcagaaactggcgcgagagattttgcacaagcacgacgacaaggggtgtgccaccgcaagcggggagagcatgggcagcgtcgtcgttcccgcatctccggccggaataatatgatcccccgaacacggagaaatcgccgtcgtccacgaataaatcggaggccgccatgcgatccgtctggcactgctcacgttgtttgacattgttcagaatcgccgtgtgcactgtagtttcttatccgcagtagcttttactattcgaaataatgtagcatagcaagcgctgcttcttcctaagtccgtgcagcgtagcccgcgtgttcgagctagtttgtgttaagttgaatgagttaatggatgctagttgtagcc

SEQ ID NO: 5364 - protein, 298 aa, Zea mays subsp. mays
  peptide (1)..(298): Ceres Seq. ID no. 12365453
LPDRPGPASQAAVRARRRRAGSSTAARVREVARRAAPSVRRAALLWEHGRQLPVAPGPRDRRRPRAQRAPLPVGAPWPATAGRFQVPDGRQRPRAAPGRVPGEDEGPRPRVAHVGAAEGHPRQPRRRRLRHPLRLELHPREPVARRADGALAAVRGAAPERVRARVRHGRRRCHAGGQEARQLRRGGGAGARGPVPDGRVGGGGEEGAGEGDGGEGPEPERRGQRRVVGRVGAETGARDFAQARRQGVCHRKRGEHGQRRRSRISGRNNMIPRTRRNRRRPRINRRPPCDPSGTAHVV

SEQ ID NO: 5365 - protein, 269 aa, Zea mays subsp. mays
  peptide (1)..(269): Ceres Seq. ID no. 12365454
YPIGPVLPLKPPSAPGDGEQVVAQRHECVRWLDAQPPASVVLLCFGSMGGSFPSPQVREIADGLERSGHRFLWVLRGPPPPDGSKYPTDANVHELLPEGFLERTKGRGLVWPTWAPQKDILANPAVGGFVTHCGWNSILESLWHGVPMVPWPQFAEQHLNAFELVSVMGVAVAMQVDRKRGNFVEAAELERAVRCLMGGSEEEGRKAREKATEAKALSQNGVASGGSSDASVQKLAREILHKHDDKGCATASGESMGSVVVPASPAGII

SEQ ID NO: 5366 - protein, 222 aa, Zea mays subsp. mays
  peptide (1)..(222): Ceres Seq. ID no. 12365455
MGGSFPSPQVREIADGLERSGHRFLWVLRGPPPPDGSKYPTDANVHELLPEGFLERTKGRGLVWPTWAPQKDILANPAVGGFVTHCGWNSILESLWHGVPMVPWPQFAEQHLNAFELVSVMGVAVAMQVDRKRGNFVEAAELERAVRCLMGGSEEEGRKAREKATEAKALSQNGVASGGSSDASVQKLAREILHKHDDKGCATASGESMGSVVVPASPAGII

SEQ ID NO: 5367 - DNA, 1486 bp, Zea mays subsp. mays
  misc_feature (1)..(1486): Ceres Seq. ID no. 12567030
  misc_feature (1)..(1486): Ortholog of  Ceres SEQ ID NO 14313264 as cited in SEQ ID NO 67300
  misc_feature (1)..(1486): Ortholog of  Ceres SEQ ID NO 14302824 as cited in SEQ ID NO 67794
gtccctgtctcgggtatcgtcgctggtcgctgccgcagccttcgtcctccctctcccactcccgatcgcatccaccctggaaccctagcggcccagcccgcgaccatggcgcggcggtcgacccctctcctacgccgccttctcgccccgtcaccttccctctccactcctctagccgacgccgtatcccgccgcaccgtcacgtacatgccccgcccgggggacggcgctccgcgggcgtcaccctcatcccgggcgacggcatcgggcccctcgtcacgggcgccgtgcggcaggtgatggaggcgatgcacgcgccggtctatttcgagacgtacgaggtccacggcgacatgcccacggtccccgccgaggtcatcgagtccatccgccgcaacaaggtctgcctcaagggcggcctcgccacccccgtaggcggtggtgtgtcctccctcaacgtgcagctccggaaggagctcgacctctacgccgcgctcgtcaactgtttcaacctccctggcctgcctaccaggcacgacaacgtggacatcgtcgtcattcgggagaacagtgagggagagtactcggggctcgagcatgaggtcgttcctggcgtcgtggagagtctcaaggtgataacaaaattctgctctgaaagaattgcaaagtatgcttttgagtatgcataccttaacaatcgaaagaaagtgacagcagtgcataaagccaatatcatgaagcttgctgatggtttgttcttggagtcttgccgtgaggttgcaaagaagtaccctggaattaaatataatgaaatcattgtggacaactgttgtatgcagcttgttgcaaagcctgaacaatttgatgttatggtcaccccaaatctttatggcaatctggtggctaatgtagctgcaggtattgctggaggcactggtgtcatgcctggaggcaatgtgggtcaggaccatgctatcttcgagcaaggtgcttctgcaggaaatgttggaaatgagaaaattgtggagaagaagagagctaaccctgttgcgctgctgctatcttctgccatgatgttgaggcacttgcaatttccatcatttgctgaccgtttggagacggcagttaagcgtgtcatagcagaaggcaagtacagaaccaaagatttgggcggcaccagcacaacccaggaagtgatagatgctgtcattgccaaactgggttaaacacaaaccgtgtgtttaatacattttttttcctcatggactaggtaactagtccttactaaatgtttgttcttcgtataggtttagactttagaccaccattttgttcggcaaattcttgtacaatcttcaggtatcttgtttctggcctggtttgggtgtgtggtgtaactgagcaaactcgtattaatttttacgcaaatttttgtgaccttaattcttaactggaaataagagaaaaatatggaacagttctccgt

SEQ ID NO: 5368 - protein, 407 aa, Zea mays subsp. mays
  peptide (1)..(407): Ceres Seq. ID no. 12567031
PCLGYRRWSLPQPSSSLSHSRSHPPWNPSGPARDHGAAVDPSPTPPSRPVTFPLHSSSRRRIPPHRHVHAPPGGRRSAGVTLIPGDGIGPLVTGAVRQVMEAMHAPVYFETYEVHGDMPTVPAEVIESIRRNKVCLKGGLATPVGGGVSSLNVQLRKELDLYAALVNCFNLPGLPTRHDNVDIVVIRENSEGEYSGLEHEVVPGVVESLKVITKFCSERIAKYAFEYAYLNNRKKVTAVHKANIMKLADGLFLESCREVAKKYPGIKYNEIIVDNCCMQLVAKPEQFDVMVTPNLYGNLVANVAAGIAGGTGVMPGGNVGQDHAIFEQGASAGNVGNEKIVEKKRANPVALLLSSAMMLRHLQFPSFADRLETAVKRVIAEGKYRTKDLGGTSTTQEVIDAVIAKLG

SEQ ID NO: 5369 - protein, 308 aa, Zea mays subsp. mays
  peptide (1)..(308): Ceres Seq. ID no. 12567032
MEAMHAPVYFETYEVHGDMPTVPAEVIESIRRNKVCLKGGLATPVGGGVSSLNVQLRKELDLYAALVNCFNLPGLPTRHDNVDIVVIRENSEGEYSGLEHEVVPGVVESLKVITKFCSERIAKYAFEYAYLNNRKKVTAVHKANIMKLADGLFLESCREVAKKYPGIKYNEIIVDNCCMQLVAKPEQFDVMVTPNLYGNLVANVAAGIAGGTGVMPGGNVGQDHAIFEQGASAGNVGNEKIVEKKRANPVALLLSSAMMLRHLQFPSFADRLETAVKRVIAEGKYRTKDLGGTSTTQEVIDAVIAKLG

SEQ ID NO: 5370 - protein, 305 aa, Zea mays subsp. mays
  peptide (1)..(305): Ceres Seq. ID no. 12567033
MHAPVYFETYEVHGDMPTVPAEVIESIRRNKVCLKGGLATPVGGGVSSLNVQLRKELDLYAALVNCFNLPGLPTRHDNVDIVVIRENSEGEYSGLEHEVVPGVVESLKVITKFCSERIAKYAFEYAYLNNRKKVTAVHKANIMKLADGLFLESCREVAKKYPGIKYNEIIVDNCCMQLVAKPEQFDVMVTPNLYGNLVANVAAGIAGGTGVMPGGNVGQDHAIFEQGASAGNVGNEKIVEKKRANPVALLLSSAMMLRHLQFPSFADRLETAVKRVIAEGKYRTKDLGGTSTTQEVIDAVIAKLG

SEQ ID NO: 5371 - DNA, 1487 bp, Zea mays subsp. mays
  misc_feature (1)..(1487): Ceres Seq. ID no. 13498628
  misc_feature (1)..(1487): Ortholog of  Ceres SEQ ID NO 14313264 as cited in SEQ ID NO 67300
  misc_feature (1)..(1487): Ortholog of  Ceres SEQ ID NO 14302824 as cited in SEQ ID NO 67794
atcgtaaaacaactcgagtatccatctccaccttccctttctcctcctctctcccggattcccggcgacctcccttttccttccctcccgagtngcggccgcccgcccgcctccgtgatcgcaattcgcacctgcacgcgcggccccgacccctagtcctccccacccatggcgcggcgatccgcccctctcctgcgccgcctcgtctccgcctcctccccgcccgcgctgcagtccctcccggaccacgtcggcgtcctcgcgcggcgcacggtgacctacatgccccggcccggggacggcgcaccgcgcgccgtcacgctcatcccaggcgacggcatcggccccctcgtcacgggcgccgtgcggcaggtcatggaggcgatgcacgcgcccgtctacttcgagacctacgacgtccacggagacatgcccacgggtcccgccagccgtcatcgaatccatccgccgcaacaaggtctgcatcaagggcgggctcgccacgcccgtcggcggcggggtctcctccctcaacatgcagctgcgcaaggagctcgatctctacgcctcgctcgtccagtgctccaacctccccggtctgcccaccaggcacgagggtgtcgacatcgtcgtaatcagggagaacaccgagggcgagtactcggggctcgagcacgaggtcgtacccggggtcgttgagagcctcaaggtgatcacaaagttttgctctgagaggattgccaaatatgcattcgagtatgcttaccttaacaaccgaaagaaagtcactgcagtgcataaagcaaacattatgaagcttgccgatggtttgttcttggagtcttgccgtgaagttgcttcaaaatatcctggtattcagtacaatgaaatgattgttgacaactgctctatgcaacttgtttcaaagcctgaacaatttgatgtcatggttacgcctaatctttatggcaatttggtggctaacacagctgcaggtattgttggagggacgggcatcatgcctggaggcaatgtgggtcaggactacgccatctttgagcaaggcgcttctgcaggaaatgttgggaatgagaaccttgtggagcagaagaaagcaaaccctgtcgcgctgcttctgtcatctgctatgatgttgaggcacttgcagttcccgtcatttgcggaccggctcgagacggcagtgaagcgcgtcgttgctgaaggcacgtacagaacaaaggatctgggcggtagcagcaccacccaggaagttaccgatgctgtggttgccaatctggattagattccaggtgtacacggctaaaaaaaggctaattctttggggtgactagttgtctagtcttgactcctgagtgttatttatcttcttacatagattttagattgcttcacatcttcaagagggattacaagccacaaggtatcccttgtttcagattttctttagaaataatattgaggaaccc

SEQ ID NO: 5372 - protein, 255 aa, Zea mays subsp. mays
  peptide (1)..(255): Ceres Seq. ID no. 13498629
MQLRKELDLYASLVQCSNLPGLPTRHEGVDIVVIRENTEGEYSGLEHEVVPGVVESLKVITKFCSERIAKYAFEYAYLNNRKKVTAVHKANIMKLADGLFLESCREVASKYPGIQYNEMIVDNCSMQLVSKPEQFDVMVTPNLYGNLVANTAAGIVGGTGIMPGGNVGQDYAIFEQGASAGNVGNENLVEQKKANPVALLLSSAMMLRHLQFPSFADRLETAVKRVVAEGTYRTKDLGGSSTTQEVTDAVVANLD

SEQ ID NO: 5373 - protein, 210 aa, Zea mays subsp. mays
  peptide (1)..(210): Ceres Seq. ID no. 13498630
  misc_feature (31)..(31): Xaa is any aa, unknown or other
RKTTRVSISTFPFSSSLPDSRRPPFSFPPEXRPPARLRDRNSHLHARPRPLVLPTHGAAIRPSPAPPRLRLLPARAAVPPGPRRRPRAAHGDLHAPARGRRTARRHAHPRRRHRPPRHGRRAAGHGGDARARLLRDLRRPRRHAHGSRQPSSNPSAATRSASRAGSPRPSAAGSPPSTCSCARSSISTPRSSSAPTSPVCPPGTRVSTSS

SEQ ID NO: 5374 - protein, 176 aa, Zea mays subsp. mays
  peptide (1)..(176): Ceres Seq. ID no. 13498631
MARRSAPLLRRLVSASSPPALQSLPDHVGVLARRTVTYMPRPGDGAPRAVTLIPGDGIGPLVTGAVRQVMEAMHAPVYFETYDVHGDMPTGPASRHRIHPPQQGLHQGRARHARRRRGLLPQHAAAQGARSLRLARPVLQPPRSAHQARGCRHRRNQGEHRGRVLGARARGRTRGR

SEQ ID NO: 5375 - DNA, 1916 bp, Zea mays subsp. mays
  misc_feature (1)..(1916): Ceres Seq. ID no. 12406774
  misc_feature (1)..(1916): Ortholog of  Ceres SEQ ID NO 14310907 as cited in SEQ ID NO 54338
aaaaatcttgcacacgcaaaccgcagccaagcaagcgttcccctccctgtgatcgcgatggggtccaccgagaagcaggagccggaggcgtcgccggagatcatcttccggtcgaagctcccggacatcgccatcaccaacacccacccgctgcaccgctactgcttcgagcggctccccgaggtgggcgagaggccctgcctcatcgacggcggcacgggcgccgtgctcacgtacgccgaggtggaccgcctgacccggcgcctggccgcggcgctccggcgcgcaccgctggggctcgggcgcggctcggtggccatgaaccttatgctcaactcggcggagttcgtgctctccttcttcgccgcgtcgcgcgtgggcgccgcggtcaccaccgccaacccgatgtcgacgccgcacgagatcgccgggcagatcgcggcctccggcgccaccgttgtgttcaccgagtccatggccgcggacaagctccccgccatgggcgacaagctcacggtcgtcctcatcgacgcgcgccgcgacgggtgcctccacttctgggacgacgtcatggccagcgtccccgacgaggaggctggcggcggcggcggcggcgagcaagacttggacttcgaccccgacgacgtggtggcgctgccctactcgtccggcacgacggggctgcccaagggcgtgatgctgacgcaccgcagcctgagcacgagcgtggcgcagcaggtggacggcgacaaccccaacatcggcctgaccgccgccgacgtggtcctgtgctcgctccccatgttccacatctactcgctcaacaccatcctgatgtgcgggctgcgcgtgggcgccgccatcgtggtggtgcgccgcttcgacctgcgcaggatgatggagctggtggagcgccaccggatcaccgtcgccccgctggtgccgcccatcgtggtcggccgtggccaagagcgacgagggccgcggcgcacgacctgtcgtcggtcaggatggtgctctccggcgccgcgcccatggggaaggacatcgaggacgcgttcgtggccaagctccccggcgccgtgctcggacaggggtacggcatgacggaggccgggccggtgctgtccatgtgcctggcgttcgccaaggagccgttcagggtgaagtcgggcgcgtgcgggacggtggtgcgcaacgccgagctgaagatcgtggacccggacaccggcaggtccctcgcccgcaacctgcccggggagatctgcatcaggggccagcagatcatgaaaggttacctgaacaacccggaggcgacgaggaacagcatcgacgccggcgggtggctgcacacgggcgacgtcggctttgtggacgacgacgacgagatcttcatcgtcgacaggctcaaggagatcatcaagtacaagggcctccaggtggcccccgccgagctggaggcgctgctcatcacccacccaggcatcgccgacgccgccgtcgtcgggaaacaagtggagccggagatcggggagatcccggtggccttcgtagccagggccaaagggtgcgacgacgggctcaccgaggacgacgtgaagcagtttgtggccaaggaggtggtctactacaagaaggtccgcgaggtggtcttcgtcgacaggatccccaaggccccgtcgggcaagatactgcgcaaggagctcaggaagcggcttcagcttcagcagcaccagcaccagcaagcggtgtgatgtacatcatatttggggtgacgtactgtgctccgtgtttttggtctagtttggcggtgggtgatggtgattaattgtctacctcataatgttcattttgttttcagacgtaatttccatcagtgtgcgcattaaaaatctaatgcagtttcattctgttct

SEQ ID NO: 5376 - protein, 583 aa, Zea mays subsp. mays
  peptide (1)..(583): Ceres Seq. ID no. 12406775
KSCTRKPQPSKRSPPCDRDGVHREAGAGGVAGDHLPVEAPGHRHHQHPPAAPLLLRAAPRGGREALPHRRRHGRRAHVRRGGPPDPAPGRGAPARTAGARARLGGHEPYAQLGGVRALLLRRVARGRRGHHRQPDVDAARDRRADRGLRRHRCVHRVHGRGQAPRHGRQAHGRPHRRAPRRVPPLLGRRHGQRPRRGGWRRRRRRARLGLRPRRRGGAALLVRHDGAAQGRDADAPQPEHERGAAGGRRQPQHRPDRRRRGPVLAPHVPHLLAQHHPDVRAARGRRHRGGAPLRPAQDDGAGGAPPDHRRPAGAAHRGRPWPRATRAAAHDLSSVRMVLSGAAPMGKDIEDAFVAKLPGAVLGQGYGMTEAGPVLSMCLAFAKEPFRVKSGACGTVVRNAELKIVDPDTGRSLARNLPGEICIRGQQIMKGYLNNPEATRNSIDAGGWLHTGDVGFVDDDDEIFIVDRLKEIIKYKGLQVAPAELEALLITHPGIADAAVVGKQVEPEIGEIPVAFVARAKGCDDGLTEDDVKQFVAKEVVYYKKVREVVFVDRIPKAPSGKILRKELRKRLQLQQHQHQQAV

SEQ ID NO: 5377 - protein, 368 aa, Zea mays subsp. mays
  peptide (1)..(368): Ceres Seq. ID no. 12406776
KNLAHANRSQASVPLPVIAMGSTEKQEPEASPEIIFRSKLPDIAITNTHPLHRYCFERLPEVGERPCLIDGGTGAVLTYAEVDRLTRRLAAALRRAPLGLGRGSVAMNLMLNSAEFVLSFFAASRVGAAVTTANPMSTPHEIAGQIAASGATVVFTESMAADKLPAMGDKLTVVLIDARRDGCLHFWDDVMASVPDEEAGGGGGGEQDLDFDPDDVVALPYSSGTTGLPKGVMLTHRSLSTSVAQQVDGDNPNIGLTAADVVLCSLPMFHIYSLNTILMCGLRVGAAIVVVRRFDLRRMMELVERHRITVAPLVPPIVVGRGQERRGPRRTTCRRSGWCSPAPRPWGRTSRTRSWPSSPAPCSDRGTA

SEQ ID NO: 5378 - protein, 349 aa, Zea mays subsp. mays
  peptide (1)..(349): Ceres Seq. ID no. 12406777
MGSTEKQEPEASPEIIFRSKLPDIAITNTHPLHRYCFERLPEVGERPCLIDGGTGAVLTYAEVDRLTRRLAAALRRAPLGLGRGSVAMNLMLNSAEFVLSFFAASRVGAAVTTANPMSTPHEIAGQIAASGATVVFTESMAADKLPAMGDKLTVVLIDARRDGCLHFWDDVMASVPDEEAGGGGGGEQDLDFDPDDVVALPYSSGTTGLPKGVMLTHRSLSTSVAQQVDGDNPNIGLTAADVVLCSLPMFHIYSLNTILMCGLRVGAAIVVVRRFDLRRMMELVERHRITVAPLVPPIVVGRGQERRGPRRTTCRRSGWCSPAPRPWGRTSRTRSWPSSPAPCSDRGTA

SEQ ID NO: 5379 - DNA, 1366 bp, Zea mays subsp. mays
  misc_feature (1)..(1366): Ceres Seq. ID no. 12409557
  misc_feature (1)..(1366): Ortholog of  Ceres SEQ ID NO 13599520 as cited in SEQ ID NO 633
  misc_feature (1)..(1366): Ortholog of  Ceres SEQ ID NO 13595142 as cited in SEQ ID NO 56671
  misc_feature (1)..(1366): Ortholog of  Ceres SEQ ID NO 15168569 as cited in SEQ ID NO 58123
  misc_feature (1)..(1366): Ortholog of  Ceres SEQ ID NO 15226382 as cited in SEQ ID NO 63295
  misc_feature (1)..(1366): Ortholog of  Ceres SEQ ID NO 13598460 as cited in SEQ ID NO 63382
aaatgagcgccagctgtgcgccacagtaccccaaccgaccctgccggcgacggcgttcataaattgggctagggcaaaaactgattcgcgccgccacctctagagagaactgtagatccctgtcatccaatcacccaccatgcaatacctcaccgatgttgctcgctccaaggacctgctcaaggttgtaggccattcggtgatcaaggcgatgtgcgatggggagttcctcatgtcgaggaaatgggccgtcggtggccacgattgggaggtccacttgcgtcccaaggatcactcggagggccacgagcgcccggtgacgctgaggctcgtcttgatctccgaagcgcgcggcggcgacgtcaaggccaagctcagctgccgcctggttgatccgaccgggaggctgaagccgtcgaaggagaatagcaaatcgcataagttctacaagtccggcgattactccggtgcaatccaggtgacgggaagagaggatctggagaagtctggctacctggtggacgattcctacaccgtggagtgcagcatcacggtgctaaaaaaagcgccggcgcggaatactgcggctgcggctgcggcgacggccatggatcgcgatgctgcgatgctgccgtccctcgaactgcaccggcacttgggcgaacttctgcagaaggggacgggcgcggacgtcacgttccatgtgtccggcgagaagttcgccgcgcacaaggccatccttgcctcgaggtcgccggtgttcatggcggagctgtttgggggaatgaaggaggaggcgtcccggcacatcgaggtgaaggacataaagcccgcggcgttcaaggccgtgcttcgcttcatctacactggcacggcgccggaactggacaagaagggcgacggcgggacgtcgttggcgcagcatctgcttgccggcgcggacaggtacggcctggacatgctcaaacttatctgcgtgggctggctcgcggaccgcatcaccgtcgacacggtggcgaccacactggcgctagcggagcagcatggctgctcgcagctcaaggctagctgcatcgagttcatcgcgggatatcttgacgccgtcctggagacagaggggtacaagcacctggaagcaagctgcccctcggtgctcactgatatcctcaaggctacgctgcgaccaaccaattgaagcgtcgagcgggatgactccatcttcatgtgaacgatcagttacactagttgctacattctttatctttcatccacttctgattctggaatcttgatgcagtaattctggccttggcaacatgttcagaatcattgcttctctatttcagattatattttccagttttgc

SEQ ID NO: 5380 - protein, 351 aa, Zea mays subsp. mays
  peptide (1)..(351): Ceres Seq. ID no. 12409558
MQYLTDVARSKDLLKVVGHSVIKAMCDGEFLMSRKWAVGGHDWEVHLRPKDHSEGHERPVTLRLVLISEARGGDVKAKLSCRLVDPTGRLKPSKENSKSHKFYKSGDYSGAIQVTGREDLEKSGYLVDDSYTVECSITVLKKAPARNTAAAAAATAMDRDAAMLPSLELHRHLGELLQKGTGADVTFHVSGEKFAAHKAILASRSPVFMAELFGGMKEEASRHIEVKDIKPAAFKAVLRFIYTGTAPELDKKGDGGTSLAQHLLAGADRYGLDMLKLICVGWLADRITVDTVATTLALAEQHGCSQLKASCIEFIAGYLDAVLETEGYKHLEASCPSVLTDILKATLRPTN

SEQ ID NO: 5381 - protein, 327 aa, Zea mays subsp. mays
  peptide (1)..(327): Ceres Seq. ID no. 12409559
MCDGEFLMSRKWAVGGHDWEVHLRPKDHSEGHERPVTLRLVLISEARGGDVKAKLSCRLVDPTGRLKPSKENSKSHKFYKSGDYSGAIQVTGREDLEKSGYLVDDSYTVECSITVLKKAPARNTAAAAAATAMDRDAAMLPSLELHRHLGELLQKGTGADVTFHVSGEKFAAHKAILASRSPVFMAELFGGMKEEASRHIEVKDIKPAAFKAVLRFIYTGTAPELDKKGDGGTSLAQHLLAGADRYGLDMLKLICVGWLADRITVDTVATTLALAEQHGCSQLKASCIEFIAGYLDAVLETEGYKHLEASCPSVLTDILKATLRPTN

SEQ ID NO: 5382 - protein, 320 aa, Zea mays subsp. mays
  peptide (1)..(320): Ceres Seq. ID no. 12409560
MSRKWAVGGHDWEVHLRPKDHSEGHERPVTLRLVLISEARGGDVKAKLSCRLVDPTGRLKPSKENSKSHKFYKSGDYSGAIQVTGREDLEKSGYLVDDSYTVECSITVLKKAPARNTAAAAAATAMDRDAAMLPSLELHRHLGELLQKGTGADVTFHVSGEKFAAHKAILASRSPVFMAELFGGMKEEASRHIEVKDIKPAAFKAVLRFIYTGTAPELDKKGDGGTSLAQHLLAGADRYGLDMLKLICVGWLADRITVDTVATTLALAEQHGCSQLKASCIEFIAGYLDAVLETEGYKHLEASCPSVLTDILKATLRPTN

SEQ ID NO: 5383 - DNA, 1106 bp, Zea mays subsp. mays
  misc_feature (1)..(1106): Ceres Seq. ID no. 12409553
  misc_feature (1)..(1106): Ortholog of  Ceres SEQ ID NO 12605742 as cited in SEQ ID NO 20438
aaaaatttcgaactcgtattaacggtcggcggtgggtgtggagcgggacggggcggcgagatcacgacgagatggagactgacatctcttcatgcggaggcggcggcgcccaacagggggtataggacctgtggaggtgcaagcggcgacggcagcactgcggcggtcagaggtgttccacgtcttgaaggagctcgtaggcttcgtcctctacatgcaccaccagatcccctcggttttgccgagtcttgaaaatgaatttgcaagtttaaaggaggaaatgacagaaatggcattacaaccagctgaactcaaaccatctgatcggagaaagtacaacacacgaaaaacggaggttagacgtagaataaagaagcacgagaagttgatgaatggcatctctaccttactctgttctcttcagcacgcacttgatgaagtttctagcattgaaggagttgtcctgatacttggaggaagccttgtacggcccctatttgtttatgacattacaatttctcatggtatctttggtccaggaagtgccaaagaacatgctctaaccaagttagcccaatctgtttctcggaaggctatccgtgctcttgtatcacgtggagctgggagtctgtcctacacaggacctagcaagttgtttttgttggtaagatgctccagtacattaaagctaccactggatttcctgccaaagcttgattttcgttacagcaaaaaggttgtacctcttcaaatgcatataaagtgcagtaaatcagggtgttcagggcataaccagcaccatatgcctcttgttgattccccatgttacttcagaatcttctctttcagatgttatttggttccagtgcaagcatacaataagaggtttaccaggcaaggcgtcactagaagggtgatgtgttcatgatatcaaagtttacccaacatgtctttgttgttgtagcgagtaatataacatatatgtacagtagatgatgcttattactttgatgaattgtagcgagtaatatcaaatcagttactacgtaccttgtgtaaagcaacttttgctagttttcaagcaaattaatccgatgttcggttgg

SEQ ID NO: 5384 - protein, 278 aa, Zea mays subsp. mays
  peptide (1)..(278): Ceres Seq. ID no. 12409554
MRRRRRPTGGIGPVEVQAATAALRRSEVFHVLKELVGFVLYMHHQIPSVLPSLENEFASLKEEMTEMALQPAELKPSDRRKYNTRKTEVRRRIKKHEKLMNGISTLLCSLQHALDEVSSIEGVVLILGGSLVRPLFVYDITISHGIFGPGSAKEHALTKLAQSVSRKAIRALVSRGAGSLSYTGPSKLFLLVRCSSTLKLPLDFLPKLDFRYSKKVVPLQMHIKCSKSGCSGHNQHHMPLVDSPCYFRIFSFRCYLVPVQAYNKRFTRQGVTRRVMCS

SEQ ID NO: 5385 - protein, 237 aa, Zea mays subsp. mays
  peptide (1)..(237): Ceres Seq. ID no. 12409555
MHHQIPSVLPSLENEFASLKEEMTEMALQPAELKPSDRRKYNTRKTEVRRRIKKHEKLMNGISTLLCSLQHALDEVSSIEGVVLILGGSLVRPLFVYDITISHGIFGPGSAKEHALTKLAQSVSRKAIRALVSRGAGSLSYTGPSKLFLLVRCSSTLKLPLDFLPKLDFRYSKKVVPLQMHIKCSKSGCSGHNQHHMPLVDSPCYFRIFSFRCYLVPVQAYNKRFTRQGVTRRVMCS

SEQ ID NO: 5386 - protein, 215 aa, Zea mays subsp. mays
  peptide (1)..(215): Ceres Seq. ID no. 12409556
MTEMALQPAELKPSDRRKYNTRKTEVRRRIKKHEKLMNGISTLLCSLQHALDEVSSIEGVVLILGGSLVRPLFVYDITISHGIFGPGSAKEHALTKLAQSVSRKAIRALVSRGAGSLSYTGPSKLFLLVRCSSTLKLPLDFLPKLDFRYSKKVVPLQMHIKCSKSGCSGHNQHHMPLVDSPCYFRIFSFRCYLVPVQAYNKRFTRQGVTRRVMCS

SEQ ID NO: 5387 - DNA, 1616 bp, Zea mays subsp. mays
  misc_feature (1)..(1616): Ceres Seq. ID no. 12369186
  misc_feature (1)..(1616): Ortholog of  Ceres SEQ ID NO 13599231 as cited in SEQ ID NO 984
acacaatcgaccaccgtctctgttctcccctcacttgaggcctccccacacgccgccgcattcggacgctcgcctcccaaaaccccacgaagagatgcatctgccgccgctgcggcgtgtaccggcggcgctgctagtgccggcgcgcggcctcctcgaggcgcgcgtgccttgggtgcgagaacgggccctcgaccacgtcgtggagcgggagcgccacctggtgccgtttctccttgccaaggacgtgctcctcgccgccacgccgccgccgcacgccgtgccgctgcactcgctgccctccacaatccctttcccgttccgcccgctgcgcttcctgcggctctacccctcggcgttcgcgctctcgccgcaccccatcgaggtctccccgacgccccggctctcggcgctccacgccgccgaggcgcaggccgtcgacgccaccgtccccgacgcggctgaccgtctgcttcggctgctcatgctcgccccctctcgcgcgctcccgctccgcctcgtcgcgcgcctccggctcgacctcggcctcgcgtaccgacttccaacgctcgctgctccccaactacccggattacttcgcgctctccccggacggcagcctcctcgagctcgtctgctacaggaaggatctcgccgtgtcgtcgatgcagtcctacgcgcagcgcaccggcggctacaaggtcggcgacgcggtcgccttcccactctcgttccccagaggattcgagcttgacaagaaggtgcgcaaatggttagacgagtggcagaggctgccgtacatttcgccctatgaggatgggtcgcacctaacgccaaggagtgacataacggagaagaggaccgtggcggtgctgcacgaggtcctgagtctcacggttgggaagaagatggagaaggaggtgttggtcaagcttggggaggcgctgcggttgccaccaggattcaggaaggtggtggctaagcaccctgggattttctacatatcgcacaagctgaggacacagacggtagttctcagggaatcataccggaggcatatgcttgtggacaagcaccccatgatggggataaggtatcagtatatgcatttgatgcatatggggaaggaggaagttggaaagggcaagggcaaagatcgaaggagtagtcgcagtgaacaaatcatcggggaagagtttggtgccacagtggatgatgatgaaaatgaggagtatgatgatgaagacgacgtggctgaagatgacatggaagtgggtgttgcttccgaggatcaggacagtgacgacgatgttgatgaggatataaaggaacaaatttcttattgattttttgagttgggaagtggcaaccgcacttcaagtggtggtgctcgtacatctctttgttggactgcatgaatgtgcagggaacacagaaatacagatgtacaatcaatcctggtgaccggtagaaaccctattagaagatagagcatgtttttgtttatcacacagtgaagtacttagtgacactcaagcgtatcctctattgttgacatgcttagtgacttgttgtatcatggtggcttcacctaagctattcatctaagggttgac

SEQ ID NO: 5388 - protein, 250 aa, Zea mays subsp. mays
  peptide (1)..(250): Ceres Seq. ID no. 12369187
HNRPPSLFSPHLRPPHTPPHSDARLPKPHEEMHLPPLRRVPAALLVPARGLLEARVPWVRERALDHVVERERHLVPFLLAKDVLLAATPPPHAVPLHSLPSTIPFPFRPLRFLRLYPSAFALSPHPIEVSPTPRLSALHAAEAQAVDATVPDAADRLLRLLMLAPSRALPLRLVARLRLDLGLAYRLPTLAAPQLPGLLRALPGRQPPRARLLQEGSRRVVDAVLRAAHRRLQGRRRGRLPTLVPQRIRA

SEQ ID NO: 5389 - protein, 226 aa, Zea mays subsp. mays
  peptide (1)..(226): Ceres Seq. ID no. 12369188
MQSYAQRTGGYKVGDAVAFPLSFPRGFELDKKVRKWLDEWQRLPYISPYEDGSHLTPRSDITEKRTVAVLHEVLSLTVGKKMEKEVLVKLGEALRLPPGFRKVVAKHPGIFYISHKLRTQTVVLRESYRRHMLVDKHPMMGIRYQYMHLMHMGKEEVGKGKGKDRRSSRSEQIIGEEFGATVDDDENEEYDDEDDVAEDDMEVGVASEDQDSDDDVDEDIKEQISY

SEQ ID NO: 5390 - protein, 219 aa, Zea mays subsp. mays
  peptide (1)..(219): Ceres Seq. ID no. 12369189
MHLPPLRRVPAALLVPARGLLEARVPWVRERALDHVVERERHLVPFLLAKDVLLAATPPPHAVPLHSLPSTIPFPFRPLRFLRLYPSAFALSPHPIEVSPTPRLSALHAAEAQAVDATVPDAADRLLRLLMLAPSRALPLRLVARLRLDLGLAYRLPTLAAPQLPGLLRALPGRQPPRARLLQEGSRRVVDAVLRAAHRRLQGRRRGRLPTLVPQRIRA

SEQ ID NO: 5391 - DNA, 1689 bp, Zea mays subsp. mays
  misc_feature (1)..(1689): Ceres Seq. ID no. 13498301
  misc_feature (1)..(1689): Ortholog of  Ceres SEQ ID NO 12583469 as cited in SEQ ID NO 51031
  misc_feature (1)..(1689): Ortholog of  Ceres SEQ ID NO 13597389 as cited in SEQ ID NO 63426
  misc_feature (1)..(1689): Ortholog of  Ceres SEQ ID NO 15180463 as cited in SEQ ID NO 0
acagttgttgaaccttgagactactagctagagagacaaatatccaggccgaangagaagaggtctgagcgaggagacgacgcccgcgccatggcaggcgccagcnccaccaacggcggaggcaacggcggaggcgggaaggtggtcagcatgccgctgcagtacttctgcgtgctggcggcggtggtggtggccgtgatggtgctgtcgctgtcgttcatgtcgccggcggccatggtggccgtccgccagaacctcagctccgtggcggccgcccccggtggcagcagcaacagcaccggcggcggcgccggagcgggaggcgccgccggcctggccgaggcgtcaccgccggcgggctggaaggagaaggagcaggcgcggcggccgcccgtggtgctgttcaacttcggcgactccaactccgacaccggaggcgtggcggcggccggcgggatacggatcatgccgccggagggccgcacctacttccaccaccccacgggccggctctccgacggccgcgtcatcatcgactttatctgtgagagtctgggcacgcgtgaactgaacccatacctcaggggaattggttcggactacagcaacggcgtcaacttcgccatggcaggctcgacggtgacccacggcgtctctccctactccttgaacgtccaggtcgaccagttcggtctacttcaggcacaggtccccttgagatgttcgaacgaggactggaaggcccggtgagcaaggaggggtttgagagcgctctgtacatgatggacatcggccacaacgacatggttggtgtggcgcacacaccgtccgatcagtgggacaagaagatcacagagatcgtcggcgaggtcagacaagccatctcgatcctgtacgacaacggagcgaggaagttctggatccacggcacgggcgccctggggtgcctgccggcgctggtggtgcaggagacgaagggcgagcaggacaagcacggctgcctcgccggcgtcaacagggccgccaaggcgttcaacaggaagctcagccagctctgcgacgacctccgcttccacctcaagggcgccaccgtcgtctacaccgacatgttcgccatcaagtacgacttcgtcgccaaccacaccaaatacgggatcgagtggccgttcatggtgtgctgtggcaacggcgggccgccgtacaacatgaagcagggaagacccggctgtggcgacctgtgcccaccggaggcgaaggtggtcagctgggatggcgtgcacttcacggatttcggcagcggccttgctgccaagcttgcgatgagcggggagtactccaagcccagggtgaagctggcaagcttgatccatggcggatccaagaaaacgtcagactcttgatgcggaccattgaccgagtcgtgacctttggatccacatctatggaatggaagatgggtagcggtgaagaattggagggatatcttgcaccaggctgtttcttgacgaagattgactccttgtacacactacacagaactactacagaaggcaaagtagcactgggaatgctcagttacaagcttaagttaatttgctgtctttttattttgggattttgtgctgcagagtacagagattttgtaccttgatgtacgtgtaactatttatgatagttcttacaagctcc

SEQ ID NO: 5392 - protein, 226 aa, Zea mays subsp. mays
  peptide (1)..(226): Ceres Seq. ID no. 13498302
MFERGLEGPVSKEGFESALYMMDIGHNDMVGVAHTPSDQWDKKITEIVGEVRQAISILYDNGARKFWIHGTGALGCLPALVVQETKGEQDKHGCLAGVNRAAKAFNRKLSQLCDDLRFHLKGATVVYTDMFAIKYDFVANHTKYGIEWPFMVCCGNGGPPYNMKQGRPGCGDLCPPEAKVVSWDGVHFTDFGSGLAAKLAMSGEYSKPRVKLASLIHGGSKKTSDS

SEQ ID NO: 5393 - protein, 219 aa, Zea mays subsp. mays
  peptide (1)..(219): Ceres Seq. ID no. 13498303
  misc_feature (6)..(6): Xaa is any aa, unknown or other
MAGASXTNGGGNGGGGKVVSMPLQYFCVLAAVVVAVMVLSLSFMSPAAMVAVRQNLSSVAAAPGGSSNSTGGGAGAGGAAGLAEASPPAGWKEKEQARRPPVVLFNFGDSNSDTGGVAAAGGIRIMPPEGRTYFHHPTGRLSDGRVIIDFICESLGTRELNPYLRGIGSDYSNGVNFAMAGSTVTHGVSPYSLNVQVDQFGLLQAQVPLRCSNEDWKAR

SEQ ID NO: 5394 - protein, 206 aa, Zea mays subsp. mays
  peptide (1)..(206): Ceres Seq. ID no. 13498304
MMDIGHNDMVGVAHTPSDQWDKKITEIVGEVRQAISILYDNGARKFWIHGTGALGCLPALVVQETKGEQDKHGCLAGVNRAAKAFNRKLSQLCDDLRFHLKGATVVYTDMFAIKYDFVANHTKYGIEWPFMVCCGNGGPPYNMKQGRPGCGDLCPPEAKVVSWDGVHFTDFGSGLAAKLAMSGEYSKPRVKLASLIHGGSKKTSDS

SEQ ID NO: 5395 - DNA, 1168 bp, Zea mays subsp. mays
  misc_feature (1)..(1168): Ceres Seq. ID no. 12357881
  misc_feature (1)..(1168): Ortholog of  Ceres SEQ ID NO 12608276 as cited in SEQ ID NO 57871
  misc_feature (1)..(1168): Ortholog of  Ceres SEQ ID NO 13598492 as cited in SEQ ID NO 63882
  misc_feature (1)..(1168): Ortholog of  Ceres SEQ ID NO 13657914 as cited in SEQ ID NO 66230
  misc_feature (1)..(1168): Ortholog of  Ceres SEQ ID NO 13595877 as cited in SEQ ID NO 67702
  misc_feature (1)..(1168): Ortholog of  Ceres SEQ ID NO 13622667 as cited in SEQ ID NO 0
agaataggataggatagcccctgttcttctagcctgctagtctgctacactccacgtctctacctctaccgcacattttgctacgctccagctccatcgactatcgagtgcttgctggacgccggggccgggcaatggatccgggcagcgcggagatcgttttcgactgcgatttcttccggatatacagcgacggtcgcgtcgagcgtttcgccggcatggaaaccgtgcccgcgggcttcgacgccgacaccggcgtcacctcaaaagacgtggtcgtcgacgccgccaccggcatcgcgacgcggctctacctgccagccatccctacggccccgtcatctccccagtcggacggcaacggcaacggcaacggcagcgccacggcgaagcttcccatcctcgtcatcttccacggcggcggcttcgtcatcggctcaccggctgatcctggtttccaccgctacatgaactcgctggtcgctagcgcccgcgtcgtcgctgtctccgtcggctaccgcctcgcgcccgaaaacccgctccctgcagcctacaaggactcctggaccgcgctcaactgggctgtttccggcgcggacccgtggctgtccgcccacggtgacctcggccgcgtcttcgtggccggttacagcgccgggtcgaacatcgcccacaacatggccatcgccgcgggcgtcagaggcttgcgcgccgcggaaccaccacgagtagaaggcgtgatcctgctccacccttcgtttgccggtgaacagaggatggaagaagaggatgacagattctggcaagttaataagaggaggtggaaggccatcttccccggtgcgagagacgggctggacgatccgagaatcaacccggtcgtcgctggcgcgccgagcttggcgaagctggtgggcgagcggctgctcgtgtgcacggcgtcggaggacccgagggcaccgaggggccgggcatactgcgaggcggtgagggccagctgttggccgggaaaggtggagagcttcgaatcacaaaacgagggacacgggttcttcgtttccggccacggcagcacccaggccattgcgctgatggatcgagtggttggtttcattgttggccattaacttcgattgttcaaaataaatgaaattaagggttgtttgct

SEQ ID NO: 5396 - protein, 330 aa, Zea mays subsp. mays
  peptide (1)..(330): Ceres Seq. ID no. 12357882
MDPGSAEIVFDCDFFRIYSDGRVERFAGMETVPAGFDADTGVTSKDVVVDAATGIATRLYLPAIPTAPSSPQSDGNGNGNGSATAKLPILVIFHGGGFVIGSPADPGFHRYMNSLVASARVVAVSVGYRLAPENPLPAAYKDSWTALNWAVSGADPWLSAHGDLGRVFVAGYSAGSNIAHNMAIAAGVRGLRAAEPPRVEGVILLHPSFAGEQRMEEEDDRFWQVNKRRWKAIFPGARDGLDDPRINPVVAGAPSLAKLVGERLLVCTASEDPRAPRGRAYCEAVRASCWPGKVESFESQNEGHGFFVSGHGSTQAIALMDRVVGFIVGH

SEQ ID NO: 5397 - protein, 302 aa, Zea mays subsp. mays
  peptide (1)..(302): Ceres Seq. ID no. 12357883
METVPAGFDADTGVTSKDVVVDAATGIATRLYLPAIPTAPSSPQSDGNGNGNGSATAKLPILVIFHGGGFVIGSPADPGFHRYMNSLVASARVVAVSVGYRLAPENPLPAAYKDSWTALNWAVSGADPWLSAHGDLGRVFVAGYSAGSNIAHNMAIAAGVRGLRAAEPPRVEGVILLHPSFAGEQRMEEEDDRFWQVNKRRWKAIFPGARDGLDDPRINPVVAGAPSLAKLVGERLLVCTASEDPRAPRGRAYCEAVRASCWPGKVESFESQNEGHGFFVSGHGSTQAIALMDRVVGFIVGH

SEQ ID NO: 5398 - protein, 219 aa, Zea mays subsp. mays
  peptide (1)..(219): Ceres Seq. ID no. 12357884
MNSLVASARVVAVSVGYRLAPENPLPAAYKDSWTALNWAVSGADPWLSAHGDLGRVFVAGYSAGSNIAHNMAIAAGVRGLRAAEPPRVEGVILLHPSFAGEQRMEEEDDRFWQVNKRRWKAIFPGARDGLDDPRINPVVAGAPSLAKLVGERLLVCTASEDPRAPRGRAYCEAVRASCWPGKVESFESQNEGHGFFVSGHGSTQAIALMDRVVGFIVGH

SEQ ID NO: 5399 - DNA, 1610 bp, Zea mays subsp. mays
  misc_feature (1)..(1610): Ceres Seq. ID no. 12406770
  misc_feature (1)..(1610): Ortholog of  Ceres SEQ ID NO 13596816 as cited in SEQ ID NO 62287
acgatcccactctccccgctcacctcaaggagtcaaggtgcaaagctaagcttagctcattgctcaagcttccgtctctttctctctgcgagactgcacactgccaccacgcgcaatggcggcattccaccatttgttgccggccttgctccttctactcctgctcccttccacccctgaggcgacgtcctcggcgctgcttggcatcagctacggtcgcgttggcaacaacctccctgcagctacatcagtgccgcagattgtggcttccctgggcgtcggccgcgtccgactctacgatgctgacagcaccaccattcgcgccttcgccaacacgggcgtcgagctcgtcgtcggcgtccctgacgagtgcctcgccactgtctccaccccgacgggcgccgcctcctgggtccgctccaacatttcccctgcgctcccggccacaaagatcgccttcctcacagtcggcaacgaggtgctcaccggcgtcaacagctcctcgctgtccaggtacctccttccggcgatgcggtgcctccacgacgcgcttgcgcaggccggcctggacaagcaggtcgccgtgaccacggcgcacaacctcggcgtgctggccacgtcgtacccgccgtcgtcggcgtacttccgcaaggacctcctcccgatgctctgccccattctcgacttccacgcgcgcgcgggctcgccgttccttgttaatgcgtacccctacttcgcctacgccgaggaacccaccggcgtggagctcgagtacgcgctgctggaacccggccatgccggtgtcgccgacccggggaccgggctgcactacaccaacatgctcgcagcgcaggtggatgcggtgtaccacgccatcgccgcagccaacagcgcggcggcgcgggccgcgcaggtgcgcgtgtctgagaccgggtggccgtcggcgggggacgccaacgagaccggcgccacgccgcagaacgcggcgaggtacaacggcaacgtgatgcggctcgtggcccaggggaagggcacgccgctgcggccggcggcgccgctgcgcgtctacatgttcgcgctcttcaacgagaacatgaagcccgggcccaacgtcggagcgcaactacgggctcttcaagcccgacggaacgccggcgtacgagctttcctaccgcctcccgctggacaacaccacctcctcctcttccgccggtggcagcattaccggcggtggtgggtacaatggccacggctacgggtcgtcggacaacggcggatactacagcatctcggccgccgccaaggtgacaccgggttggtggacatggccacaggtagctgtggcaccatgtgtggctgtactggccatggcattgtgaccattagcagagatcaagtggtacctgcctggacttggtggatggaagcctctggcttctgatggagtcagaagcagcgtatggtgtgggtcagtgaactgctgttctagagaaacgcattgctcgtggtgatccacttcctctctctctatgttgtttcccttttctccacgttgttgtaactgaggtgtccttgtaatcagtggtgaacaaatggactagacaattgtc

SEQ ID NO: 5400 - protein, 441 aa, Zea mays subsp. mays
  peptide (1)..(441): Ceres Seq. ID no. 12406771
MAAFHHLLPALLLLLLLPSTPEATSSALLGISYGRVGNNLPAATSVPQIVASLGVGRVRLYDADSTTIRAFANTGVELVVGVPDECLATVSTPTGAASWVRSNISPALPATKIAFLTVGNEVLTGVNSSSLSRYLLPAMRCLHDALAQAGLDKQVAVTTAHNLGVLATSYPPSSAYFRKDLLPMLCPILDFHARAGSPFLVNAYPYFAYAEEPTGVELEYALLEPGHAGVADPGTGLHYTNMLAAQVDAVYHAIAAANSAAARAAQVRVSETGWPSAGDANETGATPQNAARYNGNVMRLVAQGKGTPLRPAAPLRVYMFALFNENMKPGPNVGAQLRALQARRNAGVRAFLPPPAGQHHLLLFRRWQHYRRWWVQWPRLRVVGQRRILQHLGRRQGDTGLVDMATGSCGTMCGCTGHGIVTISRDQVVPAWTWWMEASGF

SEQ ID NO: 5401 - protein, 303 aa, Zea mays subsp. mays
  peptide (1)..(303): Ceres Seq. ID no. 12406772
MRCLHDALAQAGLDKQVAVTTAHNLGVLATSYPPSSAYFRKDLLPMLCPILDFHARAGSPFLVNAYPYFAYAEEPTGVELEYALLEPGHAGVADPGTGLHYTNMLAAQVDAVYHAIAAANSAAARAAQVRVSETGWPSAGDANETGATPQNAARYNGNVMRLVAQGKGTPLRPAAPLRVYMFALFNENMKPGPNVGAQLRALQARRNAGVRAFLPPPAGQHHLLLFRRWQHYRRWWVQWPRLRVVGQRRILQHLGRRQGDTGLVDMATGSCGTMCGCTGHGIVTISRDQVVPAWTWWMEASGF

SEQ ID NO: 5402 - protein, 258 aa, Zea mays subsp. mays
  peptide (1)..(258): Ceres Seq. ID no. 12406773
MLCPILDFHARAGSPFLVNAYPYFAYAEEPTGVELEYALLEPGHAGVADPGTGLHYTNMLAAQVDAVYHAIAAANSAAARAAQVRVSETGWPSAGDANETGATPQNAARYNGNVMRLVAQGKGTPLRPAAPLRVYMFALFNENMKPGPNVGAQLRALQARRNAGVRAFLPPPAGQHHLLLFRRWQHYRRWWVQWPRLRVVGQRRILQHLGRRQGDTGLVDMATGSCGTMCGCTGHGIVTISRDQVVPAWTWWMEASGF

SEQ ID NO: 5403 - DNA, 1247 bp, Zea mays subsp. mays
  misc_feature (1)..(1247): Ceres Seq. ID no. 12406931
  misc_feature (1)..(1247): Ortholog of  Ceres SEQ ID NO 13505109 as cited in SEQ ID NO 58983
  misc_feature (1)..(1247): Ortholog of  Ceres SEQ ID NO 14302303 as cited in SEQ ID NO 62365
  misc_feature (1)..(1247): Ortholog of  Ceres SEQ ID NO 13599066 as cited in SEQ ID NO 0
tcgtttcgcgtcctagcccaggacaagttccctttttcttctcccaagtctgcgactaggaggcgacgggccgacgggccaagtttcctttctcttctcagtctgcgactggcggcggcgaccatcacgcacaagccttcgttgctacctgcgctccgccaattcggtgaattgcagtctaagcaaagggaaaaggaaggatcttttctccagacttggtaattttggacgacaagatgcacttccttgcatcatttcatgtccctacaggttttgtattatctgatttttcgggatggatgccaaaaggttcctgcatctggtcgaggagaagaaaagaagggtcctcgagaagaaagaagccccactaaagtgggagcagaagctagaaacagcagctaaggccaaggttgatgcagaagcaaaggtgaagaagctaaattcaagaaagcacaggaggagaggagatttgtcctcagactctgatagtgactatggcagcgatgttgatcgaaaacacttgaagaggaagaaccgcagaaggaacaagaagcatgagcattctgactctgatgatgccaggagacgcaatcgtagatctagaaggagcaccgactcaagtgatgagagcaacagtgaatacgagaccaggtctgaagaagaacgtccaaggaagaagcgctcgcacagaagaaggcatcaccggcactcttcaaagtcagactctgaaaactacagcagtgatgaggaacaacggagacctgccaaggaccattctcagagccgcaggcggcaccatcggtcatctgatgatgactcagacaaggacaaggtcaagtcaagacatgggaagggtctgagatctcgtgacgaggatgcaagagcagatttcaacagcaataagcatctcaggagccaatccttggaggagtcatcagatgatagagatgctgatgaatctgagaagatgaggaatggcaaaaggtctcacaagaatggcggccaccgtcaccatcaccatcgacaccaccatgaatgacatagtaactctgcagaacctaatgacaggaggcaagtactgaaagatggccagaggggcccttgaaggtgacagcgcatactgaagatatcccagcaaggtcgagttaattgtccttattaaggacatgaagatcatttttttttcgttcctgatgttctcagataattattgtattgctgacaacatttctttgatttgtgaatat

SEQ ID NO: 5404 - protein, 247 aa, Zea mays subsp. mays
  peptide (1)..(247): Ceres Seq. ID no. 12406932
MDAKRFLHLVEEKKRRVLEKKEAPLKWEQKLETAAKAKVDAEAKVKKLNSRKHRRRGDLSSDSDSDYGSDVDRKHLKRKNRRRNKKHEHSDSDDARRRNRRSRRSTDSSDESNSEYETRSEEERPRKKRSHRRRHHRHSSKSDSENYSSDEEQRRPAKDHSQSRRRHHRSSDDDSDKDKVKSRHGKGLRSRDEDARADFNSNKHLRSQSLEESSDDRDADESEKMRNGKRSHKNGGHRHHHHRHHHE

SEQ ID NO: 5405 - DNA, 1380 bp, Zea mays subsp. mays
  misc_feature (1)..(1380): Ceres Seq. ID no. 12404892
  misc_feature (1)..(1380): Ortholog of  Ceres SEQ ID NO 12608276 as cited in SEQ ID NO 57871
  misc_feature (1)..(1380): Ortholog of  Ceres SEQ ID NO 13598492 as cited in SEQ ID NO 63882
  misc_feature (1)..(1380): Ortholog of  Ceres SEQ ID NO 13657914 as cited in SEQ ID NO 66230
  misc_feature (1)..(1380): Ortholog of  Ceres SEQ ID NO 13622667 as cited in SEQ ID NO 0
atcgttcaccgaaccggtgcttctccgtgcatatatatataagcncgcgaccccggccgggcggcatcacagcacagcagtgcgccgtcattcattcatcgctgccatggcttcccctgtcctgctcgtcgccgcgctctgctgtctctgcgcgctgctcggagcggcgggggagccggcgaggggagcggcggcggaagcgtcggcactccgcagcaaggcggccacggaccccaacatggaggtgaagttcgacttcacgccgttcctgatccagtacaagagcggccgcgttgcaccggttcatgggcacgtcgttcgtcccggcgtccgtggacccgcgcaccggggtggcctccagggacgtggtcgtggaccacgggactggcctcgcggtgcggctgtaccggccgagccgccaagccgtcgccgccggcgtcggnngcaggctcaccgtgctggtgtacttccacggcggcgcgttcgtggtggagtcggcgttcgaccccgtgtaccacggctacctgaacgcgctgacggccaaggccggggtcatcgcggtgtcggtgaactaccgcctggcgccggagcacccgctcccggcggcgtacgaggacgcgtgggcggcgctggcgtgggtggtggcgaacgcgaacgcgcgacgcggcggggccggggccggggccggggacccctggctgtccaggcacggcgacgcgtcccgcctgttcctcgccggcgacagcgccggcggcaacatcgcgcagaacctggcgatgcgcgcggcggggcagcagcagaggatcagggggctggcgctgctggacccctacttcctggggcggtacgtgggcggggtcgcggcgcgcgcgtgggacttcatctgcgcgggaaggtacgggatggaccacccgtacgtggacccgatggcgctgnnggcggagnngctgcggcggctgccgtcgccgcgcgtgctgatgacggtntcggagcaggaccggctcggccccttccagcgcgcgtacgtggacgcgctccggggcagcgggtggcgcgggcgggcgcggctgtacgtgacgcccggcgagggccactgctacttcctcaacaacctcgcctcgcccaaggccgccatgcacatggccacgctcgccgcgttcatcaacggcagctgatagcttgtcggcagcgtggtagtgctgctcacccgatcgatcagccagccctctgtacgtagctatagtggtctgtctatctcactggtgagtggagacatctgtaaccaccataccgtatactgtattttgtcagtggccgcccgagagagaggtgtttagcatgcatgttatgtaatgtaatactacgcgcacgtttttgttc

SEQ ID NO: 5406 - protein, 411 aa, Zea mays subsp. mays
  peptide (1)..(411): Ceres Seq. ID no. 12404893
  misc_feature (15)..(15): Xaa is any aa, unknown or other
  misc_feature (148)..(148): Xaa is any aa, unknown or other
  misc_feature (312)..(312): Xaa is any aa, unknown or other
  misc_feature (315)..(315): Xaa is any aa, unknown or other
  misc_feature (329)..(329): Xaa is any aa, unknown or other
SFTEPVLLRAYIYKXATPAGRHHSTAVRRHSFIAAMASPVLLVAALCCLCALLGAAGEPARGAAAEASALRSKAATDPNMEVKFDFTPFLIQYKSGRVAPVHGHVVRPGVRGPAHRGGLQGRGRGPRDWPRGAAVPAEPPSRRRRRRXQAHRAGVLPRRRVRGGVGVRPRVPRLPERADGQGRGHRGVGELPPGAGAPAPGGVRGRVGGAGVGGGERERATRRGRGRGRGPLAVQARRRVPPVPRRRQRRRQHRAEPGDARGGAAAEDQGAGAAGPLLPGAVRGRGRGARVGLHLRGKVRDGPPVRGPDGAXGGXAAAAAVAARADDGXGAGPARPLPARVRGRAPGQRVARAGAAVRDARRGPLLLPQQPRLAQGRHAHGHARRVHQRQLIACRQRGSAAHPIDQPALCT

SEQ ID NO: 5407 - protein, 376 aa, Zea mays subsp. mays
  peptide (1)..(376): Ceres Seq. ID no. 12404894
  misc_feature (113)..(113): Xaa is any aa, unknown or other
  misc_feature (277)..(277): Xaa is any aa, unknown or other
  misc_feature (280)..(280): Xaa is any aa, unknown or other
  misc_feature (294)..(294): Xaa is any aa, unknown or other
MASPVLLVAALCCLCALLGAAGEPARGAAAEASALRSKAATDPNMEVKFDFTPFLIQYKSGRVAPVHGHVVRPGVRGPAHRGGLQGRGRGPRDWPRGAAVPAEPPSRRRRRRXQAHRAGVLPRRRVRGGVGVRPRVPRLPERADGQGRGHRGVGELPPGAGAPAPGGVRGRVGGAGVGGGERERATRRGRGRGRGPLAVQARRRVPPVPRRRQRRRQHRAEPGDARGGAAAEDQGAGAAGPLLPGAVRGRGRGARVGLHLRGKVRDGPPVRGPDGAXGGXAAAAAVAARADDGXGAGPARPLPARVRGRAPGQRVARAGAAVRDARRGPLLLPQQPRLAQGRHAHGHARRVHQRQLIACRQRGSAAHPIDQPALCT

SEQ ID NO: 5408 - protein, 332 aa, Zea mays subsp. mays
  peptide (1)..(332): Ceres Seq. ID no. 12404895
  misc_feature (69)..(69): Xaa is any aa, unknown or other
  misc_feature (233)..(233): Xaa is any aa, unknown or other
  misc_feature (236)..(236): Xaa is any aa, unknown or other
  misc_feature (250)..(250): Xaa is any aa, unknown or other
MEVKFDFTPFLIQYKSGRVAPVHGHVVRPGVRGPAHRGGLQGRGRGPRDWPRGAAVPAEPPSRRRRRRXQAHRAGVLPRRRVRGGVGVRPRVPRLPERADGQGRGHRGVGELPPGAGAPAPGGVRGRVGGAGVGGGERERATRRGRGRGRGPLAVQARRRVPPVPRRRQRRRQHRAEPGDARGGAAAEDQGAGAAGPLLPGAVRGRGRGARVGLHLRGKVRDGPPVRGPDGAXGGXAAAAAVAARADDGXGAGPARPLPARVRGRAPGQRVARAGAAVRDARRGPLLLPQQPRLAQGRHAHGHARRVHQRQLIACRQRGSAAHPIDQPALCT

SEQ ID NO: 5409 - protein, 289 aa, Zea mays subsp. mays
  peptide (1)..(289): Ceres Seq. ID no. 12404896
  misc_feature (46)..(46): Xaa is any aa, unknown or other
  misc_feature (47)..(47): Xaa is any aa, unknown or other
  misc_feature (211)..(211): Xaa is any aa, unknown or other
  misc_feature (214)..(214): Xaa is any aa, unknown or other
  misc_feature (227)..(227): Xaa is any aa, unknown or other
MGTSFVPASVDPRTGVASRDVVVDHGTGLAVRLYRPSRQAVAAGVXXRLTVLVYFHGGAFVVESAFDPVYHGYLNALTAKAGVIAVSVNYRLAPEHPLPAAYEDAWAALAWVVANANARRGGAGAGAGDPWLSRHGDASRLFLAGDSAGGNIAQNLAMRAAGQQQRIRGLALLDPYFLGRYVGGVAARAWDFICAGRYGMDHPYVDPMALXAEXLRRLPSPRVLMTXSEQDRLGPFQRAYVDALRGSGWRGRARLYVTPGEGHCYFLNNLASPKAAMHMATLAAFINGS

SEQ ID NO: 5410 - DNA, 1167 bp, Zea mays subsp. mays
  misc_feature (1)..(1167): Ceres Seq. ID no. 12355460
  misc_feature (1)..(1167): Ortholog of  Ceres SEQ ID NO 14316324 as cited in SEQ ID NO 55612
  misc_feature (1)..(1167): Ortholog of  Ceres SEQ ID NO 14316378 as cited in SEQ ID NO 57746
  misc_feature (1)..(1167): Ortholog of  Ceres SEQ ID NO 13596097 as cited in SEQ ID NO 68421
  misc_feature (1)..(1167): Ortholog of  Ceres SEQ ID NO 13598439 as cited in SEQ ID NO 69016
  misc_feature (1)..(1167): Ortholog of  Ceres SEQ ID NO 13599524 as cited in SEQ ID NO 0
aaaaggctgtcagctaaattcttcggaacccccgttgccagccggcgatcgcgccgtgggatctcatcgaggcgacgacggcgatgtcaagggaggcggcgaggacgaggagccgggtcctggtggttggcgccaccggccgcctcggtggaagcatcgctcgggccagcctcgccgcgggtcaccccaccttcgcgctcgttcggccccaccacttcgcacgccccgattcccccgtgcttgggccgctcgtagccgccggcgccactctgctccaggggtcactggaagattactcgagcctgctcgaggcggtgtgtcaggtggacgttgtcatctgcgcggtgtccacgaagcaggtgctcgagcagaagcctctgattcgggctataaaggaagctggatgcgtgaagagatttattccggcagaatttggagcagatccaacaaaggttcaaatttgtggcatggattatggcttctatgagaagaaaattgaaatccgtcattcaatagagagtgaaggcattcctcatacttacatatgctgcaacttctttatgcgctatttgcttccttcactggtgcaacctgggctagatgctcctcctagagatgaaatcaaaatatttggtgaaggaaatactaaaggtgtttttgttaaagagaatgatgttgctaaatttacaatatgcaccatagaggatcccagaacattgaacaagacgttgtatctgagacctccaggaaatgtcttctcaatgaatgaattggctgacctctgggagtcaaaactcaagaaatccctgaaaaggttatatgtaacagaagagcaacttcttaaagaaatccatgatgctccatttcccttgaagatggatttaatctttatatattcagcgtttgttaagggtgaccacacgtattttgaaattgacttgtcaatggaaggaactcaactgtatccccatgtaaattatacaacagtgaacgagtacttggatactctagtttaggatatttgttcggtttatatcttccttgtaataagtcaaaaataatgttttttttttgtttcgaatggagcattaaaagaaggggactgatggacacctatccatgtttgttctgacaagcgaatgtggtgatgatctgacaaattttttt

SEQ ID NO: 5411 - protein, 310 aa, Zea mays subsp. mays
  peptide (1)..(310): Ceres Seq. ID no. 12355461
MSREAARTRSRVLVVGATGRLGGSIARASLAAGHPTFALVRPHHFARPDSPVLGPLVAAGATLLQGSLEDYSSLLEAVCQVDVVICAVSTKQVLEQKPLIRAIKEAGCVKRFIPAEFGADPTKVQICGMDYGFYEKKIEIRHSIESEGIPHTYICCNFFMRYLLPSLVQPGLDAPPRDEIKIFGEGNTKGVFVKENDVAKFTICTIEDPRTLNKTLYLRPPGNVFSMNELADLWESKLKKSLKRLYVTEEQLLKEIHDAPFPLKMDLIFIYSAFVKGDHTYFEIDLSMEGTQLYPHVNYTTVNEYLDTLV

SEQ ID NO: 5412 - protein, 182 aa, Zea mays subsp. mays
  peptide (1)..(182): Ceres Seq. ID no. 12355462
MDYGFYEKKIEIRHSIESEGIPHTYICCNFFMRYLLPSLVQPGLDAPPRDEIKIFGEGNTKGVFVKENDVAKFTICTIEDPRTLNKTLYLRPPGNVFSMNELADLWESKLKKSLKRLYVTEEQLLKEIHDAPFPLKMDLIFIYSAFVKGDHTYFEIDLSMEGTQLYPHVNYTTVNEYLDTLV

SEQ ID NO: 5413 - protein, 161 aa, Zea mays subsp. mays
  peptide (1)..(161): Ceres Seq. ID no. 12355463
KGCQLNSSEPPLPAGDRAVGSHRGDDGDVKGGGEDEEPGPGGWRHRPPRWKHRSGQPRRGSPHLRARSAPPLRTPRFPRAWAARSRRRHSAPGVTGRLLEPARGGVSGGRCHLRGVHEAGARAEASDSGYKGSWMREEIYSGRIWSRSNKGSNLWHGLWLL

SEQ ID NO: 5414 - DNA, 1633 bp, Zea mays subsp. mays
  misc_feature (1)..(1633): Ceres Seq. ID no. 12406661
  misc_feature (1)..(1633): Ortholog of  Ceres SEQ ID NO 14303866 as cited in SEQ ID NO 53689
  misc_feature (1)..(1633): Ortholog of  Ceres SEQ ID NO 14315958 as cited in SEQ ID NO 59979
  misc_feature (1)..(1633): Ortholog of  Ceres SEQ ID NO 13597613 as cited in SEQ ID NO 65334
  misc_feature (1)..(1633): Ortholog of  Ceres SEQ ID NO 13655958 as cited in SEQ ID NO 65456
  misc_feature (1)..(1633): Ortholog of  Ceres SEQ ID NO 13597037 as cited in SEQ ID NO 69005
atcaccaaccctcctcctccttgcctaggtactcgcagcagcgtcggcaagcaaggttctcttctcgcgccgcccagatctgagcgctcccatggccatgccgtcctcccgctccccggcgcngccgccaacggcctcctcctcctactggtgctacatgtgcgaccgcttcgttcgcgccgccgcttcctcctcctcctcacccacttcgccgtcctcctcctcccccgcctgcccgtcctgcggcgggggcttcctcgaggagatgggcgcgccgccgccccgcgcccgccggccccgccgcgccgcccgccgcggcaccgactcccgcgcctcgcccttcaaccccgtcatcgttctccgccgctccccgcccgccgacgccgacgccgatggctcctcctctcccgccgccgccaccggcagcagcttacgagctgttctacgacgacggggcggggtcgggcctccgcccgctcccggagagcatgtcggacttcctcatgggctccggcttcgagcggctgctggagcagctggcccagatggaggccggcggcggtctggcggcgcgcgcccgcgacgcgccgccggcgtccaaggccgccgtggactccatgcccgcgctccgcgtcggcgccgcccacgtcgcggccgacgcgcactgcgccgtctgcaaggaggccttcgagctgggcgccgaggccagggagatgccctgcgcccacatctaccatgccgactgcatcctgccctggctcgcgctccgcaactcctgccccgtctgccgccacgagatgcccgccgacaacgccgccccgcgcgctgccgccgccgccgccgcggacgaggacgccagggtcggcctcaccatctggaggctccccggcggcgggttcgcggtcgggagattcgccggcgggccgaggcccgacgagagggagctccccgtggtgtacacggagatggaaagcgggttcaacttcaacagcggccacgcgcccaggcggatctcgtggggcgccaggcaggccgcggccacggacaggggcaccgtccgccgcttcctccgcagcgtcttcgcctgctttggacgcggccacgccccgtcggcggcggccgcgcgcgccatgcctgagctcaacgacgacgacgtggcgtctgaccacagcgccgccttcagccgtgggtccaggagccggagcaccagctggaggctcgaggacgggcgtgccgacgccatggtgcagagatgaccgccgtatactgtgtggaactgcttgtagtacagttacagtaacgctgccgaaaaagattgctgctttgtttcattcatgttgtatttaccgtactactgctagcctcctgcctactacttaggaagatttgaggttgtagaacagggcaaattggtgttagtacatattgtagtagtgaggaagggaaagagagcagcatctcgacctctctttgttagagagtttgcattgcagctgcaggtggggggtcaactgcgaactcaaacacttgttcttggcttggttggtggtaatattaggagcgaggtgatggatcaactgttcttttattatctttctttctgttcagttcattgtggcaggaaccatccttg

SEQ ID NO: 5415 - protein, 459 aa, Zea mays subsp. mays
  peptide (1)..(459): Ceres Seq. ID no. 12406662
  misc_feature (41)..(41): Xaa is any aa, unknown or other
ITNPPPPCLGTRSSVGKQGSLLAPPRSERSHGHAVLPLPGXAANGLLLLLVLHVRPLRSRRRFLLLLTHFAVLLLPRLPVLRRGLPRGDGRAAAPRPPAPPRRPPRHRLPRLALQPRHRSPPLPARRRRRRWLLLSRRRHRQQLTSCSTTTGRGRASARSRRACRTSSWAPASSGCWSSWPRWRPAAVWRRAPATRRRRPRPPWTPCPRSASAPPTSRPTRTAPSARRPSSWAPRPGRCPAPTSTMPTASCPGSRSATPAPSAATRCPPTTPPRALPPPPPRTRTPGSASPSGGSPAAGSRSGDSPAGRGPTRGSSPWCTRRWKAGSTSTAATRPGGSRGAPGRPRPRTGAPSAASSAASSPALDAATPRRRRPRAPCLSSTTTTWRLTTAPPSAVGPGAGAPAGGSRTGVPTPWCRDDRRILCGTACSTVTVTLPKKIAALFHSCCIYRTTASLLPTT

SEQ ID NO: 5416 - protein, 348 aa, Zea mays subsp. mays
  peptide (1)..(348): Ceres Seq. ID no. 12406663
  misc_feature (11)..(11): Xaa is any aa, unknown or other
MAMPSSRSPAXPPTASSSYWCYMCDRFVRAAASSSSSPTSPSSSSPACPSCGGGFLEEMGAPPPRARRPRRAARRGTDSRASPFNPVIVLRRSPPADADADGSSSPAAATGSSLRAVLRRRGGVGPPPAPGEHVGLPHGLRLRAAAGAAGPDGGRRRSGGARPRRAAGVQGRRGLHARAPRRRRPRRGRRALRRLQGGLRAGRRGQGDALRPHLPCRLHPALARAPQLLPRLPPRDARRQRRPARCRRRRRGRGRQGRPHHLEAPRRRVRGREIRRRAEARREGAPRGVHGDGKRVQLQQRPRAQADLVGRQAGRGHGQGHRPPLPPQRLRLLWTRPRPVGGGRARHA

SEQ ID NO: 5417 - protein, 346 aa, Zea mays subsp. mays
  peptide (1)..(346): Ceres Seq. ID no. 12406664
  misc_feature (9)..(9): Xaa is any aa, unknown or other
MPSSRSPAXPPTASSSYWCYMCDRFVRAAASSSSSPTSPSSSSPACPSCGGGFLEEMGAPPPRARRPRRAARRGTDSRASPFNPVIVLRRSPPADADADGSSSPAAATGSSLRAVLRRRGGVGPPPAPGEHVGLPHGLRLRAAAGAAGPDGGRRRSGGARPRRAAGVQGRRGLHARAPRRRRPRRGRRALRRLQGGLRAGRRGQGDALRPHLPCRLHPALARAPQLLPRLPPRDARRQRRPARCRRRRRGRGRQGRPHHLEAPRRRVRGREIRRRAEARREGAPRGVHGDGKRVQLQQRPRAQADLVGRQAGRGHGQGHRPPLPPQRLRLLWTRPRPVGGGRARHA

SEQ ID NO: 5418 - DNA, 454 bp, Zea mays subsp. mays
  misc_feature (1)..(454): Ceres Seq. ID no. 12346015
  misc_feature (1)..(454): Ortholog of  Ceres SEQ ID NO 13600225 as cited in SEQ ID NO 575
caaaagatgatactcagtcagatcgtgaggaggatgccagtaaacaagaggaggatgatgatgatgatattggtactgctctcatgtctcgcaagcagagaggcctttataaggctatgaagatgggcaaagaaaagaaaaaggagaaagttgagctactcaagaagagaaaaaagaacgcggattctggcgcttcttccaagaagcggcactgatgtgtcacaaatcttcatcgcattggtgtgtcatctctagtagaaatgttaccatgatcagctctgcgtgccaatcccccatgatgggtgggttgccttttgatatctgctatgtatgcttaagatgagttcaaggatatgtaacatgaaacttgaatagaaaagttttgatctgtcttacgaagcatttagactcgttattattgtgaaacttgaatagaaaagttttgacctgtctc

SEQ ID NO: 5419 - protein, 70 aa, Zea mays subsp. mays
  peptide (1)..(70): Ceres Seq. ID no. 12346016
KDDTQSDREEDASKQEEDDDDDIGTALMSRKQRGLYKAMKMGKEKKKEKVELLKKRKKNADSGASSKKRH

SEQ ID NO: 5420 - protein, 43 aa, Zea mays subsp. mays
  peptide (1)..(43): Ceres Seq. ID no. 12346017
MSRKQRGLYKAMKMGKEKKKEKVELLKKRKKNADSGASSKKRH

SEQ ID NO: 5421 - protein, 42 aa, Zea mays subsp. mays
  peptide (1)..(42): Ceres Seq. ID no. 12346018
MCHKSSSHWCVISSRNVTMISSACQSPMMGGLPFDICYVCLR

SEQ ID NO: 5422 - DNA, 1789 bp, Zea mays subsp. mays
  misc_feature (1)..(1789): Ceres Seq. ID no. 12405101
  misc_feature (1)..(1789): Ortholog of  Ceres SEQ ID NO 14312216 as cited in SEQ ID NO 53930
  misc_feature (1)..(1789): Ortholog of  Ceres SEQ ID NO 13656404 as cited in SEQ ID NO 65806
  misc_feature (1)..(1789): Ortholog of  Ceres SEQ ID NO 12779935 as cited in SEQ ID NO 66774
  misc_feature (1)..(1789): Ortholog of  Ceres SEQ ID NO 13598695 as cited in SEQ ID NO 67368
  misc_feature (1)..(1789): Ortholog of  Ceres SEQ ID NO 13591174 as cited in SEQ ID NO 68289
attgccagccagctgcgcagtgcgcttgcctctgctgcgtataaagtttcttccttccttggccgcttctgcgctcgcctcccttctcctcccccatcctctcccttgtggttctagatccactcctccccgtgctcactgctcatccgcgaacaggttgagcggggacgccgtggaggggcgagggggagccagattgagccatggcctcctcctgggttcttgccctggttcttgcgctgtcggcaggcgcaagcctggcgcgtggctccgagccgtggtggaacgagacgcaggtgtacgccaccaccgccaactccggtggcggcaacggcgtcttcgtcggcctcacgctcatccagtcggcggcggccaagggagcggtgtgcttggatggaagcttaccaggttaccacctccacagagggtttggatcaggagcaaacagttggctcgtcaatctcgagggcggaggctggtgcaatgatcgcagcagctgtgtgttccgcaagggcagtcgtcgtggatcatcaaatcacatggagaggcaactccagtttacagggatattgagtaacaaacctgaagagaatcccgatttctacaactggaatagagtgaaggtccggtactgtgatggtggatctttcactggtgatggctctgatgcggctgcaggcctttatttccgaggtcagcgcatttggcaggccgctatggatgacctaatggcccaaggaatgcgttatgctaatcaggcccttctttctggatgctctgccggtggtgtttctaccatacttcactgtgatgaattccgtggactgttcccatcaaataccagagtcaaatgcttagctgatgctggaatgtttcttgacactgttgatgtttctggccgccgggaaatgagatcctttttcaatggtattgtgagattgcagggttctggaagaagcttgcctaggtcttgcacctcacacatggacaaaacctcgtgctttttcccccagaatgtgttgccaaccatccgaaccccaacttttgttttgaacactgcctatgacgtgtggcagcttcaacaaagtgtggcccctagaacagctgatccccaaggtctttggtcaaagtgtaggacgaaccatgccttctgtaatagcaaccagctccagtttttgcaagggttcaggaaccagatgcttgatgccgtgaggggtttctctgcatcaaggcaaaatggtctgttcatcaactcatgttttgctcattgccagagcgagagacaggatacttggtacgcgaacaactctccacgtcttggtaacaagaaaatcgctgacgctgtcggggactggttcttcgagagggggaatgccaagtacacagactgcccatacccttgcgatggcacttgccatcaccttgtgttcaggggagaccactaagatcattcttcagcaccaacaaattcatcagatggtacaaggatcaaaccccaatgggtacagaatggaaaacaaggtatagatacagataaggtgcaagtggtcggcttgcccatgtttgttcatcagtgagtcatatgattgatagtgcgaggacctcacccgcgaacgcgcggaggaggcctctgcattagattcacataccgtcatgatatcgaattttcattggaaaagtgtccatgattacgtaccagaacatttgagttacatactcatttcgtgtactgtattaataacactagaacgttacatattcatttgtcctgaagatcgtactacttggc

SEQ ID NO: 5423 - protein, 413 aa, Zea mays subsp. mays
  peptide (1)..(413): Ceres Seq. ID no. 12405102
MASSWVLALVLALSAGASLARGSEPWWNETQVYATTANSGGGNGVFVGLTLIQSAAAKGAVCLDGSLPGYHLHRGFGSGANSWLVNLEGGGWCNDRSSCVFRKGSRRGSSNHMERQLQFTGILSNKPEENPDFYNWNRVKVRYCDGGSFTGDGSDAAAGLYFRGQRIWQAAMDDLMAQGMRYANQALLSGCSAGGVSTILHCDEFRGLFPSNTRVKCLADAGMFLDTVDVSGRREMRSFFNGIVRLQGSGRSLPRSCTSHMDKTSCFFPQNVLPTIRTPTFVLNTAYDVWQLQQSVAPRTADPQGLWSKCRTNHAFCNSNQLQFLQGFRNQMLDAVRGFSASRQNGLFINSCFAHCQSERQDTWYANNSPRLGNKKIADAVGDWFFERGNAKYTDCPYPCDGTCHHLVFRGDH

SEQ ID NO: 5424 - protein, 301 aa, Zea mays subsp. mays
  peptide (1)..(301): Ceres Seq. ID no. 12405103
MERQLQFTGILSNKPEENPDFYNWNRVKVRYCDGGSFTGDGSDAAAGLYFRGQRIWQAAMDDLMAQGMRYANQALLSGCSAGGVSTILHCDEFRGLFPSNTRVKCLADAGMFLDTVDVSGRREMRSFFNGIVRLQGSGRSLPRSCTSHMDKTSCFFPQNVLPTIRTPTFVLNTAYDVWQLQQSVAPRTADPQGLWSKCRTNHAFCNSNQLQFLQGFRNQMLDAVRGFSASRQNGLFINSCFAHCQSERQDTWYANNSPRLGNKKIADAVGDWFFERGNAKYTDCPYPCDGTCHHLVFRGDH

SEQ ID NO: 5425 - protein, 242 aa, Zea mays subsp. mays
  peptide (1)..(242): Ceres Seq. ID no. 12405104
MDDLMAQGMRYANQALLSGCSAGGVSTILHCDEFRGLFPSNTRVKCLADAGMFLDTVDVSGRREMRSFFNGIVRLQGSGRSLPRSCTSHMDKTSCFFPQNVLPTIRTPTFVLNTAYDVWQLQQSVAPRTADPQGLWSKCRTNHAFCNSNQLQFLQGFRNQMLDAVRGFSASRQNGLFINSCFAHCQSERQDTWYANNSPRLGNKKIADAVGDWFFERGNAKYTDCPYPCDGTCHHLVFRGDH

SEQ ID NO: 5426 - DNA, 1487 bp, Zea mays subsp. mays
  misc_feature (1)..(1487): Ceres Seq. ID no. 12358823
  misc_feature (1)..(1487): Ortholog of  Ceres SEQ ID NO 13596465 as cited in SEQ ID NO 62133
aagaaccctaggaaataacaggagaggggacgcgcgctcactagcaaaatgcaggcctcttccctccggcgagccctccttctgcggggaccgcgaggcgcccagctcttccccattcccgtaggcaacaagccccgtgccttctcctccgcgtcccccgcggcagcgcgctctcccaaagacgctcataatgcgccgccgccgattatgccgacgctgccgtggggtgatgcgctcgcagccacgcagcgcaccttctgcctgccgctcgctgggcgcgtcctcgccgcctcggcgaccgagaacgcggccgtggcccccgtcgcagtctacgcctcgctggccctggccgccgccggcgcgcgcggcgacacgcggcggcaggtcctccaggcgctgggcggcggcggcgggggcaggggcgccgcggttcaagcggccaacttggcgtcgcgcgtggtcaagcgggtgttcaaggaccggtccacgtccggcggcccgcggctggccttcgcaggaggaatatgggccgacacctcaacgagcctatcgcccggggttcgtggaggccgcccgtagtgtctacagctgcacggcgcggacggctgacttcattaacaagcctgaagatgccgccaagctaattaacatgtgggtcaaacaatccacaaaagatactgttacctcgctccttccggatggactaattgacaagaatacaggacttgttattggcagcgcactgtattttaggggaagatggcttgacaggactgatacgaggagtgacgcggtacaaaaattctgctgtctggatcgaacttgtgttgacgttccttttgtggaatatgatagaactcgacctttcgcagtccacgatggatttaaagtgattaagcttccttaccagcaaggaaataatgaacggaagttctccatgtacatcttcctgcctgatgctcatgatggcttgtttgaattagctaagaaagttttcgcggaaccatcattcttagaacaacacttgccaactgagaagcggcacgtggatatcaagattcccaagttcacagtgtcattccaggtcaatatgaagcagtttctgaaagaaatgggcctcgaattacccttcctccgtgatgcagatttcactgatatggtcaaggaagatggatccagaaatccgttgtatctatccgacatacttcataaagcagttttggaggttaatgatgaaggcgttgaagaaacttctgtgagaattggcatagggaagccctcaccaggagagcactttgttgccgaccatcctttcttctttgtcattagggaggaggtgtctggctcagtaatgttcatggggcacatactggacccatcatcacaatcttaatttcgggctctgcacttttgtcacctatatattacacatatatcttgtatgatctgactttgtcagtctggttcaatgagatttttagtacttg

SEQ ID NO: 5427 - protein, 400 aa, Zea mays subsp. mays
  peptide (1)..(400): Ceres Seq. ID no. 12358824
MRRRRLCRRCRGVMRSQPRSAPSACRSLGASSPPRRPRTRPWPPSQSTPRWPWPPPARAATRGGRSSRRWAAAAGAGAPRFKRPTWRRAWSSGCSRTGPRPAARGWPSQEEYGPTPQRAYRPGFVEAARSVYSCTARTADFINKPEDAAKLINMWVKQSTKDTVTSLLPDGLIDKNTGLVIGSALYFRGRWLDRTDTRSDAVQKFCCLDRTCVDVPFVEYDRTRPFAVHDGFKVIKLPYQQGNNERKFSMYIFLPDAHDGLFELAKKVFAEPSFLEQHLPTEKRHVDIKIPKFTVSFQVNMKQFLKEMGLELPFLRDADFTDMVKEDGSRNPLYLSDILHKAVLEVNDEGVEETSVRIGIGKPSPGEHFVADHPFFFVIREEVSGSVMFMGHILDPSSQS

SEQ ID NO: 5428 - protein, 387 aa, Zea mays subsp. mays
  peptide (1)..(387): Ceres Seq. ID no. 12358825
MRSQPRSAPSACRSLGASSPPRRPRTRPWPPSQSTPRWPWPPPARAATRGGRSSRRWAAAAGAGAPRFKRPTWRRAWSSGCSRTGPRPAARGWPSQEEYGPTPQRAYRPGFVEAARSVYSCTARTADFINKPEDAAKLINMWVKQSTKDTVTSLLPDGLIDKNTGLVIGSALYFRGRWLDRTDTRSDAVQKFCCLDRTCVDVPFVEYDRTRPFAVHDGFKVIKLPYQQGNNERKFSMYIFLPDAHDGLFELAKKVFAEPSFLEQHLPTEKRHVDIKIPKFTVSFQVNMKQFLKEMGLELPFLRDADFTDMVKEDGSRNPLYLSDILHKAVLEVNDEGVEETSVRIGIGKPSPGEHFVADHPFFFVIREEVSGSVMFMGHILDPSSQS

SEQ ID NO: 5429 - protein, 247 aa, Zea mays subsp. mays
  peptide (1)..(247): Ceres Seq. ID no. 12358826
MWVKQSTKDTVTSLLPDGLIDKNTGLVIGSALYFRGRWLDRTDTRSDAVQKFCCLDRTCVDVPFVEYDRTRPFAVHDGFKVIKLPYQQGNNERKFSMYIFLPDAHDGLFELAKKVFAEPSFLEQHLPTEKRHVDIKIPKFTVSFQVNMKQFLKEMGLELPFLRDADFTDMVKEDGSRNPLYLSDILHKAVLEVNDEGVEETSVRIGIGKPSPGEHFVADHPFFFVIREEVSGSVMFMGHILDPSSQS

SEQ ID NO: 5430 - DNA, 1037 bp, Zea mays subsp. mays
  misc_feature (1)..(1037): Ceres Seq. ID no. 12349085
  misc_feature (1)..(1037): Ortholog of  Ceres SEQ ID NO 13598160 as cited in SEQ ID NO 61317
  misc_feature (1)..(1037): Ortholog of  Ceres SEQ ID NO 12614253 as cited in SEQ ID NO 68518
aacccaagagcgaaaatggatccgcaccagttcgccccctcccagcagtcggcgctgaccatggaatcggcggagatcacggccgccgccgccgccgcgcgcgcacccaacggcgctgcccgggctatcgtcgaggacgacgacgaggacgacgacgtccccgaggtggccgcctgcatatcgacgatgctcgaccgcgggggtagcgtggagagccaccgcctcttcctggcgcgccgcaccgcgctggagatgctccgcgaccgcgggtacgccgttccggaggaagagctcgcccggaccctcccggagttccgcgcctggtgggaatacaggccagagctcgaacgcctcgccttctccactaccctcgcctccgacccgtccagcaaggtgaaagttgtgttctgtccacctggacctgtcaaaatcgcagctatccggctgatatataccgaagtcaaagatgagaacttgtccagactgattctgatactgcagggcaaaataatgtctacaaccagagaatccatcaaggagatctttcgatttaaagttgacacattccagatcacggaattactggtgaacatcactaagcatgtcctcaagcccaagcatgaagtgttgactgcagaggggaaagctaagctcctgaaggagtacaatgtggtggattcacagttgcctcgcatgctggagaatgatgctgttgctcgctattacgggctaggcaagggaactgttgttaaggttatatacgacagcgagcttaccgggaaccatgtgacgtaccgatgcattacctgaggggcccatgtgtttcggtggatgaagtgtcgtaagcagtctgtaaaaaattacctctaagaggggcaggtgacactgttctgctaggcctttgtaagcacccaattatgcaggatgaagctcgctgtaagctattggtaaaatcatcttgcgccattgccgtaccttaagtgcttggtgttaatcttggaaacagtgagacaactaatcctgtagtgagttatctc

SEQ ID NO: 5431 - protein, 269 aa, Zea mays subsp. mays
  peptide (1)..(269): Ceres Seq. ID no. 12349086
NPRAKMDPHQFAPSQQSALTMESAEITAAAAAARAPNGAARAIVEDDDEDDDVPEVAACISTMLDRGGSVESHRLFLARRTALEMLRDRGYAVPEEELARTLPEFRAWWEYRPELERLAFSTTLASDPSSKVKVVFCPPGPVKIAAIRLIYTEVKDENLSRLILILQGKIMSTTRESIKEIFRFKVDTFQITELLVNITKHVLKPKHEVLTAEGKAKLLKEYNVVDSQLPRMLENDAVARYYGLGKGTVVKVIYDSELTGNHVTYRCIT

SEQ ID NO: 5432 - protein, 264 aa, Zea mays subsp. mays
  peptide (1)..(264): Ceres Seq. ID no. 12349087
MDPHQFAPSQQSALTMESAEITAAAAAARAPNGAARAIVEDDDEDDDVPEVAACISTMLDRGGSVESHRLFLARRTALEMLRDRGYAVPEEELARTLPEFRAWWEYRPELERLAFSTTLASDPSSKVKVVFCPPGPVKIAAIRLIYTEVKDENLSRLILILQGKIMSTTRESIKEIFRFKVDTFQITELLVNITKHVLKPKHEVLTAEGKAKLLKEYNVVDSQLPRMLENDAVARYYGLGKGTVVKVIYDSELTGNHVTYRCIT

SEQ ID NO: 5433 - protein, 249 aa, Zea mays subsp. mays
  peptide (1)..(249): Ceres Seq. ID no. 12349088
MESAEITAAAAAARAPNGAARAIVEDDDEDDDVPEVAACISTMLDRGGSVESHRLFLARRTALEMLRDRGYAVPEEELARTLPEFRAWWEYRPELERLAFSTTLASDPSSKVKVVFCPPGPVKIAAIRLIYTEVKDENLSRLILILQGKIMSTTRESIKEIFRFKVDTFQITELLVNITKHVLKPKHEVLTAEGKAKLLKEYNVVDSQLPRMLENDAVARYYGLGKGTVVKVIYDSELTGNHVTYRCIT

SEQ ID NO: 5434 - DNA, 1602 bp, Zea mays subsp. mays
  misc_feature (1)..(1602): Ceres Seq. ID no. 12407263
  misc_feature (1)..(1602): Ortholog of  Ceres SEQ ID NO 15177298 as cited in SEQ ID NO 52711
tatgtttatacgttagcaaaccaattcccatcccattactccaactccggcggcggccgcaccaccgccaaaaaccaatgcagatgacggcggatcaggaatcggcgggccaaggcgacggaggacgacacgatgagcggccggcggcgggtggacgacgacgacgaccacgacgtcgtcttcgacgccgggaagccgccgccgttccgcatcggcgacgtgcgggcggcggtgccggagcactgctggcgcaagagcccctggcggtcgctgtggtacgtggcgcgggacgtggcggtggtggcggcgctgggcgcggcggcggcgggcatggacagttgggcggtgtggccgctgtactgggcggcgcaggggaccatgttctgggcgctcttcgtgctgggacacgactgtggccatggcagcttctcggacagcgcgacgctcaacagcgtcgtgggccatctccttcactccttcatcctcgtcccttaccatggatggaggatcagccacagaacacaccatcagaaccacggccacatccacagggacgagtcatggcacccgatcacggagaagctgtaccggcaactagagccacgcaccaagaagctgagattcacggtgcccttcccgctgctcgcattccccgtctacctcttgtacaggagccccggcaagtcgggctcccacttccttcccagcagcgacctgttcagccccaaggagaagagcgacgtcatggtgtcaaccacctgctggtgcatcatgctcgcctccctcctcgccatggcgtgcgcgttcggcccactccaggtgctcaagatgtacggcatcccatacctggtgttcgtgatgtggcttgacctggtgacgtacctgcaccaccatgggcaccatcagcttcctctcccctggtaccgcggccaggagtggagctacctgcgcggcggcctcaccacggtggacagggactacggctggatcaacaacgtccaccacgacatcggcacccacgtcattcatcacctcttcccgcagatcccgcactaccatctcgtcgaagctaccaaggcagccaagccggtgctggggcgatactaccgggagccgcacaagtcaggcccgctgccacttcacctcctcgtcgtgctcctcaggagcctcagagtcgaccacttcgtcagcgaccacggggatgtcgtctactaccaaaccgaccatgacttgaacactagcagtgctcatggctgggccaaccaaaaccaccataagcaaaaataatggtttctcaaacacagagacgggctgatggttgctgttgttgttgctccaaggactcacacagtacaagaacttaaatatatatgatggtaagtagcatcatatataggcatgcgtatgacaaagccaaataattaaagagaagggagggatcctctagctgaagcaattaattaattacagtatcccactagatcgagtttgctaagcattactcctactatatacaatatgtactgttgcttgtattaattagctagatgttgtgttggagccttggatgatgaaactaaaggatgagccactaaaatttgt

SEQ ID NO: 5435 - protein, 384 aa, Zea mays subsp. mays
  peptide (1)..(384): Ceres Seq. ID no. 12407264
MSGRRRVDDDDDHDVVFDAGKPPPFRIGDVRAAVPEHCWRKSPWRSLWYVARDVAVVAALGAAAAGMDSWAVWPLYWAAQGTMFWALFVLGHDCGHGSFSDSATLNSVVGHLLHSFILVPYHGWRISHRTHHQNHGHIHRDESWHPITEKLYRQLEPRTKKLRFTVPFPLLAFPVYLLYRSPGKSGSHFLPSSDLFSPKEKSDVMVSTTCWCIMLASLLAMACAFGPLQVLKMYGIPYLVFVMWLDLVTYLHHHGHHQLPLPWYRGQEWSYLRGGLTTVDRDYGWINNVHHDIGTHVIHHLFPQIPHYHLVEATKAAKPVLGRYYREPHKSGPLPLHLLVVLLRSLRVDHFVSDHGDVVYYQTDHDLNTSSAHGWANQNHHKQK

SEQ ID NO: 5436 - protein, 318 aa, Zea mays subsp. mays
  peptide (1)..(318): Ceres Seq. ID no. 12407265
MDSWAVWPLYWAAQGTMFWALFVLGHDCGHGSFSDSATLNSVVGHLLHSFILVPYHGWRISHRTHHQNHGHIHRDESWHPITEKLYRQLEPRTKKLRFTVPFPLLAFPVYLLYRSPGKSGSHFLPSSDLFSPKEKSDVMVSTTCWCIMLASLLAMACAFGPLQVLKMYGIPYLVFVMWLDLVTYLHHHGHHQLPLPWYRGQEWSYLRGGLTTVDRDYGWINNVHHDIGTHVIHHLFPQIPHYHLVEATKAAKPVLGRYYREPHKSGPLPLHLLVVLLRSLRVDHFVSDHGDVVYYQTDHDLNTSSAHGWANQNHHKQK

SEQ ID NO: 5437 - protein, 302 aa, Zea mays subsp. mays
  peptide (1)..(302): Ceres Seq. ID no. 12407266
MFWALFVLGHDCGHGSFSDSATLNSVVGHLLHSFILVPYHGWRISHRTHHQNHGHIHRDESWHPITEKLYRQLEPRTKKLRFTVPFPLLAFPVYLLYRSPGKSGSHFLPSSDLFSPKEKSDVMVSTTCWCIMLASLLAMACAFGPLQVLKMYGIPYLVFVMWLDLVTYLHHHGHHQLPLPWYRGQEWSYLRGGLTTVDRDYGWINNVHHDIGTHVIHHLFPQIPHYHLVEATKAAKPVLGRYYREPHKSGPLPLHLLVVLLRSLRVDHFVSDHGDVVYYQTDHDLNTSSAHGWANQNHHKQK

SEQ ID NO: 5438 - DNA, 1907 bp, Zea mays subsp. mays
  misc_feature (1)..(1907): Ceres Seq. ID no. 13494394
  misc_feature (1)..(1907): Ortholog of  Ceres SEQ ID NO 14302474 as cited in SEQ ID NO 60589
ctaatcgacaaatggtcggtcgcaccgaacagcacgaccagaccagttgcccggctcaccaaatccaggcgtggccgtgcgaccatccctcccctcatggcgtcatcggcggcgcgatccctcgcgctcgtcgcgtctgcctcggcatcgctcggcgtcgggcagcggtcgtgggctcgcttggctgtctcttcctcttcggctgggtcggccctccccaagctccgcgggctccgctcgttcgccgcctccgcagggggcgccgtgatggggaagccaagccccggggtcgttgacgccgacgccgggatggacgccgtccagcggcggctcatgtttgaggacgagtgcattttagtggatgaacaagacaatgtcatcggccacgagtccaagtataactgccatctcatggagaagatagaagctggaaatgccctgcacagagctttcagtgttttccttttcaactccaaatatgagttgctactgcagcaaaggtctgcaacaaaagtgacatttccacttgtctggacaaacacctgctgtagccatcctctctaccgcgagtcagagttgattgaggaaaattgtgcaggggtgagaaatgcagcccagcgcaaactatttgatgagctgggaatagtggctgacgaattacctgtcgaccagttcattccgcttgggaggatgctttacaaggctccttcagatggaaaatggggcgaacacgagttggattacctcttgttcatggttcgtgacgtgaagctcgacccgaatcctgaagaggtggccgatgtcaagtacatgaaccggcatcagctgaaggagctgctcaggaaagccgatgccggggaagatggcgttaagctctccccttggttcaggctggtggtggacaactttctcatgggctggtgggatcatgtcgagcaagggactctgcagggggcagcagacatgaaaaccatccataaattgtaaatcttctagatcgcttaagcacgagtcttgccctgttgaggaataagcgcttgtcctgctgtttggtgctggaggaataatcgataaaattataacagagtgatcttaattctggaacgtaactatgcaaaaaaaaaaaaaaaaaacggcacgagaagcttttttttttttttttttcttttttttttttttttttttttttttttttttttttttttagaaccgagggctttccattgataatagcagtgaaaatattacaccaaatgggctagaaactggaacacctcgaaacgaagatacagaacaaactacagtagaccggccaactagacacacaaccgaccacggccgtcacatcaaagcatcagaaggggaggtggcctagccgccgaagccgtagagcgtgcggccctggcgcttgagcgcgtagacgacatccatggcggtgacggtcttgcggcgggcgtgctcggtgtaggtgacggcgtcgcggatgacgttctcgaggaagatcttgagcacgccgcgggtctcctcgtagatgagcccagaaatgcgcttgacgccgcccctcctggccagcctacggatcgccggcttcgtgatgccctggatgttgtcgcgcagcaccttgcggtggcgcttggcgccgcccttgcccagccccttgccgcccttgccgcgccccgacatcgccgaaaccgagaggtacgcggacggaggaggagaatcgtgccgttgtgcggttgaacttggattccgttgtccgaaatttctaatccgaaagatggatttcattgtcttcttcttcttagcattatgtcactatctcacgtcgtcctgtctcaatacagtctaaggttcatgtgatgttatccccatttgtccacgcacaagtgaatgcagtcactatttcg

SEQ ID NO: 5439 - protein, 328 aa, Zea mays subsp. mays
  peptide (1)..(328): Ceres Seq. ID no. 13494395
LIDKWSVAPNSTTRPVARLTKSRRGRATIPPLMASSAARSLALVASASASLGVGQRSWARLAVSSSSAGSALPKLRGLRSFAASAGGAVMGKPSPGVVDADAGMDAVQRRLMFEDECILVDEQDNVIGHESKYNCHLMEKIEAGNALHRAFSVFLFNSKYELLLQQRSATKVTFPLVWTNTCCSHPLYRESELIEENCAGVRNAAQRKLFDELGIVADELPVDQFIPLGRMLYKAPSDGKWGEHELDYLLFMVRDVKLDPNPEEVADVKYMNRHQLKELLRKADAGEDGVKLSPWFRLVVDNFLMGWWDHVEQGTLQGAADMKTIHKL

SEQ ID NO: 5440 - protein, 296 aa, Zea mays subsp. mays
  peptide (1)..(296): Ceres Seq. ID no. 13494396
MASSAARSLALVASASASLGVGQRSWARLAVSSSSAGSALPKLRGLRSFAASAGGAVMGKPSPGVVDADAGMDAVQRRLMFEDECILVDEQDNVIGHESKYNCHLMEKIEAGNALHRAFSVFLFNSKYELLLQQRSATKVTFPLVWTNTCCSHPLYRESELIEENCAGVRNAAQRKLFDELGIVADELPVDQFIPLGRMLYKAPSDGKWGEHELDYLLFMVRDVKLDPNPEEVADVKYMNRHQLKELLRKADAGEDGVKLSPWFRLVVDNFLMGWWDHVEQGTLQGAADMKTIHKL

SEQ ID NO: 5441 - protein, 239 aa, Zea mays subsp. mays
  peptide (1)..(239): Ceres Seq. ID no. 13494397
MGKPSPGVVDADAGMDAVQRRLMFEDECILVDEQDNVIGHESKYNCHLMEKIEAGNALHRAFSVFLFNSKYELLLQQRSATKVTFPLVWTNTCCSHPLYRESELIEENCAGVRNAAQRKLFDELGIVADELPVDQFIPLGRMLYKAPSDGKWGEHELDYLLFMVRDVKLDPNPEEVADVKYMNRHQLKELLRKADAGEDGVKLSPWFRLVVDNFLMGWWDHVEQGTLQGAADMKTIHKL

SEQ ID NO: 5442 - DNA, 2114 bp, Zea mays subsp. mays
  misc_feature (1)..(2114): Ceres Seq. ID no. 12376562
  misc_feature (1)..(2114): Ortholog of  Ceres SEQ ID NO 15174947 as cited in SEQ ID NO 236
  misc_feature (1)..(2114): Ortholog of  Ceres SEQ ID NO 13598312 as cited in SEQ ID NO 68448
acccccacttaaccaagaaaacggaatcaaagaaaacctgtccctgaaacgacgacgcaacatcgttacgtctacaagcctgtgcctgtcccatcgatcgatcaaccatggagattgcattggcagccaagaagaagaaccgtgcccgtcgccacctcgccgttcttctcctgctcctcgcctgcgcctgcgccggcattgcgcccgcgagcggcgccggcgggaggtgggacctccagcagcgcagcatcggggtgtcggcgatgcacatgcagctcctgcacaacgaccgcgtcatcatcttcgaccgcaccgacttcggccactccaacctctccctccccgacggacgctgccgcgtcaacccgcgggagcgcgtgctccctcagggggactgcaccgcgcactccgtcgagtacgacgtcgccgccaacgcgttccgcccgctcttcgtcttcaccgacacctggtgctcctcgggcaccgtcgcgcccgacggcacgctcgtccagaccggcggctggaacgacgggttccgcaacgcgcgcaccatgcccgcgtgcagcgacggcgacgagagctgcgactggtccgagacgcaggacgcgctctcggccaaccggtggtacgccaccaaccagatcctccccgacggccgcgcgttcatcatcggcggccggaggcagttcagctacgagttctacccaaaggcgggcccttcggatacgtccgtcatcccgatgccatttctggtgcagacgagggaccccgaggagaacaatctttatccgttcgtgcacctcaacatagacggcaaccttttcatcttctccaacaaccgcgccgtcctcttggactacagcagcaacaagatcgtgcggacgtaccccgtgctgggcgacggcgacccgcggaactaccccagctcgggctcctcggtgctgctcccgctgaaacccaaccccaccgaggccgaggtgctggtctgcggcggcgcgccggcgggctcctacaactccaccaagcagcagggcggcaccgccggcgctttcgtcccggcgctgacgacgtgtgggcggatcaagatcaccgacgccacgccggcgtgggtcatcgagacaatgccgtcgccgcgggtgatgggcgacatgatcctgctgcccaacggcgcggaggtggccatcatcaacggcgccgcggacggcaccgccgggtgggagtccgccaagaccccggcgtacgcgcccgtcgtctaccgcccggaccactcgccgggggaccggttcgaggagcagaacgcggcgggcgtcgcgcggctgtaccactcctcggcggtgctcctccgcgacggccgcctgctggtgggcggcagcaacccgcacacctactacaacttcagcaacgtgcagttccccaccgacctcagcctggaggccttctcgccggagtacctcgacgcgtccaacgacatgctccggccgaggatcctcgacccgtcccccaccggcgcgccggcgaccgtgggctacggggcgacgatggcgatccggttcctggtcccggcattggcgcggagaaggcgtggcggccgcgccggcggcctcggtgacgtgtcggtgacgatggtggcgccgtccttcacgacgcactcgttcgcgatgaaccagcggctgctgttccttgacgtgaccaagaacgtggcggtgcgcggccgagccggcgcgttcagcgcgtcggtgacgatgccggcgacagcggtgctggcgccaccggggtactacatgctgttcgtggtgaacgggcacatccccagcgaggggatctgggtcaaaatacaggcacagtgagagcgtgcgacagggaagggttatacatttcattcattttgtttcgttattgccattgatactcccctcttcttagttcttgttactactctacaggtgtacgtaaaaagacaaagacccttgtataaaagaggtgtaaatccatggtagcgttgacagtcactgactgtgactggacactgtgttgctgtctctcgttgacgtgagtcgtgagatgagattggaaagaaaaaaaaaaaaaaaaaaaaaaaaaaaaaaaaacaaaaa

SEQ ID NO: 5443 - protein, 579 aa, Zea mays subsp. mays
  peptide (1)..(579): Ceres Seq. ID no. 12376563
MEIALAAKKKNRARRHLAVLLLLLACACAGIAPASGAGGRWDLQQRSIGVSAMHMQLLHNDRVIIFDRTDFGHSNLSLPDGRCRVNPRERVLPQGDCTAHSVEYDVAANAFRPLFVFTDTWCSSGTVAPDGTLVQTGGWNDGFRNARTMPACSDGDESCDWSETQDALSANRWYATNQILPDGRAFIIGGRRQFSYEFYPKAGPSDTSVIPMPFLVQTRDPEENNLYPFVHLNIDGNLFIFSNNRAVLLDYSSNKIVRTYPVLGDGDPRNYPSSGSSVLLPLKPNPTEAEVLVCGGAPAGSYNSTKQQGGTAGAFVPALTTCGRIKITDATPAWVIETMPSPRVMGDMILLPNGAEVAIINGAADGTAGWESAKTPAYAPVVYRPDHSPGDRFEEQNAAGVARLYHSSAVLLRDGRLLVGGSNPHTYYNFSNVQFPTDLSLEAFSPEYLDASNDMLRPRILDPSPTGAPATVGYGATMAIRFLVPALARRRRGGRAGGLGDVSVTMVAPSFTTHSFAMNQRLLFLDVTKNVAVRGRAGAFSASVTMPATAVLAPPGYYMLFVVNGHIPSEGIWVKIQAQ

SEQ ID NO: 5444 - protein, 535 aa, Zea mays subsp. mays
  peptide (1)..(535): Ceres Seq. ID no. 12376564
PPLNQENGIKENLSLKRRRNIVTSTSLCLSHRSINHGDCIGSQEEEPCPSPPRRSSPAPRLRLRRHCARERRRREVGPPAAQHRGVGDAHAAPAQRPRHHLRPHRLRPLQPLPPRRTLPRQPAGARAPSGGLHRALRRVRRRRQRVPPALRLHRHLVLLGHRRARRHARPDRRLERRVPQRAHHARVQRRRRELRLVRDAGRALGQPVVRHQPDPPRRPRVHHRRPEAVQLRVLPKGGPFGYVRHPDAISGADEGPRGEQSLSVRAPQHRRQPFHLLQQPRRPLGLQQQQDRADVPRAGRRRPAELPQLGLLGAAPAETQPHRGRGAGLRRRAGGLLQLHQAAGRHRRRFRPGADDVWADQDHRRHAGVGHRDNAVAAGDGRHDPAAQRRGGGHHQRRRGRHRRVGVRQDPGVRARRLPPGPLAGGPVRGAERGGRRAAVPLLGGAPPRRPPAGGRQQPAHLLQLQQRAVPHRPQPGGLLAGVPRRVQRHAPAEDPRPVPHRRAGDRGLRGDDGDPVPGPGIGAEKAWRPRRRPR

SEQ ID NO: 5445 - protein, 527 aa, Zea mays subsp. mays
  peptide (1)..(527): Ceres Seq. ID no. 12376565
MHMQLLHNDRVIIFDRTDFGHSNLSLPDGRCRVNPRERVLPQGDCTAHSVEYDVAANAFRPLFVFTDTWCSSGTVAPDGTLVQTGGWNDGFRNARTMPACSDGDESCDWSETQDALSANRWYATNQILPDGRAFIIGGRRQFSYEFYPKAGPSDTSVIPMPFLVQTRDPEENNLYPFVHLNIDGNLFIFSNNRAVLLDYSSNKIVRTYPVLGDGDPRNYPSSGSSVLLPLKPNPTEAEVLVCGGAPAGSYNSTKQQGGTAGAFVPALTTCGRIKITDATPAWVIETMPSPRVMGDMILLPNGAEVAIINGAADGTAGWESAKTPAYAPVVYRPDHSPGDRFEEQNAAGVARLYHSSAVLLRDGRLLVGGSNPHTYYNFSNVQFPTDLSLEAFSPEYLDASNDMLRPRILDPSPTGAPATVGYGATMAIRFLVPALARRRRGGRAGGLGDVSVTMVAPSFTTHSFAMNQRLLFLDVTKNVAVRGRAGAFSASVTMPATAVLAPPGYYMLFVVNGHIPSEGIWVKIQAQ

SEQ ID NO: 5446 - DNA, 1268 bp, Zea mays subsp. mays
  misc_feature (1)..(1268): Ceres Seq. ID no. 12409505
  misc_feature (1)..(1268): Ortholog of  Ceres SEQ ID NO 13597613 as cited in SEQ ID NO 65334
  misc_feature (1)..(1268): Ortholog of  Ceres SEQ ID NO 15178832 as cited in SEQ ID NO 0
ctcttgctcggtcgcctttcccggtctttggtgtggataaaccggctttcttgctgttctcgatccttcttcaattcgctgtagtttttccttttgtcgcttgctcttgttctctttccaagaccgaggaagacgagtcagatttggtgattgtgtagagcgtacaagtgattgttcttggagaagcataggcctctcttggctgctcttgtcttcttgagcaaggaggcggaggaaaggaaagacatggaagaggaatccgtcgcagcttcaaggtactactgccacatgtgctcgctgatcataaggcccgaactgggcatcgaggaggtgaagtgcccccactgccacaccggcttcgtggaggagatggcgggcgaccggcgaggcagcgacgacgcagccatcagaggccgtcctcccggcggcgaggcgagctctaacgcctcggacgcggcgctggagcgcgaggtttcgctctgggcgcctgtgctcatggacttcatcgccgcctcgtccggccgccacggcctcgacggccacggaggggacctcgccgctttggcgcgaaggcagtaccgcaacatcgccctcctgcagctgctcaacgcgctccaggaaggcgacaccgatgccgggcgcgagcgggtcgtgctcatgagccccgcggacgcgcgcgccatgcttatgggacaagagcgaggggacggcgccgccgccctgggccccggcggtctgacgctcggggacctgttcctcggcccggggctggacttgctgctggagtacctggccgagaccgacccaaaccggcagggcacgccgccggccaggaaggaggccgtggccgcgttgccgacggtccgggtgcgcgaggacttcacctgccccgtgtgcctggacgaggtcgcgggcggcggcgacgcgcgcgagatgccgtgcaagcaccggttccacgaccagtgcatcctgccctggctggagatgcacagctcctgccccgtgtgcaggcaccagctgcccacggaggagccggcggaggcaattggcagcgacagaggcgccggtgttgagtccagtggcaacgcgcgcggcggcgggaggaggcattggttctcgtggcccttcggagggttgttctcgcaaagatccagcgggaactcctcgtcgtcctgatgatgcatgaacacgataataatatgcaagggaacacctcatcgtccctgatgatgctaatgaacaggataataatatgcgtcgatgtagcc

SEQ ID NO: 5447 - protein, 309 aa, Zea mays subsp. mays
  peptide (1)..(309): Ceres Seq. ID no. 12409506
MEEESVAASRYYCHMCSLIIRPELGIEEVKCPHCHTGFVEEMAGDRRGSDDAAIRGRPPGGEASSNASDAALEREVSLWAPVLMDFIAASSGRHGLDGHGGDLAALARRQYRNIALLQLLNALQEGDTDAGRERVVLMSPADARAMLMGQERGDGAAALGPGGLTLGDLFLGPGLDLLLEYLAETDPNRQGTPPARKEAVAALPTVRVREDFTCPVCLDEVAGGGDAREMPCKHRFHDQCILPWLEMHSSCPVCRHQLPTEEPAEAIGSDRGAGVESSGNARGGGRRHWFSWPFGGLFSQRSSGNSSSS

SEQ ID NO: 5448 - protein, 295 aa, Zea mays subsp. mays
  peptide (1)..(295): Ceres Seq. ID no. 12409507
MCSLIIRPELGIEEVKCPHCHTGFVEEMAGDRRGSDDAAIRGRPPGGEASSNASDAALEREVSLWAPVLMDFIAASSGRHGLDGHGGDLAALARRQYRNIALLQLLNALQEGDTDAGRERVVLMSPADARAMLMGQERGDGAAALGPGGLTLGDLFLGPGLDLLLEYLAETDPNRQGTPPARKEAVAALPTVRVREDFTCPVCLDEVAGGGDAREMPCKHRFHDQCILPWLEMHSSCPVCRHQLPTEEPAEAIGSDRGAGVESSGNARGGGRRHWFSWPFGGLFSQRSSGNSSSS

SEQ ID NO: 5449 - protein, 268 aa, Zea mays subsp. mays
  peptide (1)..(268): Ceres Seq. ID no. 12409508
MAGDRRGSDDAAIRGRPPGGEASSNASDAALEREVSLWAPVLMDFIAASSGRHGLDGHGGDLAALARRQYRNIALLQLLNALQEGDTDAGRERVVLMSPADARAMLMGQERGDGAAALGPGGLTLGDLFLGPGLDLLLEYLAETDPNRQGTPPARKEAVAALPTVRVREDFTCPVCLDEVAGGGDAREMPCKHRFHDQCILPWLEMHSSCPVCRHQLPTEEPAEAIGSDRGAGVESSGNARGGGRRHWFSWPFGGLFSQRSSGNSSSS

SEQ ID NO: 5450 - DNA, 1468 bp, Zea mays subsp. mays
  misc_feature (1)..(1468): Ceres Seq. ID no. 12353780
  misc_feature (1)..(1468): Ortholog of  Ceres SEQ ID NO 14313264 as cited in SEQ ID NO 67300
  misc_feature (1)..(1468): Ortholog of  Ceres SEQ ID NO 14302824 as cited in SEQ ID NO 67794
gcatctccctttaccattgtctcccccctcgtccgacctcctcgccgccgcagacgaccgccgccgccgctgccgctgccgctgccgctgcgaaccctttgtgaatcttcgttgtccgggctgtgtggggcaggcatggcgctccggaggctgctgcaggggagcgtcctgccgcggataatcggcagggatttggcaccggccgtggcgccgttttcaacggagtccggggagaccattcgtgccacgctctttcccggcgatggcatcgggccagagatcgctgagtctgtcaagcaggtattcaatgttgcaggggtaccaattgaatgggaagaacactatgtcggtacagaagttgatcccagaacagagagttttttgacttgggaaagcctggagtcagtgcgtagaaacaaagttggcttgaaaggacctatggctacacctattggaaagggccatcgatctttgaatcttacattaaggaaagaacttgggctctatgccaatgtcagaccttgcaacagcctcccaggttacaagaccagatacgatgatgttaaccttgtaacaattcgtgaaaatactgaaggagaatatagtggtcttgagcatcaggttgtgagaggtgttgtggaaagtttgaaaattattacacgccaagcaagtttgagagtggcagagtatgctttccattatgccaaggccaatggccgggaaagagtctctgcgatccacaaagccaatattatgaggaagacagatggtcttttcctcaagtgttgccgtgaagtgtctgaaaagtaccctgaaattcaatacgaggaggtcatcattgacaattgctgtatgacgcttgtgaagaatcctggtctttttgacgtattagtgatgccaaatctctatggtgacattattagtgatctatgtgctggtttgatcgggggcttgggcctaacacccagttgcaatattggtgaaggtggcatttgtctggcagaagctgttcatggttctgctcctgatattgctggcaagaacctcgcgaacccgactgctcttatgctgagtgctgtcatgttgttgcgccacatgcaattcaacgacaaagcagaccggatccacaacgccatcctccagaccatcgccgaggggaagtacaggactgctgatcttggtggaaaggcatcgacatcagagtttacaaacgcagtctgtgatcacatctgagaaacggatgtgattcttccttctgattgttttgtcatcctaatatttttttgtcacatatgagaggagctttagctttaagaggttaactggcagcacctcgaacttctttggggtgtttaacacggtttgagaccgtcaaataattttgtcacatttcttgcggttcagaaattctttcaacattggaatggagccaagaattgtctgtaataatcaacatcagcattataac

SEQ ID NO: 5451 - protein, 410 aa, Zea mays subsp. mays
  peptide (1)..(410): Ceres Seq. ID no. 12353781
ASPFTIVSPLVRPPRRRRRPPPPLPLPLPLRTLCESSLSGLCGAGMALRRLLQGSVLPRIIGRDLAPAVAPFSTESGETIRATLFPGDGIGPEIAESVKQVFNVAGVPIEWEEHYVGTEVDPRTESFLTWESLESVRRNKVGLKGPMATPIGKGHRSLNLTLRKELGLYANVRPCNSLPGYKTRYDDVNLVTIRENTEGEYSGLEHQVVRGVVESLKIITRQASLRVAEYAFHYAKANGRERVSAIHKANIMRKTDGLFLKCCREVSEKYPEIQYEEVIIDNCCMTLVKNPGLFDVLVMPNLYGDIISDLCAGLIGGLGLTPSCNIGEGGICLAEAVHGSAPDIAGKNLANPTALMLSAVMLLRHMQFNDKADRIHNAILQTIAEGKYRTADLGGKASTSEFTNAVCDHI

SEQ ID NO: 5452 - protein, 365 aa, Zea mays subsp. mays
  peptide (1)..(365): Ceres Seq. ID no. 12353782
MALRRLLQGSVLPRIIGRDLAPAVAPFSTESGETIRATLFPGDGIGPEIAESVKQVFNVAGVPIEWEEHYVGTEVDPRTESFLTWESLESVRRNKVGLKGPMATPIGKGHRSLNLTLRKELGLYANVRPCNSLPGYKTRYDDVNLVTIRENTEGEYSGLEHQVVRGVVESLKIITRQASLRVAEYAFHYAKANGRERVSAIHKANIMRKTDGLFLKCCREVSEKYPEIQYEEVIIDNCCMTLVKNPGLFDVLVMPNLYGDIISDLCAGLIGGLGLTPSCNIGEGGICLAEAVHGSAPDIAGKNLANPTALMLSAVMLLRHMQFNDKADRIHNAILQTIAEGKYRTADLGGKASTSEFTNAVCDHI

SEQ ID NO: 5453 - protein, 264 aa, Zea mays subsp. mays
  peptide (1)..(264): Ceres Seq. ID no. 12353783
MATPIGKGHRSLNLTLRKELGLYANVRPCNSLPGYKTRYDDVNLVTIRENTEGEYSGLEHQVVRGVVESLKIITRQASLRVAEYAFHYAKANGRERVSAIHKANIMRKTDGLFLKCCREVSEKYPEIQYEEVIIDNCCMTLVKNPGLFDVLVMPNLYGDIISDLCAGLIGGLGLTPSCNIGEGGICLAEAVHGSAPDIAGKNLANPTALMLSAVMLLRHMQFNDKADRIHNAILQTIAEGKYRTADLGGKASTSEFTNAVCDHI

SEQ ID NO: 5454 - DNA, 1962 bp, Zea mays subsp. mays
  misc_feature (1)..(1962): Ceres Seq. ID no. 12407748
  misc_feature (1)..(1962): Ortholog of  Ceres SEQ ID NO 14313228 as cited in SEQ ID NO 67057
gtacacacgagcgccccgcggaaagggtagcaaacggcccggacagtgagccgcgcacctttcacacttgacttgatgggttgctggcgctcgtcgctgcgctcagggccccacgcggcggagaagccgccccgccaccgccaccgcccgccaccgccaccgacgaacggccccacctcctccctgaacgcgcagcaggccgcgcccccggcccgcgcctccggggaagtaccggcgctcgccgagttctcgctggcggagctccgcgcggccacggccgggttcgcgccggggaacatcgtctccgagagcggtgagaaggcgcccaacctcgtctacagaggccagctcaggggccccggcggtgccccgccgcgcgcagttgccgtgaagaagttcgccaagctcgcgtggcccgaccccaagcagttcgcggaggaggcgaagggggtcggaggcctgcggcaccggagcatggcgaaccttatcggttattgctgcgacggcgacgatcgcctgctcgtcgccgagttcatgcccaacgacaccctcgccaagcaccttttccactgggaaaaccagactattgagtgggctatgcgtctgagagttgcatactacatttcccaagcattggaatactgtagtaccaaggggtggcctttatatcatgacctaaatgcatacagggtcctctttgatgagaatggtgaccctcggctgtcatgctttggtctgatgaaaaacagcagggatggaaaaagctatagcacgaacctagcatatacacctccagaatatctgagaaatggcagggttactccagaaagtgtcattttcagttttggcactgtacttcttgaccttctcagtgggaaacgcataccgccttcacatgcgcttgatatcatgagaggcagaaacatccaagcagttatggattcacatttggaggggaactactcaattgaggtggctactacattggtgaatcttgcttctcagtgtctacaatatgagccaagagatcgtcctggcataaaaaagttggtttccattctggagcctttgcagaaaaaaatagaggtaccgtcctatgtgatgcttggatttgcaaagccagtggaagaaccacaggcacctcctactccacagcgccctctttctcccatgggagatgcttgttccagaatggaccttactgccatctatcagatcctattcacaacgcattaccgagatgatgaagggagcaatgagctgtcttttcaagaatggacacagcagatgagggatatgctggatgcaaggaaacgtggcgactctgccttcaaagacaaagattttaaggcagcaatcgattgctatactcagtttgtcgatgtggggataatggtgtcaccgactgtattcgccagacgaagcttgtgctaccttatgtgtgaccaacctgatgcggccctccgtgatgcaatgcaagcgcagatcgtctaccctgattggccaacagcattctacatgcaggcagttgcactatccaagctaaacatgcagagtgacgccgtggacatgctgaacgaggcatcacagctagaagagaagaggcaaaagagcacaagagttccttgaatggcattgtcagctcagagaagtggcacgtcttctatacatataacatagatcgcacactatgtagtacagtagtatattctccaaccttttccaccctgtaaaaagcgcatagtatattgcgtggtctagaattagaagtaagaagtgaactgcagagaagatgctctttgctccctgtactctggagccctgtgatggcacttgtgtgataggttcttcatttttttgggcccatgtatataacatctgttgcatgggagtttagagtataggttgccggttgttcaggagggccctgtcgccgaagataataaacatgttatgtttgtg

SEQ ID NO: 5455 - protein, 517 aa, Zea mays subsp. mays
  peptide (1)..(517): Ceres Seq. ID no. 12407749
MGCWRSSLRSGPHAAEKPPRHRHRPPPPPTNGPTSSLNAQQAAPPARASGEVPALAEFSLAELRAATAGFAPGNIVSESGEKAPNLVYRGQLRGPGGAPPRAVAVKKFAKLAWPDPKQFAEEAKGVGGLRHRSMANLIGYCCDGDDRLLVAEFMPNDTLAKHLFHWENQTIEWAMRLRVAYYISQALEYCSTKGWPLYHDLNAYRVLFDENGDPRLSCFGLMKNSRDGKSYSTNLAYTPPEYLRNGRVTPESVIFSFGTVLLDLLSGKRIPPSHALDIMRGRNIQAVMDSHLEGNYSIEVATTLVNLASQCLQYEPRDRPGIKKLVSILEPLQKKIEVPSYVMLGFAKPVEEPQAPPTPQRPLSPMGDACSRMDLTAIYQILFTTHYRDDEGSNELSFQEWTQQMRDMLDARKRGDSAFKDKDFKAAIDCYTQFVDVGIMVSPTVFARRSLCYLMCDQPDAALRDAMQAQIVYPDWPTAFYMQAVALSKLNMQSDAVDMLNEASQLEEKRQKSTRVP

SEQ ID NO: 5456 - protein, 384 aa, Zea mays subsp. mays
  peptide (1)..(384): Ceres Seq. ID no. 12407750
MANLIGYCCDGDDRLLVAEFMPNDTLAKHLFHWENQTIEWAMRLRVAYYISQALEYCSTKGWPLYHDLNAYRVLFDENGDPRLSCFGLMKNSRDGKSYSTNLAYTPPEYLRNGRVTPESVIFSFGTVLLDLLSGKRIPPSHALDIMRGRNIQAVMDSHLEGNYSIEVATTLVNLASQCLQYEPRDRPGIKKLVSILEPLQKKIEVPSYVMLGFAKPVEEPQAPPTPQRPLSPMGDACSRMDLTAIYQILFTTHYRDDEGSNELSFQEWTQQMRDMLDARKRGDSAFKDKDFKAAIDCYTQFVDVGIMVSPTVFARRSLCYLMCDQPDAALRDAMQAQIVYPDWPTAFYMQAVALSKLNMQSDAVDMLNEASQLEEKRQKSTRVP

SEQ ID NO: 5457 - protein, 364 aa, Zea mays subsp. mays
  peptide (1)..(364): Ceres Seq. ID no. 12407751
MPNDTLAKHLFHWENQTIEWAMRLRVAYYISQALEYCSTKGWPLYHDLNAYRVLFDENGDPRLSCFGLMKNSRDGKSYSTNLAYTPPEYLRNGRVTPESVIFSFGTVLLDLLSGKRIPPSHALDIMRGRNIQAVMDSHLEGNYSIEVATTLVNLASQCLQYEPRDRPGIKKLVSILEPLQKKIEVPSYVMLGFAKPVEEPQAPPTPQRPLSPMGDACSRMDLTAIYQILFTTHYRDDEGSNELSFQEWTQQMRDMLDARKRGDSAFKDKDFKAAIDCYTQFVDVGIMVSPTVFARRSLCYLMCDQPDAALRDAMQAQIVYPDWPTAFYMQAVALSKLNMQSDAVDMLNEASQLEEKRQKSTRVP

SEQ ID NO: 5458 - DNA, 1407 bp, Zea mays subsp. mays
  misc_feature (1)..(1407): Ceres Seq. ID no. 12358313
  misc_feature (1)..(1407): Ortholog of  Ceres SEQ ID NO 13639124 as cited in SEQ ID NO 56718
  misc_feature (1)..(1407): Ortholog of  Ceres SEQ ID NO 13596474 as cited in SEQ ID NO 62169
  misc_feature (1)..(1407): Ortholog of  Ceres SEQ ID NO 13596969 as cited in SEQ ID NO 63375
  misc_feature (1)..(1407): Ortholog of  Ceres SEQ ID NO 13597519 as cited in SEQ ID NO 64759
  misc_feature (1)..(1407): Ortholog of  Ceres SEQ ID NO 13656123 as cited in SEQ ID NO 65212
  misc_feature (1)..(1407): Ortholog of  Ceres SEQ ID NO 13595926 as cited in SEQ ID NO 67778
gatacaaaacacaaactctcggagacagggaagtagcgtagctagatccagagctcggcgccagagatacccgacatcctcgtcatgtctccggttgcaagcaagggagtagtgatggacggtgcggtggcggtggcggcagtggccgccgccgtgctgctgtgcctccatctgccggcggtggcgcgaggccagctgcaggtggggttctacaacacgagctgccccaacgccgagtccctggtccgccaggcggtggccagcgcgttcgccaacgactccggcatcgccgccggcctcatccgcctccatttccacgactgcttcgtcaggggctgcgatgcgtcggtgctgctgacctccgccaacaacacggcggagcgtgacgcgccgcccaacaacccgagcctccacgggttccaggtgatcgacgcggcgaaggcggcggtggagcagagctgcccgcagacggtgtcgtgcgcggacatcgtggccttcgcggcgcgcgacagcatcaacctcactggcaacctgccgtaccaggtgccctcgggccgccgggacggcaacgtctccctcgacacggaggccaacagcaacctgccggcgccaacgttcaacgcgtcccagctggtggccagcttcgcggccaagaacctcaccgacgaggagatggtcatcctctccggcgcccacaccgtcggccgctccttctgcacatcgtttctcgcgcgcatctacaacggatccaccccgatcgttgactctggcctgagcgccgggtacgccacactgctgcgcgcgctgtgcccgtccaacgccaactcgtccacgcccacgaccacggtgatcgaccccagcacgccggcggtgctggacaacaactactacaagctgctgccgctcaacctgggcctcttcttctccgacaaccagctgcgcgtcaactccacgctcaacgcctccgtcaacagcttcgccgccaacgagacgctctggaaggagaagttcgtcgccgccatgtcaagatgggaaacatccaggtgctcacggggacccagggccagatcaggctcaactgcagcatcgtcaacaacggctcgtcgtcggtggggatccagcagatgacagtgcccaactcctactctggcgccaccgcgtcccttgatgatgagatcgccacgagctgatctagatcggcgcggtgtgatgtgatgatagatatttgcattgtgtgtccatctttaggctattaattagtacgtttgctcccggtacgcgcgagagtgcgtagttcgtgtgtcattcatatgcgcgtacacgagatttccagtatcaccatgcatgtatcccgtgaatcatcatcagtaaataaaactggtgctctttgagagtctattattatcg

SEQ ID NO: 5459 - protein, 347 aa, Zea mays subsp. mays
  peptide (1)..(347): Ceres Seq. ID no. 12358314
MSPVASKGVVMDGAVAVAAVAAAVLLCLHLPAVARGQLQVGFYNTSCPNAESLVRQAVASAFANDSGIAAGLIRLHFHDCFVRGCDASVLLTSANNTAERDAPPNNPSLHGFQVIDAAKAAVEQSCPQTVSCADIVAFAARDSINLTGNLPYQVPSGRRDGNVSLDTEANSNLPAPTFNASQLVASFAAKNLTDEEMVILSGAHTVGRSFCTSFLARIYNGSTPIVDSGLSAGYATLLRALCPSNANSSTPTTTVIDPSTPAVLDNNYYKLLPLNLGLFFSDNQLRVNSTLNASVNSFAANETLWKEKFVAAMSRWETSRCSRGPRARSGSTAASSTTARRRWGSSR

SEQ ID NO: 5460 - protein, 337 aa, Zea mays subsp. mays
  peptide (1)..(337): Ceres Seq. ID no. 12358315
MDGAVAVAAVAAAVLLCLHLPAVARGQLQVGFYNTSCPNAESLVRQAVASAFANDSGIAAGLIRLHFHDCFVRGCDASVLLTSANNTAERDAPPNNPSLHGFQVIDAAKAAVEQSCPQTVSCADIVAFAARDSINLTGNLPYQVPSGRRDGNVSLDTEANSNLPAPTFNASQLVASFAAKNLTDEEMVILSGAHTVGRSFCTSFLARIYNGSTPIVDSGLSAGYATLLRALCPSNANSSTPTTTVIDPSTPAVLDNNYYKLLPLNLGLFFSDNQLRVNSTLNASVNSFAANETLWKEKFVAAMSRWETSRCSRGPRARSGSTAASSTTARRRWGSSR

SEQ ID NO: 5461 - DNA, 1547 bp, Zea mays subsp. mays
  misc_feature (1)..(1547): Ceres Seq. ID no. 12409501
  misc_feature (1)..(1547): Ortholog of  Ceres SEQ ID NO 14314280 as cited in SEQ ID NO 57429
  misc_feature (1)..(1547): Ortholog of  Ceres SEQ ID NO 13595870 as cited in SEQ ID NO 62101
  misc_feature (1)..(1547): Ortholog of  Ceres SEQ ID NO 13590241 as cited in SEQ ID NO 63878
  misc_feature (1)..(1547): Ortholog of  Ceres SEQ ID NO 13657939 as cited in SEQ ID NO 66349
gcacaagtcgagggccaccgctccgcatccgcatcttcttccagagcaagtcgagcgcggcggccacaaaacccagtcccatacgcacccgtccgttccgcgcgatcagccgagcgatgtcgtcgtcggcgcccgcaccggccgccatggccgtggacgacgcggaggacgaccagctcgcctccatgtccacggaggagatcatcagggcctcccgtctcctcgacaacgagatccgcgtccacaaggatgagctgcagcgggtcgaacctggagctggagtctatcaaggagaagaccaaggagaaccaggagaagattaagctcaacaagcagctgccgtacctcgtcggcaacatcgtcgagattttggaaatgaaccctgaggatgaggctgaagaagatggtgctaacatcgatctggactcacaaaggaaaggaaaatgtgttgttctgaagacatccaccagacaaaccatattccttcctgtaattgggttagttgaccccgataagctaaagcctggcgatttagttggagttaacaaagacagctacttgatactagatacattgccttcagagtatgactcacgggttaaggcaatggaagtagatgagaaacctactgaggattacaatgacattggcggacttgagaaacagattcaagagcttgtggaagcaatagtgttaccaatgacacacaaggaccgatttcaaaaattgggcattcgtccccccaaaggggttcttttgtatggaccccctgggaccgggaaaacactcatggctcgtgcatgcgctgcacagactaatgcaacatttctgaaattggctggtccacaacttgtccagatgttcattggtgatggagctaagcttgttagagatgcttttcagcttgctaaggagaaagccccgtgcatcatctttattgatgaaattgatgccattggaacaaagcgttttgacagtgaagttagtggcgatagagaagtgcaaaggacaatgttggaattgctgaatcagcttgatggatttagcagcgatgagaggataaaggtgatagctgcaacaaatcgtgctgatattcttgatcctgctctgatgagatctggtcgtctggaccgtaagattgagttccctcatccatcagaggaagcaagagctagaatcctgcagatccactcgaggaaaatgaatgtgaatccagatgtcaactttgaagagttggcgcgttcaaccgatgatttcaatggcgctcagctaaaggctgtttgcgtagaggctggcatgctcgctctacgccgagatgctacagaggttacccacgaggatttcaacgaggggatcatccaagtgcaggcaaagaagaagtccagcttgaattactacgcgtaagggggggaacgcccggtacttggtgatcattcagttgtttgtgacactgccattgtctgggcaggctaacttactatttgtactataagcaagctgttgcttttgtgtcttactccgtatgagagtatcatttatgaaatatt

SEQ ID NO: 5462 - protein, 467 aa, Zea mays subsp. mays
  peptide (1)..(467): Ceres Seq. ID no. 12409502
AQVEGHRSASASSSRASRARRPQNPVPYAPVRSARSAERCRRRRPHRPPWPWTTRRTTSSPPCPRRRSSGPPVSSTTRSASTRMSCSGSNLELESIKEKTKENQEKIKLNKQLPYLVGNIVEILEMNPEDEAEEDGANIDLDSQRKGKCVVLKTSTRQTIFLPVIGLVDPDKLKPGDLVGVNKDSYLILDTLPSEYDSRVKAMEVDEKPTEDYNDIGGLEKQIQELVEAIVLPMTHKDRFQKLGIRPPKGVLLYGPPGTGKTLMARACAAQTNATFLKLAGPQLVQMFIGDGAKLVRDAFQLAKEKAPCIIFIDEIDAIGTKRFDSEVSGDREVQRTMLELLNQLDGFSSDERIKVIAATNRADILDPALMRSGRLDRKIEFPHPSEEARARILQIHSRKMNVNPDVNFEELARSTDDFNGAQLKAVCVEAGMLALRRDATEVTHEDFNEGIIQVQAKKKSSLNYYA

SEQ ID NO: 5463 - protein, 384 aa, Zea mays subsp. mays
  peptide (1)..(384): Ceres Seq. ID no. 12409503
MSCSGSNLELESIKEKTKENQEKIKLNKQLPYLVGNIVEILEMNPEDEAEEDGANIDLDSQRKGKCVVLKTSTRQTIFLPVIGLVDPDKLKPGDLVGVNKDSYLILDTLPSEYDSRVKAMEVDEKPTEDYNDIGGLEKQIQELVEAIVLPMTHKDRFQKLGIRPPKGVLLYGPPGTGKTLMARACAAQTNATFLKLAGPQLVQMFIGDGAKLVRDAFQLAKEKAPCIIFIDEIDAIGTKRFDSEVSGDREVQRTMLELLNQLDGFSSDERIKVIAATNRADILDPALMRSGRLDRKIEFPHPSEEARARILQIHSRKMNVNPDVNFEELARSTDDFNGAQLKAVCVEAGMLALRRDATEVTHEDFNEGIIQVQAKKKSSLNYYA

SEQ ID NO: 5464 - protein, 342 aa, Zea mays subsp. mays
  peptide (1)..(342): Ceres Seq. ID no. 12409504
MNPEDEAEEDGANIDLDSQRKGKCVVLKTSTRQTIFLPVIGLVDPDKLKPGDLVGVNKDSYLILDTLPSEYDSRVKAMEVDEKPTEDYNDIGGLEKQIQELVEAIVLPMTHKDRFQKLGIRPPKGVLLYGPPGTGKTLMARACAAQTNATFLKLAGPQLVQMFIGDGAKLVRDAFQLAKEKAPCIIFIDEIDAIGTKRFDSEVSGDREVQRTMLELLNQLDGFSSDERIKVIAATNRADILDPALMRSGRLDRKIEFPHPSEEARARILQIHSRKMNVNPDVNFEELARSTDDFNGAQLKAVCVEAGMLALRRDATEVTHEDFNEGIIQVQAKKKSSLNYYA

SEQ ID NO: 5465 - DNA, 1140 bp, Zea mays subsp. mays
  misc_feature (1)..(1140): Ceres Seq. ID no. 12353784
  misc_feature (1)..(1140): Ortholog of  Ceres SEQ ID NO 15178593 as cited in SEQ ID NO 441
  misc_feature (1)..(1140): Ortholog of  Ceres SEQ ID NO 13594910 as cited in SEQ ID NO 51804
  misc_feature (1)..(1140): Ortholog of  Ceres SEQ ID NO 13589061 as cited in SEQ ID NO 65371
atcctgtccccctcccacctttcccttccccgccgctctcgcttcgcttgcccgcacaccgagatttcctgcccgctcgttccgctgctctcatcgactcctcctgcgtgcctgccgaccggtccgaggcacgccgcggcggaggctctgccggccgggtcgtcggattcggccttaggttggttggttgggttgggtcgcatgtccacggcggtggcgcggccggcgcacggcggattccggcggtcggggagcgggaagccggatccggacgaggcggacaggatgacgcggagcgccaacgggtacttggtccaagaagaggaggaggaagagcatggcgaagaggcggcggcgaggagagaggatgaggacgaggaagaggaagaggaggaggcggaggcggtgtcggaggcctcgtcgatcggggcggcgtcgtccgacagctcctcctccatcggggagaactccgcgtccgacaaggaggaggaggaggaggaggttgagagtaaggcgcaggggcttggcatgatggggctggccacgctcgaatccttggatgatgccctgccctccaagcggggcctgtccagcttctacgcgggcaagtccaagtcgttcacgagcctggcggaggccgcggcggcggcggccgccagggagatcgccaagccggagaacccgttcaacaagcggcggcgcgtgctgcaggcgtggtcgcggcggcgggcgtcgtgcagcgcgctggccgccgcgtacctgccgccgctgctggccccggaccacgccgtggtggaggaggacgacgaggagggcgcggacgacgaggaggaggaggacgaggatgaggagcatggtggtggcggcggcgggctcaggggcacgaggaagccgcccacgttcccgtccccgcggctgagcgtgcacgtcgccgccgccggccagatggcgcggaacgggtcgtttcggtccccgaggtccttctccatgacggatctccacagcgccgccggctacgagtagccccggcgggcgggcggacaggattagagagtgctgatgtgttctaggtgcttttgttttactggtgatgtcgccattggtgctgccattaattactgctatatgatcatcattatg

SEQ ID NO: 5466 - protein, 340 aa, Zea mays subsp. mays
  peptide (1)..(340): Ceres Seq. ID no. 12353785
ILSPSHLSLPRRSRFACPHTEISCPLVPLLSSTPPACLPTGPRHAAAEALPAGSSDSALGWLVGLGRMSTAVARPAHGGFRRSGSGKPDPDEADRMTRSANGYLVQEEEEEEHGEEAAARREDEDEEEEEEEAEAVSEASSIGAASSDSSSSIGENSASDKEEEEEEVESKAQGLGMMGLATLESLDDALPSKRGLSSFYAGKSKSFTSLAEAAAAAAAREIAKPENPFNKRRRVLQAWSRRRASCSALAAAYLPPLLAPDHAVVEEDDEEGADDEEEEDEDEEHGGGGGGLRGTRKPPTFPSPRLSVHVAAAGQMARNGSFRSPRSFSMTDLHSAAGYE

SEQ ID NO: 5467 - protein, 273 aa, Zea mays subsp. mays
  peptide (1)..(273): Ceres Seq. ID no. 12353786
MSTAVARPAHGGFRRSGSGKPDPDEADRMTRSANGYLVQEEEEEEHGEEAAARREDEDEEEEEEEAEAVSEASSIGAASSDSSSSIGENSASDKEEEEEEVESKAQGLGMMGLATLESLDDALPSKRGLSSFYAGKSKSFTSLAEAAAAAAAREIAKPENPFNKRRRVLQAWSRRRASCSALAAAYLPPLLAPDHAVVEEDDEEGADDEEEEDEDEEHGGGGGGLRGTRKPPTFPSPRLSVHVAAAGQMARNGSFRSPRSFSMTDLHSAAGYE

SEQ ID NO: 5468 - protein, 245 aa, Zea mays subsp. mays
  peptide (1)..(245): Ceres Seq. ID no. 12353787
MTRSANGYLVQEEEEEEHGEEAAARREDEDEEEEEEEAEAVSEASSIGAASSDSSSSIGENSASDKEEEEEEVESKAQGLGMMGLATLESLDDALPSKRGLSSFYAGKSKSFTSLAEAAAAAAAREIAKPENPFNKRRRVLQAWSRRRASCSALAAAYLPPLLAPDHAVVEEDDEEGADDEEEEDEDEEHGGGGGGLRGTRKPPTFPSPRLSVHVAAAGQMARNGSFRSPRSFSMTDLHSAAGYE

SEQ ID NO: 5469 - DNA, 1522 bp, Zea mays subsp. mays; identical to SEQ ID NO: 1805
  misc_feature (1)..(1522): Ceres Seq. ID no. 12358133
  misc_feature (1)..(1522): Ortholog of  Ceres SEQ ID NO 15177104 as cited in SEQ ID NO 56048

SEQ ID NO: 5470 - protein, 283 aa, Zea mays subsp. mays; identical to SEQ ID NO: 1806
  peptide (1)..(283): Ceres Seq. ID no. 12358134

SEQ ID NO: 5471 - protein, 172 aa, Zea mays subsp. mays; identical to SEQ ID NO: 1807
  peptide (1)..(172): Ceres Seq. ID no. 12358135

SEQ ID NO: 5472 - protein, 153 aa, Zea mays subsp. mays; identical to SEQ ID NO: 1808
  peptide (1)..(153): Ceres Seq. ID no. 12358136

SEQ ID NO: 5473 - DNA, 1565 bp, Zea mays subsp. mays
  misc_feature (1)..(1565): Ceres Seq. ID no. 12407744
  misc_feature (1)..(1565): Ortholog of  Ceres SEQ ID NO 14314643 as cited in SEQ ID NO 56903
aacgctcgaactccacatcccccggtgttccccctccgctctccttcttaacccgtcccactgaactggatttcctctcgctattgtggtatactgtagcacgccagacgcaactagtcacggtcacggtcaagctcattgcgagcggagcgccctcctgtcgcttctgccgccgccgccaccgccgccgctcggctataaagtcgccagctctgttcaccgccgcttttcctctgcatccgtctgtggtgcggaattgaattccggtgggatttgggagccgagaggagaaggcggtaggcggggatggagacaccgggagggagcggggccccgtcgctggcgcggcagggctcggtgtactcgctaacgttcgacgagttccagaccgcgctcggcggcgccagcaaggacttcggctccatgaacatggacgagctgctgcgcaacatctggacggccgaggagtccaacgccatgaccgcggccgccccgaccacggcggccgcatccatggacgcgcatgggcagcatcagcagcaggccggggcgcccatccagcgccagggctccttcacgctgccgcgcacgctcagccagaagacggtcgacgaggtctggcgcgagatcgtgggcctcaccgacggggaggacgcgcaggcggttgcggctcccgctcccacgcccgcgcacgcgccgctgccggcgcaggcacagcggcagcagacgctggggtccatgactctggaggatttcctggtacgcgccggcgtggtttgtgaggacatggggcagcagaccctcgtgcagcagccgcacacgcagggttttttctcccaggggaatgcggtcgcgccgcagaccatgcagctggggaacggggtggtgaccggggtcgtcgggcaggggctcggaggagggatgacggtggcggtgccgacgacgccggtcgtgttcaacgggatggggaaggtggaggcgggggatctttcgtcgctgtcgccggtgccgtatcccttcgacactgcactgagggtgaggaagggaccgaccgtcgagaaggtggtggagaggaggcagaggcgcatgatcaagaacagggagtcggcagccaggtcgcgcgcgaggaagcaggcatacataatggagctagaagctgaggtggcaaaactcaaggacctgaatgacgagttgcagaaaaagcaggttgaaatgctgaagaagcaaaaggatgaggtcctggagcgaatcaacaaccaacatggaccgaaggcaaagaaactttgtcttcaccgcaccctgactggcccatggtagcctgctgaagcttgcacagacctcaccgaagtcgagatcgtcggcttagatgtgctcgtgtgtataccagatgatctcaagttgttctgtgacgtgggttgttgtctgtgcctgacagttcaccgtttaggttcagctgcgcaatcctcatataaacaatgaggcgtactaccttatctgttcatttaactccctcctattgccatggtgagatcatgcatgtaacttaggccttgttcgtttgtgcc

SEQ ID NO: 5474 - protein, 336 aa, Zea mays subsp. mays
  peptide (1)..(336): Ceres Seq. ID no. 12407745
METPGGSGAPSLARQGSVYSLTFDEFQTALGGASKDFGSMNMDELLRNIWTAEESNAMTAAAPTTAAASMDAHGQHQQQAGAPIQRQGSFTLPRTLSQKTVDEVWREIVGLTDGEDAQAVAAPAPTPAHAPLPAQAQRQQTLGSMTLEDFLVRAGVVCEDMGQQTLVQQPHTQGFFSQGNAVAPQTMQLGNGVVTGVVGQGLGGGMTVAVPTTPVVFNGMGKVEAGDLSSLSPVPYPFDTALRVRKGPTVEKVVERRQRRMIKNRESAARSRARKQAYIMELEAEVAKLKDLNDELQKKQVEMLKKQKDEVLERINNQHGPKAKKLCLHRTLTGPW

SEQ ID NO: 5475 - protein, 297 aa, Zea mays subsp. mays
  peptide (1)..(297): Ceres Seq. ID no. 12407746
MNMDELLRNIWTAEESNAMTAAAPTTAAASMDAHGQHQQQAGAPIQRQGSFTLPRTLSQKTVDEVWREIVGLTDGEDAQAVAAPAPTPAHAPLPAQAQRQQTLGSMTLEDFLVRAGVVCEDMGQQTLVQQPHTQGFFSQGNAVAPQTMQLGNGVVTGVVGQGLGGGMTVAVPTTPVVFNGMGKVEAGDLSSLSPVPYPFDTALRVRKGPTVEKVVERRQRRMIKNRESAARSRARKQAYIMELEAEVAKLKDLNDELQKKQVEMLKKQKDEVLERINNQHGPKAKKLCLHRTLTGPW

SEQ ID NO: 5476 - protein, 295 aa, Zea mays subsp. mays
  peptide (1)..(295): Ceres Seq. ID no. 12407747
MDELLRNIWTAEESNAMTAAAPTTAAASMDAHGQHQQQAGAPIQRQGSFTLPRTLSQKTVDEVWREIVGLTDGEDAQAVAAPAPTPAHAPLPAQAQRQQTLGSMTLEDFLVRAGVVCEDMGQQTLVQQPHTQGFFSQGNAVAPQTMQLGNGVVTGVVGQGLGGGMTVAVPTTPVVFNGMGKVEAGDLSSLSPVPYPFDTALRVRKGPTVEKVVERRQRRMIKNRESAARSRARKQAYIMELEAEVAKLKDLNDELQKKQVEMLKKQKDEVLERINNQHGPKAKKLCLHRTLTGPW

SEQ ID NO: 5477 - DNA, 1697 bp, Zea mays subsp. mays
  misc_feature (1)..(1697): Ceres Seq. ID no. 12382234
  misc_feature (1)..(1697): Ortholog of  Ceres SEQ ID NO 15171693 as cited in SEQ ID NO 60124
gcacgagaccattacctagaacatcctaatcgaaaagtcctgcgaatccagtccgtcgacttccccgacgccgccgtggcagcagtcgccgccgacgaagtcggcaccagcagcggcggcgttaccacctctcgtccgctctccagccaccctcccccctctaccaccacatcgtccatacttactctcgagctccccggcgcaaaccccgtcgcgcccagccgaagccctaggatcctccacacccgcggcgtcatccacctctaccactcgtcgtcctccacttccacctcctcctcctacgcctcggcggtcgcagccacctcttcctcctcatccgggccggccaccccgcagcccgcctccgactcgcacctgcccctatgtcgcggcacgcgcctcctggtgctcgccgttccgacgcgcgtttcgccggaggactttgttcgcttctgcggcccccacctcgagtgtgcagccgacattcgtttcatcagggatgatggagtggaggaccggtacagcgttctagtggagtttgaggaccagagtagcgctgaatggttctacgccgatctcaatggctggaggttctcaacctctgagaaagattggatcaggacatcagtgggattttggcaactacttgtgatcactctttccgttgctcatgtgtttcagtgtggaccaattcatcctgtccggtatgccagttttgtcagaagcagtctgaaaattctacatgttctgtttgccaaaccactggaaacctctggatatgtgtgatatgtggttttgttggatgcggacggtatcaagaaggacatgcgaaacagcactggaaagatactcagcattgctattcgctagatttggaaacacaacgtgtttgggactatgttggtgacagttttgtacatcggctgaatcaatccaagagtgacgcaaagcatgctaagttcaaatcaaaaagtaaatattctggggatgaatgtgtaaactgctcgtgcaatgatgactctgatatgggtggagctatgttcagcagcaaagctgaaacaattgtggacgagtacaatcgtctcctggcaagccaacttgaaactcagagagaggtgcagacgtgcagttcattcctgctaagttttctatgtcactattgaaagcaaatattatgagggcctgttgtctgaggctaaaagaaacaaggagcaccagatttctgaagctgctgataaagctgtaagtgataagcttgaagagatgcaacttaagctcgagaatcttattgtggagaaaaagaaagttgcagatatgaacgaaaaactcactaggagccaagacatgtggcgccagacactaagagatatagaggaaagggaaagagcacagttgaagtcgaaggatgaaatgattctcgatctggaagaacagataaaggatttcaaattttccatcaaactgcagaagtcaatagagaagaacgatggtgtcaagggtggtacgctggttccactccctacggtttcagattctggaggcaagggtaaaaggtcatcaagaacaagcaagaggaggaattagtatcctttgctgagtagcaattagtcttgactggaacagacgtatacgaaccttattggcatgtatttactagcctgttatgatgaactacagcgtgatgtttgatngtcacg

SEQ ID NO: 5478 - protein, 261 aa, Zea mays subsp. mays
  peptide (1)..(261): Ceres Seq. ID no. 12382235
ARDHYLEHPNRKVLRIQSVDFPDAAVAAVAADEVGTSSGGVTTSRPLSSHPPPSTTTSSILTLELPGANPVAPSRSPRILHTRGVIHLYHSSSSTSTSSSYASAVAATSSSSSGPATPQPASDSHLPLCRGTRLLVLAVPTRVSPEDFVRFCGPHLECAADIRFIRDDGVEDRYSVLVEFEDQSSAEWFYADLNGWRFSTSEKDWIRTSVGFWQLLVITLSVAHVFQCGPIHPVRYASFVRSSLKILHVLFAKPLETSGYV

SEQ ID NO: 5479 - DNA, 1662 bp, Zea mays subsp. mays
  misc_feature (1)..(1662): Ceres Seq. ID no. 12404887
  misc_feature (1)..(1662): Ortholog of  Ceres SEQ ID NO 15176895 as cited in SEQ ID NO 54714
ctaaaccgctatggtccatccacatccacagtcgccatcgcccccacctctcaccgtcgtcttcgtgcaccactcggcctccactgccggtcgcgcctcccagccacctcgtgccgctctgccaccccgcgcatcctccaccgcccctatggctgcnacgggcgagcnctgcccgagcagtcgaccgccctttccgtgccgccccgcctccccgctaggcctccactgcccactgctccggcgcctacagtggaaggcaaggagaaggacatcgggcggcggtagctggatctggcaagcacaaggccgcgcccccggggcgcctggatctgcgttgcttgcaacccccccccccccccccccacacacacacacacacaacagatctgctacagggacaatctgatggtcggcgcatcgcctagaggccggtggtggcgagtcacgcctcctcagccctcatcctcacgtcgtcgccaccgcagatccgcccaacggcccctgacccgacaatgacgattatcttattgctagcaccgatggggtggggacaaagctgaagcttgctttcgaaactggtattcatgatacaatcgacattgacctggtggcaatgagcgtcaatgacattgtaactctaggtgcaaaaccattgttcttcctagattactatgcaacgagcaagcttgatgttgatcttgcagagaaggttatcaaggggattagggatggctgcgaacaatcagattgtgctctcctaggaggggagacagcagaaatgcctggtttctatgcagagggtgaatatgatctaagtggttttgctgtgggtgttgtgaagaaggataaaatcattgatggaaaaacattgttaagggagatgtgcttataggtcttccttccagtggtgttcattctaacgggttctctcttgttagaaggagtactgagaaaagtggactttctttggatgattagctcccaagaaatgatggcataacaactacagttggtgaagctctaatggcaccaaccttcatctatgttaagcaggtgcttgagattattagcaaaggtggtgtgaaaggactagcccacatcactggtggtggctttactagcaatatcccaagagtattcccctctggatgcggggcaaaaaatttactgggtcatgggaaatacctccaatcttcagttggcttcaacaggcaagaacaaatgatcttcaaacttcgcctttgattttcagtagcaactattctgagaaacatcaggcactgcattggcgtactggtcataaaaatgattgcctccagataataagttctgctgcttcaaattcagttctgccagctgtaggaatagggtttgtccgctggtttgctaaggcaagcaacgtacatagactgctcgtcttggatcctttaggaatcataaaagcatatagaggaactatgtataggctacaaagaagcataagaagcatttttatagcagaagccaagtgttctgatgattttgttttttcaattgtgttttctgttattggttcagtatgcacatatattgacatgatttatggcatggcatctgccatctttgttatatttatgacatcgttcttgattgatgtgtgcgacatgaatgatagatcttttt

SEQ ID NO: 5480 - protein, 171 aa, Zea mays subsp. mays
  peptide (1)..(171): Ceres Seq. ID no. 12404888
MRGKKFTGSWEIPPIFSWLQQARTNDLQTSPLIFSSNYSEKHQALHWRTGHKNDCLQIISSAASNSVLPAVGIGFVRWFAKASNVHRLLVLDPLGIIKAYRGTMYRLQRSIRSIFIAEAKCSDDFVFSIVFSVIGSVCTYIDMIYGMASAIFVIFMTSFLIDVCDMNDRSF

SEQ ID NO: 5481 - protein, 131 aa, Zea mays subsp. mays
  peptide (1)..(131): Ceres Seq. ID no. 12404889
  misc_feature (49)..(49): Xaa is any aa, unknown or other
  misc_feature (53)..(53): Xaa is any aa, unknown or other
MVHPHPQSPSPPPLTVVFVHHSASTAGRASQPPRAALPPRASSTAPMAXTGEXCPSSRPPFPCRPASPLGLHCPLLRRLQWKARRRTSGGGSWIWQAQGRAPGAPGSALLATPPPPPPHTHTHNRSATGTI

SEQ ID NO: 5482 - protein, 94 aa, Zea mays subsp. mays
  peptide (1)..(94): Ceres Seq. ID no. 12404890
  misc_feature (53)..(53): Xaa is any aa, unknown or other
  misc_feature (56)..(56): Xaa is any aa, unknown or other
LNRYGPSTSTVAIAPTSHRRLRAPLGLHCRSRLPATSCRSATPRILHRPYGCXGRXLPEQSTALSVPPRLPARPPLPTAPAPTVEGKEKDIGRR

SEQ ID NO: 5483 - DNA, 920 bp, Zea mays subsp. mays
  misc_feature (1)..(920): Ceres Seq. ID no. 12359483
  misc_feature (1)..(920): Ortholog of  Ceres SEQ ID NO 12558659 as cited in SEQ ID NO 20727
  misc_feature (1)..(920): Ortholog of  Ceres SEQ ID NO 12608945 as cited in SEQ ID NO 51209
  misc_feature (1)..(920): Ortholog of  Ceres SEQ ID NO 14314534 as cited in SEQ ID NO 52434
  misc_feature (1)..(920): Ortholog of  Ceres SEQ ID NO 14308640 as cited in SEQ ID NO 60489
  misc_feature (1)..(920): Ortholog of  Ceres SEQ ID NO 15175034 as cited in SEQ ID NO 62432
  misc_feature (1)..(920): Ortholog of  Ceres SEQ ID NO 13656436 as cited in SEQ ID NO 69154
gtttttcccctcctcttcctttcccccccacccccactactctctctcgccccaaaaccagatcgccacgaccaagggcagagggccccggaggggcgcgtagcaatggcggcaggctaccgggccgaggacgattacgattacctcttcaaggtggtcctgatcggcgactccggcgtcggcaagtccaacttgctctcacgcttcacgcgcaacgagttcagcctcgagtccaagtccacaatcggcgtcgagttcgccacccgctctctccaggtcgacggcaaggtcgtcaaggcccagatttgggacaccgccggccaggaacgataccgtgcaatcactagtgcgtattaccgaggcgctgttggggcgttgcttgtatatgacgtcactcgccactcaacctttgagaacgttgagcgttggctgaaggagctgagagaccacacagaccccaatatagttgttatgctggttggcaacaaatctgatctccgccatcttgtagcagttcaaaccgacgaaggaaaagcattcgcagagagggaatcgttgtacttcatggagacctctgcgcttgagtcgaccaacgttgagaatgcatttgcagaagtcctagctcagatctaccgtattgtgagcaagagagcagttgaagcaggtgaagatgcagcatctgggcctggcaggggcgagaagataaacattaaggatgacgtctcggcagtgaagaagggtggctgctgctctagctgagctgccgtgctgtaattttttttggggagttgtgggatgtagcttatgttatggcattttcagcgactggaaattggtagtggcatttagcagcctctattacctagagaggttattgtcaaactgaaaaaaaaaactgaaggttagatcagtttagagct

SEQ ID NO: 5484 - protein, 252 aa, Zea mays subsp. mays
  peptide (1)..(252): Ceres Seq. ID no. 12359484
VFPLLFLSPPPPLLSLAPKPDRHDQGQRAPEGRVAMAAGYRAEDDYDYLFKVVLIGDSGVGKSNLLSRFTRNEFSLESKSTIGVEFATRSLQVDGKVVKAQIWDTAGQERYRAITSAYYRGAVGALLVYDVTRHSTFENVERWLKELRDHTDPNIVVMLVGNKSDLRHLVAVQTDEGKAFAERESLYFMETSALESTNVENAFAEVLAQIYRIVSKRAVEAGEDAASGPGRGEKINIKDDVSAVKKGGCCSS

SEQ ID NO: 5485 - protein, 217 aa, Zea mays subsp. mays
  peptide (1)..(217): Ceres Seq. ID no. 12359485
MAAGYRAEDDYDYLFKVVLIGDSGVGKSNLLSRFTRNEFSLESKSTIGVEFATRSLQVDGKVVKAQIWDTAGQERYRAITSAYYRGAVGALLVYDVTRHSTFENVERWLKELRDHTDPNIVVMLVGNKSDLRHLVAVQTDEGKAFAERESLYFMETSALESTNVENAFAEVLAQIYRIVSKRAVEAGEDAASGPGRGEKINIKDDVSAVKKGGCCSS

SEQ ID NO: 5486 - DNA, 1550 bp, Zea mays subsp. mays
  misc_feature (1)..(1550): Ceres Seq. ID no. 12409494
  misc_feature (1)..(1550): Ortholog of  Ceres SEQ ID NO 13598886 as cited in SEQ ID NO 444
acactccaaaccacaagcgcagccgccgtcacttctgccccatcgcggccccatcctgccgctcgtcgacgacgccaccccgcccctcgaccgcggctaacgccgccagtgtcgcaagcaagctttggtgccgccgccttcacacaggctttgaaggaggtggagcgccgggagcacgaggccgagacgaagacccgccacctccagggatggcccaagcaccgccatgacccgaggagtgaggatgaggatcccgaggaggtggagtcatatgtggaggattcccgcgaggagaacgcggaggcggtgcccgtagctgtagggaaccgggccaagagcactggaaaggggaaggcgcagatgtaccgccacctggtgttccccgtgctggagttcctccaggagcggcagctcttctcggagtcagagatcctggaggccaagatccgcctcctcagcggcacgggccacgtcaggggtagcctccccaagggaaatggaggatagcttctgggtccggcgacaagttgcagttgcagcagtgctccaatgttttggtcaatggatttgttctaaaagaatacacagaaagatagtcagaagcacaccaatatagggcatttccacttacttggatggtaaagaagacactcctacaaattgaaatgcacgtacttcgggcttcacgacaactggactggacaggtgtctgcacgcttcagttgaagccccagatatcacagagctcatgctgtccatggagctgcttggtgatgcacggtcaacatggcccttagttgggatcctgttccctgatgatcttgagggtatagtttttctgatataagattttgatgacggacgaacagggaccctctgagcagttccctttactttcaaaaagtgcctttcttgaacggtcaattgaagaaaattctgaccaagaagaatgcatcatcaagctaaatgacattcctaggggtgccaagtcatttgagctagttgcaaggttctgctatggtgtgaaaatagagctttcacctgcaaatgttgtctacctacggtgtgcctcaaagcatctagaaatgactgaagaagtagctgaggaaaacctgattgcacagtcagaaatgtttctcaaccaagtggttctccgtaactggaaagattatttggcagcattggaaacacgtgatgacctactcccccatgctgaagacctccagattgtgaacagatgtatcgagccattggcatcaaaagctactagagtgaacagatgcttttgtgactgatcagctctggagcagctagagtgatgtagttgtgggcttttgaacaatagttagagtgatatgaaacattagtgatgtagttgtgggcttttgaactacttcaagctggagtgatgtcgctgtggtgtttttgtgactgatcatctctggagcttttgtgaatgatctagctagctatccgtaaatgatctagttatgaatgatattataattgtgatgcttttgtgaatatataattgtggtgcttttgtgttc

SEQ ID NO: 5487 - protein, 168 aa, Zea mays subsp. mays
  peptide (1)..(168): Ceres Seq. ID no. 12409495
TLQTTSAAAVTSAPSRPHPAARRRRHPAPRPRLTPPVSQASFGAAAFTQALKEVERREHEAETKTRHLQGWPKHRHDPRSEDEDPEEVESYVEDSREENAEAVPVAVGNRAKSTGKGKAQMYRHLVFPVLEFLQERQLFSESEILEAKIRLLSGTGHVRGSLPKGNGG

SEQ ID NO: 5488 - protein, 146 aa, Zea mays subsp. mays
  peptide (1)..(146): Ceres Seq. ID no. 12409496
MTDEQGPSEQFPLLSKSAFLERSIEENSDQEECIIKLNDIPRGAKSFELVARFCYGVKIELSPANVVYLRCASKHLEMTEEVAEENLIAQSEMFLNQVVLRNWKDYLAALETRDDLLPHAEDLQIVNRCIEPLASKATRVNRCFCD

SEQ ID NO: 5489 - DNA, 1056 bp, Zea mays subsp. mays
  misc_feature (1)..(1056): Ceres Seq. ID no. 13498940
  misc_feature (1)..(1056): Ortholog of  Ceres SEQ ID NO 14316017 as cited in SEQ ID NO 67028
gcacgagaccattacctagaacatcctaatcaaaacaagaacagagcagtactgcaggagagcgagtgagctgtccaaagcgtccggccaaacccgcgtgtgtccaccactcctcctgcacaagcaccgccacaatgcggccgcacaccctggcgctgctcctgctcctgctggccacgccggcggcgacgcgtctggcatcggccgcctgcgcgggcgagaagttccccgcggggcgggcgtacgcggcgtgcgaggacctcccgaagctgggcgcgtcgctgcactggacgtacgacgcggcaaagagctccctgtccgtggcgttcgtggcggcgccggcggcggccggcgggtgggtggcgtgggggctgaacccgacgggcgagggcatggccggcnngcaggcgactgntgnngctnncggggtccgggtncggnnccgnggcgcccaccgtgcggacgtacaacatcacggggtacgtcccgctggggaacgtctcgacgccgctggacttcccggccaccgacctcgccgcggacgccgcagccgggggcaggatccgggtgtacggcacgctgcagctgcgcgaggggatgagggccgtgaaccaggtgtggcaggtcggcgcgtcatccaccgccggcgcccccgacaagcacgcgttccagccggacaacctcggcgccaagagcaagctcgtcctcgccggcaagtcccccgcggcggcgtccccgtcgcccgcccccgcgcctcatgcgtccggcggcggcgcggcgtcgtccaagtcccccaacgccgccgcggccgcggccggcgtggccgcgccggtagccctcgtgctcgcgctggtgggattcttggcgacggtatgatgacgcgtccacggtggctggatgggtgggcggtgagcaggggaggaagtattattgcactgttttctttatttttggttcgtttttcaggtttgttttaggctgtgaaataataataaaaacggttggctggctgcacttgttgttgagctgctgtttggtaggaatatacagtgattt

SEQ ID NO: 5490 - protein, 280 aa, Zea mays subsp. mays
  peptide (1)..(280): Ceres Seq. ID no. 13498941
  misc_feature (90)..(90): Xaa is any aa, unknown or other
  misc_feature (94)..(94): Xaa is any aa, unknown or other
  misc_feature (95)..(95): Xaa is any aa, unknown or other
  misc_feature (97)..(97): Xaa is any aa, unknown or other
  misc_feature (101)..(101): Xaa is any aa, unknown or other
  misc_feature (103)..(103): Xaa is any aa, unknown or other
  misc_feature (104)..(104): Xaa is any aa, unknown or other
MRPHTLALLLLLLATPAATRLASAACAGEKFPAGRAYAACEDLPKLGASLHWTYDAAKSSLSVAFVAAPAAAGGWVAWGLNPTGEGMAGXQATXXAXGVRXRXXGAHRADVQHHGVRPAGERLDAAGLPGHRPRRGRRSRGQDPGVRHAAAARGDEGREPGVAGRRVIHRRRPRQARVPAGQPRRQEQARPRRQVPRGGVPVARPRASCVRRRRGVVQVPQRRRGRGRRGRAGSPRARAGGILGDGMMTRPRWLDGWAVSRGGSIIALFSLFLVRFSGLF

SEQ ID NO: 5491 - protein, 194 aa, Zea mays subsp. mays
  peptide (1)..(194): Ceres Seq. ID no. 13498942
  misc_feature (4)..(4): Xaa is any aa, unknown or other
  misc_feature (8)..(8): Xaa is any aa, unknown or other
  misc_feature (9)..(9): Xaa is any aa, unknown or other
  misc_feature (11)..(11): Xaa is any aa, unknown or other
  misc_feature (15)..(15): Xaa is any aa, unknown or other
  misc_feature (17)..(17): Xaa is any aa, unknown or other
  misc_feature (18)..(18): Xaa is any aa, unknown or other
MAGXQATXXAXGVRXRXXGAHRADVQHHGVRPAGERLDAAGLPGHRPRRGRRSRGQDPGVRHAAAARGDEGREPGVAGRRVIHRRRPRQARVPAGQPRRQEQARPRRQVPRGGVPVARPRASCVRRRRGVVQVPQRRRGRGRRGRAGSPRARAGGILGDGMMTRPRWLDGWAVSRGGSIIALFSLFLVRFSGLF

SEQ ID NO: 5492 - DNA, 1493 bp, Zea mays subsp. mays
  misc_feature (1)..(1493): Ceres Seq. ID no. 13495154
  misc_feature (1)..(1493): Ortholog of  Ceres SEQ ID NO 13495070 as cited in SEQ ID NO 53216
  misc_feature (1)..(1493): Ortholog of  Ceres SEQ ID NO 15176717 as cited in SEQ ID NO 0
  misc_feature (1)..(1493): Ortholog of  Ceres SEQ ID NO 15179618 as cited in SEQ ID NO 0
ctgttcatttcctcctgctcccccctcctccctcccccccccctcctcgccgctcgccgttgaagaggtaggcccacgggccggcgagaatggaggcggcgacgatggcgtggacggcggcggtggtcggggcggggctggtgtactggttcgtctgggtgatgggcgcggcggaggtgaagggcaagcgggcggtggatctcaagatgggatccatcacgcgggacaaggtgcaggacaagtacacgcagtactggtccttcttccgccgccccaaggagacggccaccacggcggcgtcggcggagaaggtgccggccttcgtcgacaccttctacaacctcgtgaccgacatctacgagtgggggtggggccagtccttccacttctccccgtccctccccggccgctcccaccgcgacgccacgcgcgtccacgaggagcgcgtcgccgacctcctcggcgccaggccgggccaccgcctcctggacgtcggctgcggcgtcggcgggcccatgcgcgccatcgccgcgcactcggggatccaacgtcgtcggcatcaccatcaacgagtaccaggtgaaccgcgcccgcgcgcacaaccgcaaggccggcctcgactccccgcgctgcgaggtcgtctgcggcaacttcctctccatgccgttcccggacgcctccttcgacggcgcctactccatcgaggccacctgccacgcgcccaggctgcaggacgtgtacggcgaggtctaccgcgtgctcaagccggggggactctacgtctcctacgagtgggtcaccaccccgctgtaccgcgccgaggacccggaccacgtcgagtgcatccacggcatcgagcgcggcgacgcgctaccggggctccgccgccaggacgagatcgcgtccatcgctaaggaggtcgggttcgaggtgctcaaggagcaggacctggcgctgccccccgcgctgccctggtggacgcgcctcaagatgggccgcatcgcctactggcgcaactccctcgtcgtccgcgtgctcaccatgctccgggtcgcgcccaagggcgtctccgaggtgcacgagatgctgtacgagaccgcgcagcacctcacccgcggcggcgagaccggcatcttcacgcccatgcacatggtgctcctccgcaagcccgccgccgccgcctccaccgaggaggccaactagtgtaagactacacaccgccaccaatcagttactactcgcccaccgcaagggggagaaaatggggagggaggaaaaagatgcaagcagcagcagcaccagaggtaagaagagcaggctaatcggcgacttgaagaagttacaaattgatctattagagaagaagatactactaggaacgattcttctctccgtttactcttttccctgttcgtagctttgagttttaatttttgttttttggtggacggattgttccggggaggtcgaggttgggatctaaatttattttc

SEQ ID NO: 5493 - protein, 274 aa, Zea mays subsp. mays
  peptide (1)..(274): Ceres Seq. ID no. 13495155
MEAATMAWTAAVVGAGLVYWFVWVMGAAEVKGKRAVDLKMGSITRDKVQDKYTQYWSFFRRPKETATTAASAEKVPAFVDTFYNLVTDIYEWGWGQSFHFSPSLPGRSHRDATRVHEERVADLLGARPGHRLLDVGCGVGGPMRAIAAHSGIQRRRHHHQRVPGEPRPRAQPQGRPRLPALRGRLRQLPLHAVPGRLLRRRLLHRGHLPRAQAAGRVRRGLPRAQAGGTLRLLRVGHHPAVPRRGPGPRRVHPRHRARRRATGAPPPGRDRVHR

SEQ ID NO: 5494 - protein, 269 aa, Zea mays subsp. mays
  peptide (1)..(269): Ceres Seq. ID no. 13495156
MAWTAAVVGAGLVYWFVWVMGAAEVKGKRAVDLKMGSITRDKVQDKYTQYWSFFRRPKETATTAASAEKVPAFVDTFYNLVTDIYEWGWGQSFHFSPSLPGRSHRDATRVHEERVADLLGARPGHRLLDVGCGVGGPMRAIAAHSGIQRRRHHHQRVPGEPRPRAQPQGRPRLPALRGRLRQLPLHAVPGRLLRRRLLHRGHLPRAQAAGRVRRGLPRAQAGGTLRLLRVGHHPAVPRRGPGPRRVHPRHRARRRATGAPPPGRDRVHR

SEQ ID NO: 5495 - protein, 250 aa, Zea mays subsp. mays
  peptide (1)..(250): Ceres Seq. ID no. 13495157
MGAAEVKGKRAVDLKMGSITRDKVQDKYTQYWSFFRRPKETATTAASAEKVPAFVDTFYNLVTDIYEWGWGQSFHFSPSLPGRSHRDATRVHEERVADLLGARPGHRLLDVGCGVGGPMRAIAAHSGIQRRRHHHQRVPGEPRPRAQPQGRPRLPALRGRLRQLPLHAVPGRLLRRRLLHRGHLPRAQAAGRVRRGLPRAQAGGTLRLLRVGHHPAVPRRGPGPRRVHPRHRARRRATGAPPPGRDRVHR

SEQ ID NO: 5496 - DNA, 1681 bp, Zea mays subsp. mays
  misc_feature (1)..(1681): Ceres Seq. ID no. 13498741
  misc_feature (1)..(1681): Ortholog of  Ceres SEQ ID NO 14316039 as cited in SEQ ID NO 62062
  misc_feature (1)..(1681): Ortholog of  Ceres SEQ ID NO 15176783 as cited in SEQ ID NO 65590
  misc_feature (1)..(1681): Ortholog of  Ceres SEQ ID NO 15176091 as cited in SEQ ID NO 65733
  misc_feature (1)..(1681): Ortholog of  Ceres SEQ ID NO 14307991 as cited in SEQ ID NO 65737
  misc_feature (1)..(1681): Ortholog of  Ceres SEQ ID NO 14308019 as cited in SEQ ID NO 65849
  misc_feature (1)..(1681): Ortholog of  Ceres SEQ ID NO 14307964 as cited in SEQ ID NO 66191
  misc_feature (1)..(1681): Ortholog of  Ceres SEQ ID NO 15170167 as cited in SEQ ID NO 66224
  misc_feature (1)..(1681): Ortholog of  Ceres SEQ ID NO 13502874 as cited in SEQ ID NO 66298
  misc_feature (1)..(1681): Ortholog of  Ceres SEQ ID NO 14307944 as cited in SEQ ID NO 66503
  misc_feature (1)..(1681): Ortholog of  Ceres SEQ ID NO 12614124 as cited in SEQ ID NO 68392
  misc_feature (1)..(1681): Ortholog of  Ceres SEQ ID NO 14307980 as cited in SEQ ID NO 69214
atctattgaactccactcacagacagcagccacagcggagcttaattagcaatcattgactatgggtgcgctcttgccatggctggcatggttgctcgtctccctcgtcggcgtctacctcctcggccatctcgtgcaggcccgtcgtcgtcgtggtctaccgccgggaccccacccgctgcccatcatcggcagcctccacctgctcggtaaccaaccgcaccgctccctcgccaggctcgccaagacccacggcccgctcgtgtcgctccgcctgggctcggtgaccacggtggtcgcctcctccccggccgccgcccgggagatcctgcagcggcacgacgccgccttcagcaacaggtccgtgccggacgccccgggcgcccacgccaggaactccacggtgtggctgcccaacgcgccgcgctggcgcgcgctgcggaagatcatgggcacgcagctgttcgcgccgcacaggctggacgcgctccagcacctccggcgcgacaaggcgcgggagctcgtggaccacgtgcggcggctggcgcgcaggggcgagcccgtgaacgtcggccgcgtcgccttcaccaccagcctcaacctcgtctcgcgcaccatcttctcccgcgacctggccagcctcgaggacgacggcgcgtccaggaagttccaggaggtggtgacggacatcatggaggccgtgggcagccccaacgtctccgacttcttcccggcgctcgccgttgccgacctgcagggctgccggcgtcggctggcgcggctgttcgcgcggctgcaccggatcttcgacgaagagatcgacgcgaggctgcgtggccgcgacgctggcgagcccaagaagaacgacttcctcgacctgctgctggacgccgcagaggacgatgacaacacggccggcctggatcgcgacacgctccgttcactcttcacggacttgttttctgctgggagtgacacaagctccagctcagtggaatgggcaatggtggagctgcttcgaagccccggcttcaatggctaaagcatgcgacgagcttgcaacagtcatcggcccaagaaaagacatcgaggaatctgatattgggcggctgccctacctccaagccgtggtgaaagagaccttcaggctgcatcctgctgccccgctgttgctaccgcggcgtgcccaggccgacgtgaagatgatgggctacgtgattcccgaaggttctcgagtgttcgtaaacgtatgggcgatgggtcgagacgaggagacgtggcctgagcctgagaagtttttgcccgagaggttcctggggaagaagacgcagcaggcggttgatctcaggggcggggacttcgatctcatcccgttcggtggaggacgccggatctgccctgggatgccgctggcgatcaggatggtgcatctgctgcttgcgtcgctcttgaatcagtttgcatggaggcttccggctgagctagagaggaatggagttgacatggctgagaatttcggcatcacgttgaccaaggccgtgcctctttgtgctatagccacagagatctgagtcggcaagctattctattctagttaactattctatggtcgatatatgtacatgtatccttatcaaatttcgaaataaacttagcaaataggttagaggatgtttggttc

SEQ ID NO: 5497 - protein, 326 aa, Zea mays subsp. mays
  peptide (1)..(326): Ceres Seq. ID no. 13498742
MGALLPWLAWLLVSLVGVYLLGHLVQARRRRGLPPGPHPLPIIGSLHLLGNQPHRSLARLAKTHGPLVSLRLGSVTTVVASSPAAAREILQRHDAAFSNRSVPDAPGAHARNSTVWLPNAPRWRALRKIMGTQLFAPHRLDALQHLRRDKARELVDHVRRLARRGEPVNVGRVAFTTSLNLVSRTIFSRDLASLEDDGASRKFQEVVTDIMEAVGSPNVSDFFPALAVADLQGCRRRLARLFARLHRIFDEEIDARLRGRDAGEPKKNDFLDLLLDAAEDDDNTAGLDRDTLRSLFTDLFSAGSDTSSSSVEWAMVELLRSPGFNG

SEQ ID NO: 5498 - protein, 222 aa, Zea mays subsp. mays
  peptide (1)..(222): Ceres Seq. ID no. 13498743
MTTRPAWIATRSVHSSRTCFLLGVTQAPAQWNGQWWSCFEAPASMAKACDELATVIGPRKDIEESDIGRLPYLQAVVKETFRLHPAAPLLLPRRAQADVKMMGYVIPEGSRVFVNVWAMGRDEETWPEPEKFLPERFLGKKTQQAVDLRGGDFDLIPFGGGRRICPGMPLAIRMVHLLLASLLNQFAWRLPAELERNGVDMAENFGITLTKAVPLCAIATEI

SEQ ID NO: 5499 - protein, 197 aa, Zea mays subsp. mays
  peptide (1)..(197): Ceres Seq. ID no. 13498744
MGTQLFAPHRLDALQHLRRDKARELVDHVRRLARRGEPVNVGRVAFTTSLNLVSRTIFSRDLASLEDDGASRKFQEVVTDIMEAVGSPNVSDFFPALAVADLQGCRRRLARLFARLHRIFDEEIDARLRGRDAGEPKKNDFLDLLLDAAEDDDNTAGLDRDTLRSLFTDLFSAGSDTSSSSVEWAMVELLRSPGFNG

SEQ ID NO: 5500 - DNA, 1421 bp, Zea mays subsp. mays
  misc_feature (1)..(1421): Ceres Seq. ID no. 12405097
  misc_feature (1)..(1421): Ortholog of  Ceres SEQ ID NO 13594604 as cited in SEQ ID NO 52106
gaagctagaggctctctggcgccgacggtcgacccacacgcgcgtccagcgatttcgccggggggagatcttgccattccgtggagcaccatccgcggtagcctagccgcgactggagatcggggcttgcgggccgtggagccacccaagaaggtagccgcgaaaatcttgatccggccggggacggggcctttggaggttcgtccctcgatcgggtgtcgtctgcgaaagccgggtcgaacaaatcgtcgcgactggaggcggcgcgggggcatgggggcgtgggtctcggtcctgctcgggatggacggagccgcggcggccgggcctgctgctgtgggcctgggcgacctgccggagctctgcgccgcccaggtgctgctccggctcgacccgccggagatctgcaggctcgcgcaggtcaaccacgcgttccgcggcgccgcgggggctgacttcgtgtgggaagccaagctgccggagaactacagctacctgatggagttcgtggggagcggcgacgaggggaggcggaggcggcggcggaccgggaagaaggagatctacgcgaggctcgccaggcctgtgcctttttgtgacggcaagaaggaattctggttggacaagaacaaaggcatgatctgtatggcactgtcgtccaaagcactggtgattactgggattgatgacagaagatactggcaacacatgccaacttcagaatcgagattccagtctgtagcctaccttcagcaaatctggtggtttgaggtggttggtgaagtcgatttctgcttccctgttggaacatatagcttgtacttcagggtccatcttgggaagttctacagacgatttggccgccgccagtgcacctcagagcatgttcatggttgggacaagaagcctgttcgcttccagctatcgacctctgacgggcagcaggcattgtctcagtgctacctggaggagcccgggagctgggtcctgtaccatgctggcgattttgtggcctcaaagcctgaccagctgatgaagctgaagttctccatggcacagatcgactgcacgcacacaaaaggcggactgtgcatcgactcggttcttatctatccaaaagggaaggggtttcaccaggagagggtggtcaggtctcagaaatgagggttgtagatgttgtggaggtactcacattaggatgttagagcaaatgcagcttgcagcctgatcttatttttactttgggctctagttcgcagcagaggtgaagtgtatgtggttgtagaactcaggtattgtgtggtcaggtgaccaccagagtgctctgtcagtcctttggcaaggtcgttttcgccccccttcagctgaatttggacagcgagatagccatgaaactgtactgaaatgagttcgaaggtgcc

SEQ ID NO: 5501 - protein, 387 aa, Zea mays subsp. mays
  peptide (1)..(387): Ceres Seq. ID no. 12405098
EARGSLAPTVDPHARPAISPGGDLAIPWSTIRGSLAATGDRGLRAVEPPKKVAAKILIRPGTGPLEVRPSIGCRLRKPGRTNRRDWRRRGGMGAWVSVLLGMDGAAAAGPAAVGLGDLPELCAAQVLLRLDPPEICRLAQVNHAFRGAAGADFVWEAKLPENYSYLMEFVGSGDEGRRRRRRTGKKEIYARLARPVPFCDGKKEFWLDKNKGMICMALSSKALVITGIDDRRYWQHMPTSESRFQSVAYLQQIWWFEVVGEVDFCFPVGTYSLYFRVHLGKFYRRFGRRQCTSEHVHGWDKKPVRFQLSTSDGQQALSQCYLEEPGSWVLYHAGDFVASKPDQLMKLKFSMAQIDCTHTKGGLCIDSVLIYPKGKGFHQERVVRSQK

SEQ ID NO: 5502 - protein, 296 aa, Zea mays subsp. mays
  peptide (1)..(296): Ceres Seq. ID no. 12405099
MGAWVSVLLGMDGAAAAGPAAVGLGDLPELCAAQVLLRLDPPEICRLAQVNHAFRGAAGADFVWEAKLPENYSYLMEFVGSGDEGRRRRRRTGKKEIYARLARPVPFCDGKKEFWLDKNKGMICMALSSKALVITGIDDRRYWQHMPTSESRFQSVAYLQQIWWFEVVGEVDFCFPVGTYSLYFRVHLGKFYRRFGRRQCTSEHVHGWDKKPVRFQLSTSDGQQALSQCYLEEPGSWVLYHAGDFVASKPDQLMKLKFSMAQIDCTHTKGGLCIDSVLIYPKGKGFHQERVVRSQK

SEQ ID NO: 5503 - protein, 286 aa, Zea mays subsp. mays
  peptide (1)..(286): Ceres Seq. ID no. 12405100
MDGAAAAGPAAVGLGDLPELCAAQVLLRLDPPEICRLAQVNHAFRGAAGADFVWEAKLPENYSYLMEFVGSGDEGRRRRRRTGKKEIYARLARPVPFCDGKKEFWLDKNKGMICMALSSKALVITGIDDRRYWQHMPTSESRFQSVAYLQQIWWFEVVGEVDFCFPVGTYSLYFRVHLGKFYRRFGRRQCTSEHVHGWDKKPVRFQLSTSDGQQALSQCYLEEPGSWVLYHAGDFVASKPDQLMKLKFSMAQIDCTHTKGGLCIDSVLIYPKGKGFHQERVVRSQK

SEQ ID NO: 5504 - DNA, 1450 bp, Zea mays subsp. mays
  misc_feature (1)..(1450): Ceres Seq. ID no. 12373657
  misc_feature (1)..(1450): Ortholog of  Ceres SEQ ID NO 12364737 as cited in SEQ ID NO 51089
  misc_feature (1)..(1450): Ortholog of  Ceres SEQ ID NO 14306553 as cited in SEQ ID NO 53121
  misc_feature (1)..(1450): Ortholog of  Ceres SEQ ID NO 13582301 as cited in SEQ ID NO 56509
  misc_feature (1)..(1450): Ortholog of  Ceres SEQ ID NO 13595567 as cited in SEQ ID NO 56760
  misc_feature (1)..(1450): Ortholog of  Ceres SEQ ID NO 13655302 as cited in SEQ ID NO 63307
  misc_feature (1)..(1450): Ortholog of  Ceres SEQ ID NO 13597380 as cited in SEQ ID NO 64054
  misc_feature (1)..(1450): Ortholog of  Ceres SEQ ID NO 12625474 as cited in SEQ ID NO 64169
  misc_feature (1)..(1450): Ortholog of  Ceres SEQ ID NO 13597502 as cited in SEQ ID NO 64681
gcacgagaccattacctagaacatcctaatcgaaaactcactccaaagccaacaaacagagctccaactcagaaagcatccgtcccttggcagcagcaacaagctactagctatgtgtgtttacagcgagcgaggggaaaaaaaagaaaacatctaagatatactccatcatcttcgtttgattaacccgcccagtaaagccatgggtactaatgatagagcggtcatttctctagtactcctcgtgtgcatcgctagccgctcgtccttgggtgccgctgaaactgacgttgagcagaagcgctcgtcagtcccgttgatgtttgtgttcggtgattcgctggtcgatgtcggaaacaataacttcctgccgccgcctgcaccccgtgctgcatctccgtacggcatcgacttccctgctggcacccccggcgccgtctcaggacggttcacgaatggctacaaccttgccgatttagtcgcgcgacgtctggggttcaagatgagtccacctgcttacctctcgttgacaccgttatcaaagtttgacctgttcacgtgccgaattggtgccaattacgcgtctggcggatctggcattctcaacaccacgggaaacgggacactcacgctgcagaaacaaatcacgctgttctcgaaaactaaagcaagaatgtcgtggggccgctgcaagctcagctctatggtatcgaggtcgttgttccttatcagcgccggcggcaatgacttctccgccttcagtgaaatgggcatgggcgaacaagacgccccagcctacatcagtagcatggtctcaacctatgtccagcatatcgacgcgttgtacaagttgggagcacggaggttggggatcctagacgtgccagcgatcggctgtaccccaggctccagagtccccatggccaacggcggatgcaacgacgctgccaactctatggcgcagaacttcaacaaactcctaaggctcgaggtggcgaaagccgtcgcatcctccatgcccggcatgagatactccattgcaagcacctacaattttgtcaccgacttgatggacagccatctagtggctgggctccgggtggtcgacagggcatgctgcggatcgggaaaactgaacgccgcggtcatgtgcgcccagccaaacacgacttactgttcggatcgcgacgactacatgttctgggacatgctacatcctacgcaggcaacaaatgaacgtggggtggtcgccatcttctacggcccgcaggagtacgcggatcccatcaactttgcacagttggccgctgccacagcaaatgatgatgatgatataaatactgctatggccgcaggcgtctatgccgccatatgataaaccctatttatgtcgattggcatgcagctgcgacatgtcactacctgagtactatatacgtaattcagttgg

SEQ ID NO: 5505 - protein, 390 aa, Zea mays subsp. mays
  peptide (1)..(390): Ceres Seq. ID no. 12373658
MGTNDRAVISLVLLVCIASRSSLGAAETDVEQKRSSVPLMFVFGDSLVDVGNNNFLPPPAPRAASPYGIDFPAGTPGAVSGRFTNGYNLADLVARRLGFKMSPPAYLSLTPLSKFDLFTCRIGANYASGGSGILNTTGNGTLTLQKQITLFSKTKARMSWGRCKLSSMVSRSLFLISAGGNDFSAFSEMGMGEQDAPAYISSMVSTYVQHIDALYKLGARRLGILDVPAIGCTPGSRVPMANGGCNDAANSMAQNFNKLLRLEVAKAVASSMPGMRYSIASTYNFVTDLMDSHLVAGLRVVDRACCGSGKLNAAVMCAQPNTTYCSDRDDYMFWDMLHPTQATNERGVVAIFYGPQEYADPINFAQLAAATANDDDDINTAMAAGVYAAI

SEQ ID NO: 5506 - protein, 351 aa, Zea mays subsp. mays
  peptide (1)..(351): Ceres Seq. ID no. 12373659
MFVFGDSLVDVGNNNFLPPPAPRAASPYGIDFPAGTPGAVSGRFTNGYNLADLVARRLGFKMSPPAYLSLTPLSKFDLFTCRIGANYASGGSGILNTTGNGTLTLQKQITLFSKTKARMSWGRCKLSSMVSRSLFLISAGGNDFSAFSEMGMGEQDAPAYISSMVSTYVQHIDALYKLGARRLGILDVPAIGCTPGSRVPMANGGCNDAANSMAQNFNKLLRLEVAKAVASSMPGMRYSIASTYNFVTDLMDSHLVAGLRVVDRACCGSGKLNAAVMCAQPNTTYCSDRDDYMFWDMLHPTQATNERGVVAIFYGPQEYADPINFAQLAAATANDDDDINTAMAAGVYAAI

SEQ ID NO: 5507 - protein, 290 aa, Zea mays subsp. mays
  peptide (1)..(290): Ceres Seq. ID no. 12373660
MSPPAYLSLTPLSKFDLFTCRIGANYASGGSGILNTTGNGTLTLQKQITLFSKTKARMSWGRCKLSSMVSRSLFLISAGGNDFSAFSEMGMGEQDAPAYISSMVSTYVQHIDALYKLGARRLGILDVPAIGCTPGSRVPMANGGCNDAANSMAQNFNKLLRLEVAKAVASSMPGMRYSIASTYNFVTDLMDSHLVAGLRVVDRACCGSGKLNAAVMCAQPNTTYCSDRDDYMFWDMLHPTQATNERGVVAIFYGPQEYADPINFAQLAAATANDDDDINTAMAAGVYAAI

SEQ ID NO: 5508 - DNA, 3550 bp, Zea mays subsp. mays
  misc_feature (1)..(3550): Ceres Seq. ID no. 12404984
  misc_feature (1)..(3550): Ortholog of  Ceres SEQ ID NO 15169199 as cited in SEQ ID NO 55297
  misc_feature (1)..(3550): Ortholog of  Ceres SEQ ID NO 15175690 as cited in SEQ ID NO 55466
  misc_feature (1)..(3550): Ortholog of  Ceres SEQ ID NO 15171197 as cited in SEQ ID NO 56892
  misc_feature (1)..(3550): Ortholog of  Ceres SEQ ID NO 14306381 as cited in SEQ ID NO 58812
gcacgagaccattacctagaacatcctaatcgaaaagccacgctaccaccgcttcctttcctcttcggctgctccgcctcgcctcccagttcacagcccctcccaggctccgaatcggcggccacttctcattcctcacttccgtcctcgcgcaccaccccctccatccgttccggatggtgccttcggaatcccgtccggcgccctagcgtagctcgggctcggccaggctccgggcccgccgcgccgttccgcagtccagctccacctccagtggttactagtggaagtttagcacactgattccgtcatagtgggatccttgccaaatgaagtgtccatccaaccaacccaactaactgtactgaaatctcattgctttcagaatggtacggttagtaaattgaggttggtggtgggttggtggccatactaggggaagatcttttcttgagtttaaggaagatgcttgcctttatttgagaaggccctttttggtacgtcagcagtgttctttcctataggagtaaatgccattccgtagcatcgtgcgtgatgtaagggatggtttcgggagcttgtctaggaggggatttgaggtcaggtttctgagtcatcgcagagggaaatctcatggtgctgtccatgagctgcacgacccagtgcttgtggtacagagtagctgctgggctagcttgcctcctgaattacttcgagatgtgattgagaggttggagaccagtgaggatacatggccttctaggaaacatgtagttgcttgtgcagctgtctgcagaacatggagagagatgtgtagagagattgtcaagagcccagagttttctggaaaaatcacttttcctgtttccttgaagcagcctgggcctcgagatggaactattcagtgttttattaagagggataaatctacccaaatctacagtctgtaccttagttttagctctgccgtgcctgtcgaaaatggcaaattccttctatccgcaaaaaggaactgccgtgcaacatatacagaatatataatatcaataaattctggtgatacatctaggtgtacaagtaacaacacatacattgggaaattaaggtcaaatttccttggcacaaaatttgtaatatacgatactcatccgccatacaatggaactagtcaaacagtggcagggaaaacaagtcagagattctactccaagaagggatcaaccaaggtttcttgcaggtggtacagtattgcacaaatctcatacgagctgaatgtcttgggaactcgaggcccaaggcggatgaactgtgtaatgcactccatcccagcttcatgccttgaggctggtggcagtgtcccttgccagccggacagcattgcagcccactctgttggcggatcattcagcagtgtgtccttgtcaaagtcatcgactatggaccactctatgcatttcaccagttcccggctctctgatgccataacaggagatggcattgtgaacagaggccaggcattgaatgatgctgacgatgaagagtgcaaggacatgcctttgatcctccgcaacaaggccccaaggtggcacgagcagcttcagtgctggtgcctcaacttccggggccgggtgactgtcgcctcggtcaagaacttccagctagtcgcggcgacacagcctgccgccggagccctgaccccatcacaggcagccccgcagccagctccgcctcctccgccggaccaagagaaggtcatactgcagtttgggaaggtcggcaaggacatcttcaccatggactactgctacccgctgttagccttccaggccttcgccatctgcctgagcagcttcgacaccaagttggcctgcgaataaatcctacctacaattctggtacctaccaaataatcaaaaacactgattgtcgtggtgttcgtccaagaaccgagtttagctgagacgccattgggcaccatgtgctggtgccttgttaactcagaaacgcgtgggggctgaatctgtttcagcagcttccttgtgataatctgtagctgctgcttcgctgctgttgtatcctatgctttcatttctttccggttccgctgtagcttcttaccccccggtgacattagttcggtacccgtatctggatatttttttagccttcttcgttggattgttcaccggtgatggcatgtattaacagagatagttacatacagatgtaatgaattcatgacatctgatcactcatatgtatcacggaagcatgaggaggataaggtgatcatctttgagagaggagatttggtcttcgtgttcaacttccactggagcaatagctattttgactatcgcgttggttgtttcaagcctgggaagtacaagatcgttttagattctgacgatggccttttcggtggatttattaataaacaccccgttcaaaagtagtcatcgataccagaccatattcaagagcgccactacaaaaatactcctaaaggcttatttcaaggagaaccatccgtcctctagattgctagctacatcaaaattgcacaccatgcttgcaacttcaaacatacattcgcacctagagcttgaggaaaacaaactcttcgatcgctggaatctccccgatcttcgtcagtgtgccattgcttggttcctcatcaacaccaattgccatgacagcatgcttgcgaggagcaattcttccgacactcatgaaactgacattaacattctcctcacccaagacgcttccgactgacccaatcatacctggttgatcaacctgcctgcaaaggatgaggcttccttccaagctcacatccacctggaatgctccaacctttgttagatgaggaacaccatccttcactctgccctccacagtgatctctccagtctcagatatcgcactgggaaatttggactcgacattggcaatctgaacttgaatgtatcacggaagcatgaggaggataaggtgatcatctttgagagaggagatttggtcttcgtgttcaacttccactggagcaatagctattttgactatcgcgttggttgtttcaagcctgggaagtacaagatcgttttagattctgacgatggccttttcggtggatttagtcggcttgatcatgatgctgagtacttcactgctgactggccgcatgacaacaggccgtgttctttctcggtctatgcacccagcagaacagccgtcgtatatgcacctgcaggtgcagaggacgaatagggcacaacagcggttgttggggaagaacttcagagggatgtactgctggtggactgacaccactgccacgcgcgatgctgccagatgttgccctcgagaccacgtggcaggacgatcagctattcaggtggataggttagcttaccgatgagctctcgctttcgagtgactggaaggaaatggacctcgcacaccgcattttcactatgcaatctgaaaatgtaccgtgtggttttgtacatatggatcagtaggcattatatcattcatctctctg

SEQ ID NO: 5509 - protein, 448 aa, Zea mays subsp. mays
  peptide (1)..(448): Ceres Seq. ID no. 12404985
MPFRSIVRDVRDGFGSLSRRGFEVRFLSHRRGKSHGAVHELHDPVLVVQSSCWASLPPELLRDVIERLETSEDTWPSRKHVVACAAVCRTWREMCREIVKSPEFSGKITFPVSLKQPGPRDGTIQCFIKRDKSTQIYSLYLSFSSAVPVENGKFLLSAKRNCRATYTEYIISINSGDTSRCTSNNTYIGKLRSNFLGTKFVIYDTHPPYNGTSQTVAGKTSQRFYSKKGSTKVSCRWYSIAQISYELNVLGTRGPRRMNCVMHSIPASCLEAGGSVPCQPDSIAAHSVGGSFSSVSLSKSSTMDHSMHFTSSRLSDAITGDGIVNRGQALNDADDEECKDMPLILRNKAPRWHEQLQCWCLNFRGRVTVASVKNFQLVAATQPAAGALTPSQAAPQPAPPPPPDQEKVILQFGKVGKDIFTMDYCYPLLAFQAFAICLSSFDTKLACE

SEQ ID NO: 5510 - protein, 355 aa, Zea mays subsp. mays
  peptide (1)..(355): Ceres Seq. ID no. 12404986
MCREIVKSPEFSGKITFPVSLKQPGPRDGTIQCFIKRDKSTQIYSLYLSFSSAVPVENGKFLLSAKRNCRATYTEYIISINSGDTSRCTSNNTYIGKLRSNFLGTKFVIYDTHPPYNGTSQTVAGKTSQRFYSKKGSTKVSCRWYSIAQISYELNVLGTRGPRRMNCVMHSIPASCLEAGGSVPCQPDSIAAHSVGGSFSSVSLSKSSTMDHSMHFTSSRLSDAITGDGIVNRGQALNDADDEECKDMPLILRNKAPRWHEQLQCWCLNFRGRVTVASVKNFQLVAATQPAAGALTPSQAAPQPAPPPPPDQEKVILQFGKVGKDIFTMDYCYPLLAFQAFAICLSSFDTKLACE

SEQ ID NO: 5511 - DNA, 1398 bp, Zea mays subsp. mays
  misc_feature (1)..(1398): Ceres Seq. ID no. 12386788
  misc_feature (1)..(1398): Ortholog of  Ceres SEQ ID NO 14301430 as cited in SEQ ID NO 56553
  misc_feature (1)..(1398): Ortholog of  Ceres SEQ ID NO 13639124 as cited in SEQ ID NO 56718
  misc_feature (1)..(1398): Ortholog of  Ceres SEQ ID NO 13596969 as cited in SEQ ID NO 63375
  misc_feature (1)..(1398): Ortholog of  Ceres SEQ ID NO 13597519 as cited in SEQ ID NO 64759
  misc_feature (1)..(1398): Ortholog of  Ceres SEQ ID NO 13597870 as cited in SEQ ID NO 64982
  misc_feature (1)..(1398): Ortholog of  Ceres SEQ ID NO 13662323 as cited in SEQ ID NO 68305
ctcgatcatctcccatcacttcctagctagtcgttcttactcaacacattattcgatcttgagtggaagcaaagcaggcagacatggcggcggctactgcaccaaagacgatgccgtcgtccgttttcgccgccgcactgctgctcctagccgcggcggcgtgccaggccagcccttactaccctctggagctagggtactaccgttacacttgtccccaggccgaggctatcgtcaaggccagcatggagaaggccatcgctcagaaccctggcaatggcgccgccgtcatccgcatgctcttccatgactgcttcgtcgagggctgcgacgcttccgtgcttctcgacccgaccccgttcagcccgacgccggagaagctggccgcacccaacaacccgagcctgcgcgggttcgagctgatcgacgccatcaaggacgccctcgaggccgcgtgccccggggtcgtctcctgcgccgacatcatcgccttcgcggcgcgcgacgcgtcctgcttcctgagccagggcaaggtctccttcgacatgccgtcgggccgcctcgacggcaccttctccaacgcctccgagtcggtcaagttcctcgtcccgcccacgtccaacctcagcgacctcgcctccagcttcgccgtcaagggcatgtcgctggaggacctggtcgtcctctccggcgcgcacaccgtcggccgctcccactgctcctccttcgtctccgaccgcctcgacgtcccctccgacatcaaccctgcgctggccgccttcctcaggacccgctgcccgcccaacacgaccaccagcgacgaccccaccgtgatgcaggacgtggtcacgcccaacgccatggacatccagtactacaagaacgtgctctcgcacaccgtgctcttcacctccgacgccgcgctcctcacgtcgccggagacggccaagttggtgctggacaacgccaagatccccgggtggtgggaggacaagttcgagaaggccatggtcaagatggctagcctcgaagtcaagactgggcaccaaggacaagtcaggaagaactgcagggcgatcaatcactactagctaacagctggttgttgatcagcttgcaccactgcaatgtggaagaccttcagaaaagaaaaactgcacagtacgggtgatggatggtgaaggatcaatcggttcagttgtgttggtgtttaatttgttcatgacctgcaagagtgtggtttgttgtgtatgatatggcaactgttgttattatctttccatttgcctttgatttgttgaaaacctggagaggtttgtatctgctattattctttggtttgtgtttctatatttggattataaaataaagttgaatatataagtgttcagttctttt

SEQ ID NO: 5512 - protein, 335 aa, Zea mays subsp. mays
  peptide (1)..(335): Ceres Seq. ID no. 12386789
MAAATAPKTMPSSVFAAALLLLAAAACQASPYYPLELGYYRYTCPQAEAIVKASMEKAIAQNPGNGAAVIRMLFHDCFVEGCDASVLLDPTPFSPTPEKLAAPNNPSLRGFELIDAIKDALEAACPGVVSCADIIAFAARDASCFLSQGKVSFDMPSGRLDGTFSNASESVKFLVPPTSNLSDLASSFAVKGMSLEDLVVLSGAHTVGRSHCSSFVSDRLDVPSDINPALAAFLRTRCPPNTTTSDDPTVMQDVVTPNAMDIQYYKNVLSHTVLFTSDAALLTSPETAKLVLDNAKIPGWWEDKFEKAMVKMASLEVKTGHQGQVRKNCRAINHY

SEQ ID NO: 5513 - protein, 326 aa, Zea mays subsp. mays
  peptide (1)..(326): Ceres Seq. ID no. 12386790
MPSSVFAAALLLLAAAACQASPYYPLELGYYRYTCPQAEAIVKASMEKAIAQNPGNGAAVIRMLFHDCFVEGCDASVLLDPTPFSPTPEKLAAPNNPSLRGFELIDAIKDALEAACPGVVSCADIIAFAARDASCFLSQGKVSFDMPSGRLDGTFSNASESVKFLVPPTSNLSDLASSFAVKGMSLEDLVVLSGAHTVGRSHCSSFVSDRLDVPSDINPALAAFLRTRCPPNTTTSDDPTVMQDVVTPNAMDIQYYKNVLSHTVLFTSDAALLTSPETAKLVLDNAKIPGWWEDKFEKAMVKMASLEVKTGHQGQVRKNCRAINHY

SEQ ID NO: 5514 - protein, 281 aa, Zea mays subsp. mays
  peptide (1)..(281): Ceres Seq. ID no. 12386791
MEKAIAQNPGNGAAVIRMLFHDCFVEGCDASVLLDPTPFSPTPEKLAAPNNPSLRGFELIDAIKDALEAACPGVVSCADIIAFAARDASCFLSQGKVSFDMPSGRLDGTFSNASESVKFLVPPTSNLSDLASSFAVKGMSLEDLVVLSGAHTVGRSHCSSFVSDRLDVPSDINPALAAFLRTRCPPNTTTSDDPTVMQDVVTPNAMDIQYYKNVLSHTVLFTSDAALLTSPETAKLVLDNAKIPGWWEDKFEKAMVKMASLEVKTGHQGQVRKNCRAINHY

SEQ ID NO: 5515 - DNA, 1324 bp, Zea mays subsp. mays
  misc_feature (1)..(1324): Ceres Seq. ID no. 13492565
  misc_feature (1)..(1324): Ortholog of  Ceres SEQ ID NO 12624774 as cited in SEQ ID NO 63620
  misc_feature (1)..(1324): Ortholog of  Ceres SEQ ID NO 14307940 as cited in SEQ ID NO 0
  misc_feature (1)..(1324): Ortholog of  Ceres SEQ ID NO 14308560 as cited in SEQ ID NO 0
aacaagaaagcgaccaccgctgtgaatcagcagagctgcagtgagagcaagtgagaggatcagaggaggcatccgtgaccaaagatcgagtagccaagaagaagagagatgaacgccgacttcggcgcgccccaaggagctcgcgggaggcctgcagcagcggcgggccctctaccagccccgcctcccgccatgcctccagggaccgacggtaagggcggagtacggtgacgcgaccacaaccatagatcccacctgtgcccaagccgtcgcgcaggccttcccgcacacctttggccagccgctcgtcagcttcgtcgcgccggccgccggcgccggcgccgttgaggagcgccacccgatcagggtgggcgtggtgttctctgggaggcagtcgccgggagggcacaacgtcgtctggggcctccatgacgcacttaaagcctacaatcctcagagcttgctctacggattcgtcggtggcacggagggactgtttgcaaacaagacgttggagatcacagacgatgttcttgcttcctataagaaccaaggtggtttcgatttgctcggtaggagtatcgatcagatccgcactactaagcaagtgaatgctgcaatgacaacatgccacagtctgaacttggatgggttggtcatcattggaggtgtgacctccaattcagatgctgcacagcttgcggagacccttattcagaataactgtaagaccaaggttgttggtgtgccagtttcattgaatggtgacctcaagaaccagtttgttgaaacaacagttggatttgatacagtatgtaaggttaattcacagcttgtaagcaatgtttgtcttgatgcgatctcagctggaaagtactattattttgttcgtctgatgggacgaaaagcatctcatgttgcctttgaatgtgcacttcaatcacacccaaacatgctcatcttaggcgaggaggtagcattgtcaaaactcacactgatggaaattataagcaagatttgtgatggagtacaagcaagggcaaaattagggaaatatcatggtgtgcttgttattcccgaaggacttatagaaagcattccagaaatgtatgctcttattcaggaaatcaatatccttcacaacagtaatgttcctgtggctgagatgtcatcacaactgtctccgtgggcagctgctctgttccagttcttgccacccttcatcaggagagagctgctgctccaccaagaatcagataactctgcgcagctgtcccaaattgacacggagcaactgctggcccatctagtagaaacagaaatg

SEQ ID NO: 5516 - protein, 235 aa, Zea mays subsp. mays
  peptide (1)..(235): Ceres Seq. ID no. 13492566
MTTCHSLNLDGLVIIGGVTSNSDAAQLAETLIQNNCKTKVVGVPVSLNGDLKNQFVETTVGFDTVCKVNSQLVSNVCLDAISAGKYYYFVRLMGRKASHVAFECALQSHPNMLILGEEVALSKLTLMEIISKICDGVQARAKLGKYHGVLVIPEGLIESIPEMYALIQEINILHNSNVPVAEMSSQLSPWAAALFQFLPPFIRRELLLHQESDNSAQLSQIDTEQLLAHLVETEM

SEQ ID NO: 5517 - protein, 143 aa, Zea mays subsp. mays
  peptide (1)..(143): Ceres Seq. ID no. 13492567
MGRKASHVAFECALQSHPNMLILGEEVALSKLTLMEIISKICDGVQARAKLGKYHGVLVIPEGLIESIPEMYALIQEINILHNSNVPVAEMSSQLSPWAAALFQFLPPFIRRELLLHQESDNSAQLSQIDTEQLLAHLVETEM

SEQ ID NO: 5518 - protein, 124 aa, Zea mays subsp. mays
  peptide (1)..(124): Ceres Seq. ID no. 13492568
MLILGEEVALSKLTLMEIISKICDGVQARAKLGKYHGVLVIPEGLIESIPEMYALIQEINILHNSNVPVAEMSSQLSPWAAALFQFLPPFIRRELLLHQESDNSAQLSQIDTEQLLAHLVETEM

SEQ ID NO: 5519 - DNA, 1553 bp, Zea mays subsp. mays
  misc_feature (1)..(1553): Ceres Seq. ID no. 12350501
  misc_feature (1)..(1553): Ortholog of  Ceres SEQ ID NO 15175507 as cited in SEQ ID NO 20619
  misc_feature (1)..(1553): Ortholog of  Ceres SEQ ID NO 13639663 as cited in SEQ ID NO 57850
  misc_feature (1)..(1553): Ortholog of  Ceres SEQ ID NO 15224330 as cited in SEQ ID NO 58808
  misc_feature (1)..(1553): Ortholog of  Ceres SEQ ID NO 14302150 as cited in SEQ ID NO 0
aaaaaaacttcccctgtcacgagagtacgagaccacgccttccgtgggatcaatcggctagggtttcggagatgttcggccgccgccgaagaagagcgacaacacccggtactacgagatcctgggggtttccaaggacgcgtcacaggatgacctcaagaaggcctaccgcaaggccgccatcaagaaccaccccgacaagggcggcgaccccgagaagttcaaggagctagctcaggcttatgaggtcctcagcgaccctgaaaagagagagatctatgaccagtatggcgaggatgccctcaaggagggaatgggaggcggtggtgggatgcatgatccctttgacatattccagtcattctttggtggtggaagcccttttggaggtggcagcagtaggggcagaaggcaacgacggggagatgatgtggttcatcctctgaaggtttctctggaggatttgtacaatggcacatcaaagaagctctctctgtcccgcaatgtcctctgctccaagtgcaatggtaagggttccaagtctggagcttcgtcgaggtgtgctggttgtcaaggttctggcttcaaggtccaaatccggcagttgggacctggaatgattcagcaaatgcagcatccttgcaatgagtgcaagggttctggagagaccatcagcgataaggatagatgcccacaatgcaaaggtgataaagttgtgccggagaagaaagttcttgaagtggtagttgagaaaggtatgcagaacgggcagaagatcacattccctggcgaagctgatgaagcgcctgatactgccactggagatatcatctttgttctccagcagaaggagcatcccaagttcaagagaaagggcgatgacctcttctacgagcacacactgaccttgactgaatctctgtgtggcttccagtttgttctgactcacttggataacaggcagctgctgatcaaatcgaaccctggcgaagttgtgaagcctgattctttcaaggcaatcaacgatgaaggcatgcccatgtatcagaggcccttcatgaagggcaagctgtacatccacttctcggtggagttcccggactcgttgagcccggagcagtgcaaggccttggaggctgttctcccgcccaagccagtatcacagtacactgacatggagctggacgagtgcgaggagacaatgtcgtacgacgtgaacatcgaagaggagatgcggaggcggcaacagcagcaccaggaggcctacgacgaggatgatgatgtgccaggcggtgggcagagggtgcagtgcgcccagcagtaggcagcttgcggtaagtctacccgcttgtattggcctgatgatacttcggttacacgagtgcagttatcggtctgttagttcaagttctgcgtttggggtgttagatccaccagaattagatttgttcggcaagctacgctcgaatacatctcaatggtgacaccttaatggtgctctgaaaacgtttgctagcttctcatgaagttgacaactcacggcttgtttgtgt

SEQ ID NO: 5520 - protein, 336 aa, Zea mays subsp. mays
  peptide (1)..(336): Ceres Seq. ID no. 12350502
MGGGGGMHDPFDIFQSFFGGGSPFGGGSSRGRRQRRGDDVVHPLKVSLEDLYNGTSKKLSLSRNVLCSKCNGKGSKSGASSRCAGCQGSGFKVQIRQLGPGMIQQMQHPCNECKGSGETISDKDRCPQCKGDKVVPEKKVLEVVVEKGMQNGQKITFPGEADEAPDTATGDIIFVLQQKEHPKFKRKGDDLFYEHTLTLTESLCGFQFVLTHLDNRQLLIKSNPGEVVKPDSFKAINDEGMPMYQRPFMKGKLYIHFSVEFPDSLSPEQCKALEAVLPPKPVSQYTDMELDECEETMSYDVNIEEEMRRRQQQHQEAYDEDDDVPGGGQRVQCAQQ

SEQ ID NO: 5521 - protein, 330 aa, Zea mays subsp. mays
  peptide (1)..(330): Ceres Seq. ID no. 12350503
MHDPFDIFQSFFGGGSPFGGGSSRGRRQRRGDDVVHPLKVSLEDLYNGTSKKLSLSRNVLCSKCNGKGSKSGASSRCAGCQGSGFKVQIRQLGPGMIQQMQHPCNECKGSGETISDKDRCPQCKGDKVVPEKKVLEVVVEKGMQNGQKITFPGEADEAPDTATGDIIFVLQQKEHPKFKRKGDDLFYEHTLTLTESLCGFQFVLTHLDNRQLLIKSNPGEVVKPDSFKAINDEGMPMYQRPFMKGKLYIHFSVEFPDSLSPEQCKALEAVLPPKPVSQYTDMELDECEETMSYDVNIEEEMRRRQQQHQEAYDEDDDVPGGGQRVQCAQQ

SEQ ID NO: 5522 - protein, 235 aa, Zea mays subsp. mays
  peptide (1)..(235): Ceres Seq. ID no. 12350504
MIQQMQHPCNECKGSGETISDKDRCPQCKGDKVVPEKKVLEVVVEKGMQNGQKITFPGEADEAPDTATGDIIFVLQQKEHPKFKRKGDDLFYEHTLTLTESLCGFQFVLTHLDNRQLLIKSNPGEVVKPDSFKAINDEGMPMYQRPFMKGKLYIHFSVEFPDSLSPEQCKALEAVLPPKPVSQYTDMELDECEETMSYDVNIEEEMRRRQQQHQEAYDEDDDVPGGGQRVQCAQQ

SEQ ID NO: 5523 - DNA, 1663 bp, Zea mays subsp. mays
  misc_feature (1)..(1663): Ceres Seq. ID no. 12556784
  misc_feature (1)..(1663): Ortholog of  Ceres SEQ ID NO 14313284 as cited in SEQ ID NO 67146
  misc_feature (1)..(1663): Ortholog of  Ceres SEQ ID NO 14308925 as cited in SEQ ID NO 0
atcgctacccagaaccctagccccctccaaaaacccttgtggcatcgtcatctccattgtccactcgctgccccgcccgagcccccgcttgtttccgcggcctcgccatttgcgtggttgaagaagcgaaagatgctcggcgcctctaggcgatccctcagtgccgccgcccgcagccgcgtggctgccggcgtagcctccgccgtcaccgccgacgcctcagtgccggcccgccccataagtgtagccatcctttttgctttctttattgatggcggttagccatgttaggtgagcaatggagcccgtggggttcctcagcagcagaataggttgctctcagtgcttgtggcacccaagattgcaggaatgagcaatgttgtggccctcaagctgatggatggtgcccttattggtagacgctatgaatcgagtgcagcagcagttgattctacggaccagctagctgagaagcacgagtaccaggctgaggtcaacaggctcatggatttgattgtgcacagcttgtatagtaacaaggaagttttccttcgagaactggtcagcaatgctagtgatgcacttgataagttgcgttatctgagtgtcacggaccctgagcttctgaaggatggtccccaacttgacattcgcattcaatcagacaaggataatggagtaataacaattactgattctgggattggtatgacgaaacaagagcttattgattctcttgggactattgaaagcagtggaactgccaagttccttaaagcattgaaggagagtcaagaagcgggcatggacaacaacttgattggccaatttggtgttggtttctattccacatttcttgtttcagagaaggttgttgtgtcaacaaagagcccaaaatctgacaaacaatatgtttgggaaggacaagcagattctggttcttataccattagagaggaaaaagacccagagaagctaattcctaggggaactcgccttactctctatcttaagcatgatgataagggctttgctcaccctgagaggattcaaaaacttttaaagaattattctcagtttgtttcctttcccatttacacatggcaagagaaaggcttcacaaaagaggtcgaggttgatgaggatccagcggaagccaaaaaaggggatgatgatatcaaaactgagcctaagaaaaagaccaaaaccgttgttgagaagtattgggattgggagctttcaaatgagacacaacctatttggcttcgaaaccctaaagaggtttcaactgaggagtacaatgaattttacaagaaaaccttcaatgagtacttgaatcctttggcctcctcacacttcactacagagggtgaggtagaatttaggtcaattctttatgttcctgctacaaggaaggatgatataactgataataggaagaccaagaatatcagactatatgttaaacgtgtattcatatcggatgactttgatggagaattgttcccaagatatttgagctttgtgaagggtgttgttgactcaaatgaccttccgttgaatgtttctcgtgagattcttcaagaaagtcgaattgttcgtataatgagaaagaggctagtgcggaaagccttcgatatgatacttggcatttcttgcagtg

SEQ ID NO: 5524 - protein, 431 aa, Zea mays subsp. mays
  peptide (1)..(431): Ceres Seq. ID no. 12556785
MSNVVALKLMDGALIGRRYESSAAAVDSTDQLAEKHEYQAEVNRLMDLIVHSLYSNKEVFLRELVSNASDALDKLRYLSVTDPELLKDGPQLDIRIQSDKDNGVITITDSGIGMTKQELIDSLGTIESSGTAKFLKALKESQEAGMDNNLIGQFGVGFYSTFLVSEKVVVSTKSPKSDKQYVWEGQADSGSYTIREEKDPEKLIPRGTRLTLYLKHDDKGFAHPERIQKLLKNYSQFVSFPIYTWQEKGFTKEVEVDEDPAEAKKGDDDIKTEPKKKTKTVVEKYWDWELSNETQPIWLRNPKEVSTEEYNEFYKKTFNEYLNPLASSHFTTEGEVEFRSILYVPATRKDDITDNRKTKNIRLYVKRVFISDDFDGELFPRYLSFVKGVVDSNDLPLNVSREILQESRIVRIMRKRLVRKAFDMILGISCS

SEQ ID NO: 5525 - protein, 422 aa, Zea mays subsp. mays
  peptide (1)..(422): Ceres Seq. ID no. 12556786
MDGALIGRRYESSAAAVDSTDQLAEKHEYQAEVNRLMDLIVHSLYSNKEVFLRELVSNASDALDKLRYLSVTDPELLKDGPQLDIRIQSDKDNGVITITDSGIGMTKQELIDSLGTIESSGTAKFLKALKESQEAGMDNNLIGQFGVGFYSTFLVSEKVVVSTKSPKSDKQYVWEGQADSGSYTIREEKDPEKLIPRGTRLTLYLKHDDKGFAHPERIQKLLKNYSQFVSFPIYTWQEKGFTKEVEVDEDPAEAKKGDDDIKTEPKKKTKTVVEKYWDWELSNETQPIWLRNPKEVSTEEYNEFYKKTFNEYLNPLASSHFTTEGEVEFRSILYVPATRKDDITDNRKTKNIRLYVKRVFISDDFDGELFPRYLSFVKGVVDSNDLPLNVSREILQESRIVRIMRKRLVRKAFDMILGISCS

SEQ ID NO: 5526 - protein, 386 aa, Zea mays subsp. mays
  peptide (1)..(386): Ceres Seq. ID no. 12556787
MDLIVHSLYSNKEVFLRELVSNASDALDKLRYLSVTDPELLKDGPQLDIRIQSDKDNGVITITDSGIGMTKQELIDSLGTIESSGTAKFLKALKESQEAGMDNNLIGQFGVGFYSTFLVSEKVVVSTKSPKSDKQYVWEGQADSGSYTIREEKDPEKLIPRGTRLTLYLKHDDKGFAHPERIQKLLKNYSQFVSFPIYTWQEKGFTKEVEVDEDPAEAKKGDDDIKTEPKKKTKTVVEKYWDWELSNETQPIWLRNPKEVSTEEYNEFYKKTFNEYLNPLASSHFTTEGEVEFRSILYVPATRKDDITDNRKTKNIRLYVKRVFISDDFDGELFPRYLSFVKGVVDSNDLPLNVSREILQESRIVRIMRKRLVRKAFDMILGISCS

SEQ ID NO: 5527 - DNA, 1609 bp, Zea mays subsp. mays
  misc_feature (1)..(1609): Ceres Seq. ID no. 12383197
  misc_feature (1)..(1609): Ortholog of  Ceres SEQ ID NO 15172426 as cited in SEQ ID NO 59156
gcacgagaccattacctagaacatcctaatcgaaaaaaaaactgccaaacactgcacactcgggagtcaggactgggccgtttcagtgtcacttccgccgccttctccctcaatcaagagcgcccgtcccttcgcccgcgcgccccgccatggccgcgccgtgcggccgcggcggcggcacgctgacgctggtcctcgtggctctctccgcggcgttcctcacctacaacgtgctcatctccttccactcctccctccagcccctcccttcctccttccccaccgccaccgcctcccgccgcttcggcgccgcggggtctgccaggcggagggcgttccacaccgcggtgaccgcgtcagggtccgcgtacaacacgtggcagtgccgcgtcatgtaccactggttcaaggaggcgcgccgggcgccgggcggcgacgagatgggcgggttcaccaggatcctgcactccgggaaacccgacgagttcgtcgatgagatccccacattcgtcgccgacccactccccgatggggatcagggatacatcgttctcaataggccatgggcatttgttcagtggctccagaaagcagacataaaggaagactatattttgatggcagagccagatcacataattgtcaagcctatcccaaacttgtcgagagatggtcaggcagcagcttttcctttcttttacattgagcctaaaaaatatgagaatgtgttgcgtaagttcttccctgaagacaaggggtcaatcactaagatcgatcctataggaaactctcctgtcattattgagaaggagtctcttggaaggattgcaccgacttggatgaatgtttcattagcaatgaaaaaagatcctgacgcagataaatcttttggctgggttcttgaaatgtatgcctatgccgtggcatctgctctccatggagtgggcaacatcttacgcaaggactttatgattcagccaccttgggacttggaagttggtgattcttttattattcattatacttatgggtgtgattatgacatgacgggtaagctgacttatggcaaaattggtgaatggagatttgacaagagatcatacacggacaaacctccacctagaaatttgccgttaccaccacatggtgtagctcaaagtgtggtgacacttgtgaaaatggtcaatgaagcaacagccaacataccaaactgggactcctatgccgctgctttttaacctgttataaatttggctcacaattttgtttgccagatatttccattccagctgactttgatacatgataattgcctaacatggaagatgagtggatgatacagtggaatgcataccaggttttacacaaggctgccggttccttacctttctgattgaatcctgataatatatggtgcaatgccatccctttccccccctaattttgttaaacacatgcacatcagcacatggcacaatatgtcaaaacacactcacctttggtgaaagctgcaatgtagatgactgagagatgtgatgttcttatctggatctgaatgtgcttattagaagaagaaaaaaaagagtcaggcgctgctctgacaaacgct

SEQ ID NO: 5528 - protein, 362 aa, Zea mays subsp. mays
  peptide (1)..(362): Ceres Seq. ID no. 12383198
MAAPCGRGGGTLTLVLVALSAAFLTYNVLISFHSSLQPLPSSFPTATASRRFGAAGSARRRAFHTAVTASGSAYNTWQCRVMYHWFKEARRAPGGDEMGGFTRILHSGKPDEFVDEIPTFVADPLPDGDQGYIVLNRPWAFVQWLQKADIKEDYILMAEPDHIIVKPIPNLSRDGQAAAFPFFYIEPKKYENVLRKFFPEDKGSITKIDPIGNSPVIIEKESLGRIAPTWMNVSLAMKKDPDADKSFGWVLEMYAYAVASALHGVGNILRKDFMIQPPWDLEVGDSFIIHYTYGCDYDMTGKLTYGKIGEWRFDKRSYTDKPPPRNLPLPPHGVAQSVVTLVKMVNEATANIPNWDSYAAAF

SEQ ID NO: 5529 - protein, 281 aa, Zea mays subsp. mays
  peptide (1)..(281): Ceres Seq. ID no. 12383199
MYHWFKEARRAPGGDEMGGFTRILHSGKPDEFVDEIPTFVADPLPDGDQGYIVLNRPWAFVQWLQKADIKEDYILMAEPDHIIVKPIPNLSRDGQAAAFPFFYIEPKKYENVLRKFFPEDKGSITKIDPIGNSPVIIEKESLGRIAPTWMNVSLAMKKDPDADKSFGWVLEMYAYAVASALHGVGNILRKDFMIQPPWDLEVGDSFIIHYTYGCDYDMTGKLTYGKIGEWRFDKRSYTDKPPPRNLPLPPHGVAQSVVTLVKMVNEATANIPNWDSYAAAF

SEQ ID NO: 5530 - protein, 265 aa, Zea mays subsp. mays
  peptide (1)..(265): Ceres Seq. ID no. 12383200
MGGFTRILHSGKPDEFVDEIPTFVADPLPDGDQGYIVLNRPWAFVQWLQKADIKEDYILMAEPDHIIVKPIPNLSRDGQAAAFPFFYIEPKKYENVLRKFFPEDKGSITKIDPIGNSPVIIEKESLGRIAPTWMNVSLAMKKDPDADKSFGWVLEMYAYAVASALHGVGNILRKDFMIQPPWDLEVGDSFIIHYTYGCDYDMTGKLTYGKIGEWRFDKRSYTDKPPPRNLPLPPHGVAQSVVTLVKMVNEATANIPNWDSYAAAF

SEQ ID NO: 5531 - DNA, 1193 bp, Zea mays subsp. mays
  misc_feature (1)..(1193): Ceres Seq. ID no. 13492090
  misc_feature (1)..(1193): Ortholog of  Ceres SEQ ID NO 13585282 as cited in SEQ ID NO 63378
aactaatcgaaaaaaagttggctcacagaacacagcgcccgcccggacgcaaggggcacgagggagaagcgaggaacggcggcggcggcatcatggcggcgcggaacatccttcgcggtgcggcatgcggccaccgcttcctcgtgcccgtcccctcaggcgctcttgctggttctggaagccggagcatcggcgccgtcgctcagggccttcgtcattacgcagcagacgaagcagtgggaaacttggaactgcatgcacccaaggcaaaacgtcggtcatatatcccaacgaaaaatggaacagccatgatgcttccgctccatattcattacgaagatgtactacgtcaggatctgttgctcaaacagaatcatgccaatatcatgcaagttccagggttgtttgaggtcaaattagcaccaaaagccggctctgatctcaagatcccaattgggaaaatggccatggaggttttgagtggtcagagattcaaagaggcaaaaattgaccctttcgccaaagcaagaaagtcttctcgaaccaatccatttattggggccgacaaggacggtagcactgtcttcgcgcaaccaaccgttcttcgagggcatgcaatgtacaactttttggtgaggatgctgacagtgatgtccatgttaaattctcgggccgacattcgggagaacactgtgaagttcttcatggaaacggagttctgtgagttctctccagaattggaagaccatttcgagatatttgagcacatccgaggtttcaatgtgactatcgttacttcagccaatacaaaagatgagacctcactgctgtggagtggcttcatgctgaatgacgagggagagaccaagtaaggtagaactgttgatctttgtttctgcttaatctccctgatattgtagttgctgcccaactggaccttcagttggctgttgatgtcaaaaatgattttggaaatttggtgcttcgtgctctaggagtgcgcaatgtcgcagccttctgttttgtagactgaatgagatgacgtgattgtttttcatcttgacgcgtggagctcatgtttgataactacgtctagtaccatgtatgaacataataatcttggtctaataagcattgttttgcttattcctgtggttcctgctatagtaacatggaatgctcgtttctgtttg

SEQ ID NO: 5532 - protein, 289 aa, Zea mays subsp. mays
  peptide (1)..(289): Ceres Seq. ID no. 13492091
LIEKKLAHRTQRPPGRKGHEGEARNGGGGIMAARNILRGAACGHRFLVPVPSGALAGSGSRSIGAVAQGLRHYAADEAVGNLELHAPKAKRRSYIPTKNGTAMMLPLHIHYEDVLRQDLLLKQNHANIMQVPGLFEVKLAPKAGSDLKIPIGKMAMEVLSGQRFKEAKIDPFAKARKSSRTNPFIGADKDGSTVFAQPTVLRGHAMYNFLVRMLTVMSMLNSRADIRENTVKFFMETEFCEFSPELEDHFEIFEHIRGFNVTIVTSANTKDETSLLWSGFMLNDEGETK

SEQ ID NO: 5533 - protein, 259 aa, Zea mays subsp. mays
  peptide (1)..(259): Ceres Seq. ID no. 13492092
MAARNILRGAACGHRFLVPVPSGALAGSGSRSIGAVAQGLRHYAADEAVGNLELHAPKAKRRSYIPTKNGTAMMLPLHIHYEDVLRQDLLLKQNHANIMQVPGLFEVKLAPKAGSDLKIPIGKMAMEVLSGQRFKEAKIDPFAKARKSSRTNPFIGADKDGSTVFAQPTVLRGHAMYNFLVRMLTVMSMLNSRADIRENTVKFFMETEFCEFSPELEDHFEIFEHIRGFNVTIVTSANTKDETSLLWSGFMLNDEGETK

SEQ ID NO: 5534 - protein, 187 aa, Zea mays subsp. mays
  peptide (1)..(187): Ceres Seq. ID no. 13492093
MMLPLHIHYEDVLRQDLLLKQNHANIMQVPGLFEVKLAPKAGSDLKIPIGKMAMEVLSGQRFKEAKIDPFAKARKSSRTNPFIGADKDGSTVFAQPTVLRGHAMYNFLVRMLTVMSMLNSRADIRENTVKFFMETEFCEFSPELEDHFEIFEHIRGFNVTIVTSANTKDETSLLWSGFMLNDEGETK

SEQ ID NO: 5535 - DNA, 2053 bp, Zea mays subsp. mays
  misc_feature (1)..(2053): Ceres Seq. ID no. 13577863
  misc_feature (1)..(2053): Ortholog of  Ceres SEQ ID NO 14310841 as cited in SEQ ID NO 53666
  misc_feature (1)..(2053): Ortholog of  Ceres SEQ ID NO 15178736 as cited in SEQ ID NO 56439
  misc_feature (1)..(2053): Ortholog of  Ceres SEQ ID NO 14308493 as cited in SEQ ID NO 60320
actagaacaccttggtggcctccgcgtctcgccgcctccccggactccgcatccagccccggcactcgcactcccaaagcagcggacactagtagggtttaaactttccccccgatccgcctcgcctccggnctgtcgcctgccgccagaccaacgcccccacacccagccggagacgacgatggtggggctcggctcgatggcgggctatgggatccagtcgatgctcaaggaaggccaccgccacctctccgggctcgaggaggccgtgctcaagaacatcgacgcctgccgcgagctctccgccatcacgcgcacatccctgggccccaacggaatgaacaagatggttatcaatcacttggacaagctgtttgtcacaaacgatgctgccaccatcgtgaatgagcttgaggttcagcacccggctgctaaaatcctggtactggctgccaaggctcaacaggaggagattggggatggagccaatctcaccatatcgtttgctggtgaactgnttgagaaggctgaggagctcatcaggatgggcttgcatccgagtgagatcatcattggctacaccaaagccatcaacaagacaattgaaattttagaggatcttgttgagaaaggctcanagaacatggacgtaagaaacaaggaggatgttgtgttgaggatgagatctgctgtcgcaagcaagcagtttggccaggaggatatgctgtgccctcttgtggctgatgcctgcattcaagtttgccccaaaaatcctgcaaactttaatgttgacaatgttagagtggctaagctacttggaggtggtttgcacaattcttctgtggtccgtgggatggttctgaaaaatgatgctgttggtagcatcaaaagggcggagaaggcaaagattgtcgtatttgctggtggtgtcgacacctcggcaactgaaacaaagggaaccgtgttgatccattccgctgagcagctagaaaattatgctaagaccgaggaagctaaggtggaggagcttatcaaagctgtcgctgactctggtgccaaggttattgtcagtggagctgcagtggggtgacatggcacttcatttctgtgaacgttataagctgatggttctgaaaatcagctcgaagtttgaactaagaaggttctgccgtactactggggctgttgcaattttgaaacttagccaacccaatgcggacgaactaggatacgcagattctgtttctgtagaagaaattggtggtactcgggttactgtcgtcaagaacgaagatggtggaaattcagtggctactgttgtcctgagaggcagtactgacagtatactagatgatcttgaaagagctgttgatgatggcgtcaatacatacaggtcaatgtgcagggacagtaggataattcctggtgctgctgcaacagaagttgagctggcaaagagattgaaggagttctctttgaaggaaacagggttggaccagtatgccattgcgaaatttgctgaaagctttgaaatggttccaagaaccctggcagaaaatgctggacttagcgcaatggagataatatcctctctttatgctgagcatgctagtggcaatgcgaaagttggcattgatctggaggaagncgcctgcaaggacatctcgactttaaaaatatgggacctctatgtcacaaagttttttgccctaaaatactctgccgatgctgcttgcacggtgctgcgggttgaccagatcattatggcaaagccggcaggaggtccaagaagagatgcccagcctggtggcgggatggacgaggattagtttgattatagttgttttctttgtatcacgtatgtgaggtttcagagcagagatcatactttatcttggcttttggttctgtagaaggtttgggtgcctggagttcacttttggaaggtctgcacggttgcgcggatatcacataggcaatttgtatgttttttcctggtgtattgcggtgcggatgtatcaaatgattcattacaggggccgttccgtcagtt

SEQ ID NO: 5536 - protein, 362 aa, Zea mays subsp. mays
  peptide (1)..(362): Ceres Seq. ID no. 13577864
  misc_feature (44)..(44): Xaa is any aa, unknown or other
  misc_feature (173)..(173): Xaa is any aa, unknown or other
  misc_feature (213)..(213): Xaa is any aa, unknown or other
LEHLGGLRVSPPPRTPHPAPALALPKQRTLVGFKLSPRSASPPXCRLPPDQRPHTQPETTMVGLGSMAGYGIQSMLKEGHRHLSGLEEAVLKNIDACRELSAITRTSLGPNGMNKMVINHLDKLFVTNDAATIVNELEVQHPAAKILVLAAKAQQEEIGDGANLTISFAGELXEKAEELIRMGLHPSEIIIGYTKAINKTIEILEDLVEKGSXNMDVRNKEDVVLRMRSAVASKQFGQEDMLCPLVADACIQVCPKNPANFNVDNVRVAKLLGGGLHNSSVVRGMVLKNDAVGSIKRAEKAKIVVFAGGVDTSATETKGTVLIHSAEQLENYAKTEEAKVEELIKAVADSGAKVIVSGAAVG

SEQ ID NO: 5537 - protein, 302 aa, Zea mays subsp. mays
  peptide (1)..(302): Ceres Seq. ID no. 13577865
  misc_feature (113)..(113): Xaa is any aa, unknown or other
  misc_feature (153)..(153): Xaa is any aa, unknown or other
MVGLGSMAGYGIQSMLKEGHRHLSGLEEAVLKNIDACRELSAITRTSLGPNGMNKMVINHLDKLFVTNDAATIVNELEVQHPAAKILVLAAKAQQEEIGDGANLTISFAGELXEKAEELIRMGLHPSEIIIGYTKAINKTIEILEDLVEKGSXNMDVRNKEDVVLRMRSAVASKQFGQEDMLCPLVADACIQVCPKNPANFNVDNVRVAKLLGGGLHNSSVVRGMVLKNDAVGSIKRAEKAKIVVFAGGVDTSATETKGTVLIHSAEQLENYAKTEEAKVEELIKAVADSGAKVIVSGAAVG

SEQ ID NO: 5538 - protein, 296 aa, Zea mays subsp. mays
  peptide (1)..(296): Ceres Seq. ID no. 13577866
  misc_feature (107)..(107): Xaa is any aa, unknown or other
  misc_feature (147)..(147): Xaa is any aa, unknown or other
MAGYGIQSMLKEGHRHLSGLEEAVLKNIDACRELSAITRTSLGPNGMNKMVINHLDKLFVTNDAATIVNELEVQHPAAKILVLAAKAQQEEIGDGANLTISFAGELXEKAEELIRMGLHPSEIIIGYTKAINKTIEILEDLVEKGSXNMDVRNKEDVVLRMRSAVASKQFGQEDMLCPLVADACIQVCPKNPANFNVDNVRVAKLLGGGLHNSSVVRGMVLKNDAVGSIKRAEKAKIVVFAGGVDTSATETKGTVLIHSAEQLENYAKTEEAKVEELIKAVADSGAKVIVSGAAVG

SEQ ID NO: 5539 - DNA, 1667 bp, Zea mays subsp. mays
  misc_feature (1)..(1667): Ceres Seq. ID no. 12408225
  misc_feature (1)..(1667): Ortholog of  Ceres SEQ ID NO 14316204 as cited in SEQ ID NO 59644
acaccaatcctcatcacctccgagattttcatcgcctgccgcgcaatctcgggatcctagccgtccgcacatcgccgcggccttcctccgcgccacgaatggtgttctctggccgctgtcttttcccgaggacctaacccaaggcggtaggtaccagctaaaagtctaaaggcgaccaccggaccgggcggcaatgacgaccgccgcgagggagaggcgcctgccgccgacgctgcccctggccacgcttatcggtcgcgagctccgtgcggggggctccgagcgcccggccctgcgctacggccacgccggcttcgccaagcgcggcgaggactacttcctcgtcaagcccgactgcgtccgcgtccccggggaccccgcatcggcgttctcagttttcgccgtgttcgacggccacaacggcgtgtcggcggcggtctatagcaaagagcatctgctcgagcacgtcatgagcgcgctgccgccggacatcgggcgcgacgactggctgcaggcgctgccgcgcgctctcgtcgccggctttgtcaaggccgacattgatttccagcgcaagggggaggtgtcaggaaccacggcgacactggtggtcatcgatgggttcacggtcacagtggcgtcggtgggagactcgcgctgcatcctggacacgcagggcggcgagttgcagctgctaaccgtggaccaccgcctggaggagaatgcagaggagcgggagcgcgtcacggccagcggtggggaagtaggccggctcaatctcttcggtggtcaggaggttggtcctctccggtgctggcctggtggcttgtgcctttcaagatccattggggacatggatgttggggagtacattgtgcccattccacatgtcaagcaagtcaagctatcaaacgctggaggaaggctgataatagcatccgatggcatatgggatgcattatccaatgaagcagctgcaaaagcatgcagaggattgcctgcagaactggcagcgaagcttgtcgttaagcaagctctgaaaacaagcgggctaaaggatgacaccacctgtgttgtagttgacattatcccatccgatcatttgacatcaccacaattgtctccaaagaaaaatcataacaagttgaagtcactttttcgtagaaggtcgcatagttctgttggaaagctcgggggcaagtctgcctccattggttctgtggaggagttatttgaagaaggctctgcaatgttagaagaaaggttgggcaggaatttgtctttgaaagcagtttcagcaccttttcgctgtgcaatctgccaagtggaccaagagcccttcgaagatttgatgagagataatggaggtggttactgctcttccccatgcgctccatggggtggtccatatctctgtttggactgtcggaaaaagaaagatgcaatggaaggtaaaagatctagctgctccacagcatgcaggtgaaacagtccttgcctcaagcagaaaagaaccgatgagagaggataataagttgctggacccaagtataattgtttgctgaaactaactgtattgccagcccggtaaaagacatatttggctggtagtaagacctaactagtctgttacctgcgcacaatccgaatggaaaagtttgttgtcgtcg

SEQ ID NO: 5540 - protein, 429 aa, Zea mays subsp. mays
  peptide (1)..(429): Ceres Seq. ID no. 12408226
MTTAARERRLPPTLPLATLIGRELRAGGSERPALRYGHAGFAKRGEDYFLVKPDCVRVPGDPASAFSVFAVFDGHNGVSAAVYSKEHLLEHVMSALPPDIGRDDWLQALPRALVAGFVKADIDFQRKGEVSGTTATLVVIDGFTVTVASVGDSRCILDTQGGELQLLTVDHRLEENAEERERVTASGGEVGRLNLFGGQEVGPLRCWPGGLCLSRSIGDMDVGEYIVPIPHVKQVKLSNAGGRLIIASDGIWDALSNEAAAKACRGLPAELAAKLVVKQALKTSGLKDDTTCVVVDIIPSDHLTSPQLSPKKNHNKLKSLFRRRSHSSVGKLGGKSASIGSVEELFEEGSAMLEERLGRNLSLKAVSAPFRCAICQVDQEPFEDLMRDNGGGYCSSPCAPWGGPYLCLDCRKKKDAMEGKRSSCSTACR

SEQ ID NO: 5541 - protein, 337 aa, Zea mays subsp. mays
  peptide (1)..(337): Ceres Seq. ID no. 12408227
MSALPPDIGRDDWLQALPRALVAGFVKADIDFQRKGEVSGTTATLVVIDGFTVTVASVGDSRCILDTQGGELQLLTVDHRLEENAEERERVTASGGEVGRLNLFGGQEVGPLRCWPGGLCLSRSIGDMDVGEYIVPIPHVKQVKLSNAGGRLIIASDGIWDALSNEAAAKACRGLPAELAAKLVVKQALKTSGLKDDTTCVVVDIIPSDHLTSPQLSPKKNHNKLKSLFRRRSHSSVGKLGGKSASIGSVEELFEEGSAMLEERLGRNLSLKAVSAPFRCAICQVDQEPFEDLMRDNGGGYCSSPCAPWGGPYLCLDCRKKKDAMEGKRSSCSTACR

SEQ ID NO: 5542 - DNA, 1376 bp, Zea mays subsp. mays
  misc_feature (1)..(1376): Ceres Seq. ID no. 13491083
  misc_feature (1)..(1376): Ortholog of  Ceres SEQ ID NO 12590227 as cited in SEQ ID NO 681
atggaaaggctgggtggagtctcgccttcgcactcttgtattaaagattgagcgttattcacacgagatgatccttgcacacccatatcccaaagatttctcagacaaatccaggcccttacattgcttttacttcatgggtctttggagaaaacaaaccacccaagctcaagaagctgagcaatttgatatcaggggaattgtaaatgagtttaggaatactatttgtgcatatcaacattggaaagaaggaatggacattgaagtgtcccatgtaaaaagaaaagaaatccctttgtttgtttttcctggcggagtgcgtccttctcgtacttctagaacaacgcacaagaacagccgtgccattccaacacgtgatgtttcagctgatgatcaagtgggaaacctattgggcgttgccagttgtagtgatgctcaacatgtaccatgtaaaggcagctatatgaaacaaccagaaccagattttgctggaggctttcagttgccaggaagtatttctctgttgccccctagcttacccaataaagtagttctgaatgggtctgctaattttcatgcagaatctattgagagtgaacatccagaacactatcaggaaagtaagtttgtggctgtgcagaataccgtgtgccttgtagtcaagcaacctaacagtttgctcccaaattcaaacaacaattcacaattgtatggatctgattcctctcttaacagttcaaaaagggaatgtgcaggcagtgctgcaaacaacttgctgaagttatccccagctattccagccacacctgatgaacttgatgagctgatatcctatcaaactaatcagaaagatgtaaatgctgaaaataacttggagatcggttctgaaaataacttggaacaaatatgcagtctgaggccccaagaatctaataataatctgaagcgtaaagccaatcaagagctcgagccacttgagcttgccgtcccatccactggtgctgcgccgcaatcgacaggaactgccccaagaaaaccactcaggttgaggttaacgactttggggaaaccgaagccagctgaaggaacttcctgaatggaattgcccaggagccaacatacctagagcttgtttttccttgtattgaagcaaggatatgtggaagcgctcggcacatagcctgctttggcactgcgagttgaaacgaaatggaaaacggaggccgcctgacgtaaatgagtgcgattgtaataaattgtatgtagttcatagctgggttggtatcagagttcaccatttcgtttttgctgtagcgaatttcgtttttttaaccaaagtttgactcttatattttttgaatttggaaccaaaatcc

SEQ ID NO: 5543 - protein, 364 aa, Zea mays subsp. mays
  peptide (1)..(364): Ceres Seq. ID no. 13491084
WKGWVESRLRTLVLKIERYSHEMILAHPYPKDFSDKSRPLHCFYFMGLWRKQTTQAQEAEQFDIRGIVNEFRNTICAYQHWKEGMDIEVSHVKRKEIPLFVFPGGVRPSRTSRTTHKNSRAIPTRDVSADDQVGNLLGVASCSDAQHVPCKGSYMKQPEPDFAGGFQLPGSISLLPPSLPNKVVLNGSANFHAESIESEHPEHYQESKFVAVQNTVCLVVKQPNSLLPNSNNNSQLYGSDSSLNSSKRECAGSAANNLLKLSPAIPATPDELDELISYQTNQKDVNAENNLEIGSENNLEQICSLRPQESNNNLKRKANQELEPLELAVPSTGAAPQSTGTAPRKPLRLRLTTLGKPKPAEGTS

SEQ ID NO: 5544 - protein, 342 aa, Zea mays subsp. mays
  peptide (1)..(342): Ceres Seq. ID no. 13491085
MILAHPYPKDFSDKSRPLHCFYFMGLWRKQTTQAQEAEQFDIRGIVNEFRNTICAYQHWKEGMDIEVSHVKRKEIPLFVFPGGVRPSRTSRTTHKNSRAIPTRDVSADDQVGNLLGVASCSDAQHVPCKGSYMKQPEPDFAGGFQLPGSISLLPPSLPNKVVLNGSANFHAESIESEHPEHYQESKFVAVQNTVCLVVKQPNSLLPNSNNNSQLYGSDSSLNSSKRECAGSAANNLLKLSPAIPATPDELDELISYQTNQKDVNAENNLEIGSENNLEQICSLRPQESNNNLKRKANQELEPLELAVPSTGAAPQSTGTAPRKPLRLRLTTLGKPKPAEGTS

SEQ ID NO: 5545 - protein, 319 aa, Zea mays subsp. mays
  peptide (1)..(319): Ceres Seq. ID no. 13491086
MGLWRKQTTQAQEAEQFDIRGIVNEFRNTICAYQHWKEGMDIEVSHVKRKEIPLFVFPGGVRPSRTSRTTHKNSRAIPTRDVSADDQVGNLLGVASCSDAQHVPCKGSYMKQPEPDFAGGFQLPGSISLLPPSLPNKVVLNGSANFHAESIESEHPEHYQESKFVAVQNTVCLVVKQPNSLLPNSNNNSQLYGSDSSLNSSKRECAGSAANNLLKLSPAIPATPDELDELISYQTNQKDVNAENNLEIGSENNLEQICSLRPQESNNNLKRKANQELEPLELAVPSTGAAPQSTGTAPRKPLRLRLTTLGKPKPAEGTS

SEQ ID NO: 5546 - DNA, 1807 bp, Zea mays subsp. mays
  misc_feature (1)..(1807): Ceres Seq. ID no. 12352361
  misc_feature (1)..(1807): Ortholog of  Ceres SEQ ID NO 14303604 as cited in SEQ ID NO 62525
  misc_feature (1)..(1807): Ortholog of  Ceres SEQ ID NO 13657519 as cited in SEQ ID NO 65908
gcgaagaggggcagagggcagcaagcagccgttcccccaaaaaaggccagagctcagcagagccccgcaggccgcacccaccagaaaccccagtcgatcggcggcggcgatgtcgctgtcctcggtgaagatcggcgaggaggtttggctcacatgcctctcccacgccctcactaccgagaccgaggaggtcatgggcctcctcctcggcgacatcgagctttccagcaagggcgccaccgcccttatatggggagcgtctccgcagatgaggtgcgagcggaagaaggaccgcgtcgaggtcaacccggatcttctcgccgccgcatccgcgcaagccgacaaaatgacggccaccatcaagaagactacgagggtgatcggatggtaccactcgcacccacatatcactgttctgccgtcccatgtagatgttcgtacccaagcgatgtttcagttgctggatacaggctttgtgggccttatattttcttgttttagtgaagatgctcaaaaggttggaaaaatccaagtgactgcctttcagtcagagggtggacaacagcatgcccttcctcttgccattgctccagttattgaccttgattcatcccttagttcatcagataatgcactcacttcacattctgcattggttgaaggcatggaacaggacacaggggattccagggcctcaaagcataacaaggcctggaaaagatctttggatttctactctcatcctgacacaaatcattccacgaattatcaacccaatgaaaacactctcgctctgtacaatcctgataacacacaagaagcgcctgttgatccatacgattcagatatgactcaaagcctccaggaggctttgcaccggtcaactatggacataagtggtgcagagtatagagggaaggaggtgccactttttgtgctcccgacaaggtatctcctcaagctggacaccacgatgacctcgtactgtgatatgcaacgagtcctgtttgaagaggagcaatcagcatataatcaagctatgcaacaaaatatttgtgatgggaaaattcaccctcttacatccattcactgtacgtctacatacaactcctctctatgcaaactaatggagtattgtttgagtccagctgttattacgcttcaggatcgcctgaaggaaaatgaacttcggctatctatgttaaaagaggagtgtaagcaacttgaggctgatacccaaggcatgagaaatggttctcctcgtcgcctcatgaatcacggagctggtggcagcggttcacctatggctcagagcaggcatcctttctccagccaagggagccctagaagcccgagcggcggcagccggaggagggcttgatgatgatcttgctccgcctgatgcgttgatgaactgtccgttgtggcttaaccagatgcttcctgaaaacccagatatttgacggacgaagtgcccagacaacagacactgtacctgtacatacccattgccgttcagcgctgtgctattgtggaactccaacggtctcattgtgtttttttgtagtattgggggcgttccttatcctgttgccggagctgtgccattatcctttccctggttcatggttggcatgagcttttatagcctgtacactgtagactctgtactagaggttttccagaaaggctgaactgccgctgctgggatgtgttgttccgggcatatgcaaagatgaaggctttctttgcttttgtaattgaaaaaaaaaccgacttcggtagcaatacattttcttgaaatgcc

SEQ ID NO: 5547 - protein, 459 aa, Zea mays subsp. mays
  peptide (1)..(459): Ceres Seq. ID no. 12352362
RRGAEGSKQPFPQKRPELSRAPQAAPTRNPSRSAAAMSLSSVKIGEEVWLTCLSHALTTETEEVMGLLLGDIELSSKGATALIWGASPQMRCERKKDRVEVNPDLLAAASAQADKMTATIKKTTRVIGWYHSHPHITVLPSHVDVRTQAMFQLLDTGFVGLIFSCFSEDAQKVGKIQVTAFQSEGGQQHALPLAIAPVIDLDSSLSSSDNALTSHSALVEGMEQDTGDSRASKHNKAWKRSLDFYSHPDTNHSTNYQPNENTLALYNPDNTQEAPVDPYDSDMTQSLQEALHRSTMDISGAEYRGKEVPLFVLPTRYLLKLDTTMTSYCDMQRVLFEEEQSAYNQAMQQNICDGKIHPLTSIHCTSTYNSSLCKLMEYCLSPAVITLQDRLKENELRLSMLKEECKQLEADTQGMRNGSPRRLMNHGAGGSGSPMAQSRHPFSSQGSPRSPSGGSRRRA

SEQ ID NO: 5548 - protein, 423 aa, Zea mays subsp. mays
  peptide (1)..(423): Ceres Seq. ID no. 12352363
MSLSSVKIGEEVWLTCLSHALTTETEEVMGLLLGDIELSSKGATALIWGASPQMRCERKKDRVEVNPDLLAAASAQADKMTATIKKTTRVIGWYHSHPHITVLPSHVDVRTQAMFQLLDTGFVGLIFSCFSEDAQKVGKIQVTAFQSEGGQQHALPLAIAPVIDLDSSLSSSDNALTSHSALVEGMEQDTGDSRASKHNKAWKRSLDFYSHPDTNHSTNYQPNENTLALYNPDNTQEAPVDPYDSDMTQSLQEALHRSTMDISGAEYRGKEVPLFVLPTRYLLKLDTTMTSYCDMQRVLFEEEQSAYNQAMQQNICDGKIHPLTSIHCTSTYNSSLCKLMEYCLSPAVITLQDRLKENELRLSMLKEECKQLEADTQGMRNGSPRRLMNHGAGGSGSPMAQSRHPFSSQGSPRSPSGGSRRRA

SEQ ID NO: 5549 - protein, 395 aa, Zea mays subsp. mays
  peptide (1)..(395): Ceres Seq. ID no. 12352364
MGLLLGDIELSSKGATALIWGASPQMRCERKKDRVEVNPDLLAAASAQADKMTATIKKTTRVIGWYHSHPHITVLPSHVDVRTQAMFQLLDTGFVGLIFSCFSEDAQKVGKIQVTAFQSEGGQQHALPLAIAPVIDLDSSLSSSDNALTSHSALVEGMEQDTGDSRASKHNKAWKRSLDFYSHPDTNHSTNYQPNENTLALYNPDNTQEAPVDPYDSDMTQSLQEALHRSTMDISGAEYRGKEVPLFVLPTRYLLKLDTTMTSYCDMQRVLFEEEQSAYNQAMQQNICDGKIHPLTSIHCTSTYNSSLCKLMEYCLSPAVITLQDRLKENELRLSMLKEECKQLEADTQGMRNGSPRRLMNHGAGGSGSPMAQSRHPFSSQGSPRSPSGGSRRRA

SEQ ID NO: 5550 - DNA, 1070 bp, Zea mays subsp. mays
  misc_feature (1)..(1070): Ceres Seq. ID no. 12409467
  misc_feature (1)..(1070): Ortholog of  Ceres SEQ ID NO 13595341 as cited in SEQ ID NO 56398
  misc_feature (1)..(1070): Ortholog of  Ceres SEQ ID NO 15173764 as cited in SEQ ID NO 57550
  misc_feature (1)..(1070): Ortholog of  Ceres SEQ ID NO 15227118 as cited in SEQ ID NO 59038
  misc_feature (1)..(1070): Ortholog of  Ceres SEQ ID NO 13597299 as cited in SEQ ID NO 63785
  misc_feature (1)..(1070): Ortholog of  Ceres SEQ ID NO 13663895 as cited in SEQ ID NO 66923
aaataaaacacagcctcacgatccccgcactgcccggtgccccgcgagctgctcctctacacacgccagcgagaaccagcccaccccacctgctcgatcggcgcaccgtcccgcaggccgcagggccgtcgtcagccatgatccagctcctgttctcgctgctggccgcggaggcggcgctggtgctggcgctgctcttccccacgcccgtgcgccgcctggctctgctcgccatcgatcgcgccaagagggggcgcggacccgtcatggccaagaccatcgcgggcaccatgctcctcgtactagtctctgctttctacagcgtcgctaagatccgccgccgcgagggggagctcggacagctcacgcccaccgaccaggtgctcgccagtcgccacctcctcgaggcgtcgctcatgggatactctctgtttcttggattaattattgaccgattacatcactatattagagagttgagaatgttgaggaaagacatggaggctgtaacagagcagggccggacactagaagcagcaaaatccggaagcactgacgagattcaaggataccagaaagaggttgcgagtttgaaggaacaagtgcaagagctccagaaccaatcacaaaagaaaacagagcgactaaaaaccgccgaagcaaattctgtagctttacagaaacaatcggaaggtttactcgctgaatatgaccgtctcattgcggagaacagggatttgagggaccaactgcagtcaattgacctccgcctgtcccattctggcggaaagaagaactcgtaaagcaagttctgcaattttgaagagcatgattttctgtagattttcttccaataggttaactgtactcggttttctctattatcataatcgcccatgtaattcagtagatggatttgcctatgtaattcagtagatgcgtgcgtgtatgtatgagtggaccatttaatgctttatggactgggtggcatggactcagacccggcatttggccatagtttatggcctaacgtcttggttcagtgagatcaaataagaacctgcatcttc

SEQ ID NO: 5551 - protein, 266 aa, Zea mays subsp. mays
  peptide (1)..(266): Ceres Seq. ID no. 12409468
IKHSLTIPALPGAPRAAPLHTPARTSPPHLLDRRTVPQAAGPSSAMIQLLFSLLAAEAALVLALLFPTPVRRLALLAIDRAKRGRGPVMAKTIAGTMLLVLVSAFYSVAKIRRREGELGQLTPTDQVLASRHLLEASLMGYSLFLGLIIDRLHHYIRELRMLRKDMEAVTEQGRTLEAAKSGSTDEIQGYQKEVASLKEQVQELQNQSQKKTERLKTAEANSVALQKQSEGLLAEYDRLIAENRDLRDQLQSIDLRLSHSGGKKNS

SEQ ID NO: 5552 - protein, 221 aa, Zea mays subsp. mays
  peptide (1)..(221): Ceres Seq. ID no. 12409469
MIQLLFSLLAAEAALVLALLFPTPVRRLALLAIDRAKRGRGPVMAKTIAGTMLLVLVSAFYSVAKIRRREGELGQLTPTDQVLASRHLLEASLMGYSLFLGLIIDRLHHYIRELRMLRKDMEAVTEQGRTLEAAKSGSTDEIQGYQKEVASLKEQVQELQNQSQKKTERLKTAEANSVALQKQSEGLLAEYDRLIAENRDLRDQLQSIDLRLSHSGGKKNS

SEQ ID NO: 5553 - protein, 178 aa, Zea mays subsp. mays
  peptide (1)..(178): Ceres Seq. ID no. 12409470
MAKTIAGTMLLVLVSAFYSVAKIRRREGELGQLTPTDQVLASRHLLEASLMGYSLFLGLIIDRLHHYIRELRMLRKDMEAVTEQGRTLEAAKSGSTDEIQGYQKEVASLKEQVQELQNQSQKKTERLKTAEANSVALQKQSEGLLAEYDRLIAENRDLRDQLQSIDLRLSHSGGKKNS

SEQ ID NO: 5554 - DNA, 1545 bp, Zea mays subsp. mays
  misc_feature (1)..(1545): Ceres Seq. ID no. 12343144
  misc_feature (1)..(1545): Ortholog of  Ceres SEQ ID NO 13623732 as cited in SEQ ID NO 0
agccttccaatctctaggagaaacgtcttgccctccactccaacatcgacacgactactcgtccgactagaaccaaacttttcaatccatcgttcgcagttcagttcacacttcacaggcgagcgcgaccatggatacccaagcacgtccggttccccgcgtcaagctcggcacccagggattcgaggtgtccaagctggggttcgggtgcatggggctgacgggcgcatacaactccccgctggacgacgaggccggcatcgccgtcatcgcgcacgctttcagccgcggagtcaccttgttcgacacctccgacgtatacgggcccctcaccaacgaaatcctcctcggcaaggcgctgaagcagctgccgcgggagcaggtgcaggtggccaccaagttcgggatacggcgtgacgagagcggcacgcggaccgtgtgcggccggccggagtacgttcgtgcctgctgcgaggccagcctgcgccgcctcggcatcgactgcatcgacctctactaccagcaccgcattgacaccacaattcccatcgaggagacgactggcgagctcaagaagctggtggaggagggtaaggtcaagtacatcggattgtcagaggcgagcccggacaccatcaggcgtgcacatgctgtgcacccgatcaccgcggtgcagatggagtggtctctctggtctcgcgacattgagcccgaaattgtgccgctctgcagagaattgggcattggaattgtaccatacagtcctcttggccgtgggttttttggtggaagaggagtgaaagagcaagtgtctgctgaatctaatctgcatgggatcccaaggtttgctccagaaaatttggagaagaacaagcaaatttatttgcgaatggaagaactggccaataagcaccagtgcagccctgctcagctagctttagcatgggttttgcatcaaggcgatgatgtggttcctataccagggacaaccaaaatcaagaatctagattccaacattgactccttgaaggtgaaactgacagacgaagatctgaaagaaatgggcagccagatacgggaagaagatgtggctggtgggagacaattcacctcatatgcacataccacctggaagtacgctgatacgccaaagaagcagagctaaaaaatacttgaaagcaacaatgatgatgcgattggtatggccctctccctgcagatgccctcaggaacattgtcgatgtccctttgtgaacagcctcttctagtaaataaataatgtatggagaagaacaatgaagggcccagtcttgttggaagtacgaataatgtacagttacaggaatgtgtgctaccatatatttcgtcgcatcagtttgagttgtggttgtgtgaacctaccatatatttcctcgcaaaagaataatgtatagttacagtaatgtgtgctatctcaatcagcatgcaggcaggaaaaacatggcaccatatgtagtacagtacatgaattctcgcttgtaatccacatttagacctgaaaatgcg

SEQ ID NO: 5555 - protein, 344 aa, Zea mays subsp. mays
  peptide (1)..(344): Ceres Seq. ID no. 12343145
MDTQARPVPRVKLGTQGFEVSKLGFGCMGLTGAYNSPLDDEAGIAVIAHAFSRGVTLFDTSDVYGPLTNEILLGKALKQLPREQVQVATKFGIRRDESGTRTVCGRPEYVRACCEASLRRLGIDCIDLYYQHRIDTTIPIEETTGELKKLVEEGKVKYIGLSEASPDTIRRAHAVHPITAVQMEWSLWSRDIEPEIVPLCRELGIGIVPYSPLGRGFFGGRGVKEQVSAESNLHGIPRFAPENLEKNKQIYLRMEELANKHQCSPAQLALAWVLHQGDDVVPIPGTTKIKNLDSNIDSLKVKLTDEDLKEMGSQIREEDVAGGRQFTSYAHTTWKYADTPKKQS

SEQ ID NO: 5556 - protein, 317 aa, Zea mays subsp. mays
  peptide (1)..(317): Ceres Seq. ID no. 12343146
MGLTGAYNSPLDDEAGIAVIAHAFSRGVTLFDTSDVYGPLTNEILLGKALKQLPREQVQVATKFGIRRDESGTRTVCGRPEYVRACCEASLRRLGIDCIDLYYQHRIDTTIPIEETTGELKKLVEEGKVKYIGLSEASPDTIRRAHAVHPITAVQMEWSLWSRDIEPEIVPLCRELGIGIVPYSPLGRGFFGGRGVKEQVSAESNLHGIPRFAPENLEKNKQIYLRMEELANKHQCSPAQLALAWVLHQGDDVVPIPGTTKIKNLDSNIDSLKVKLTDEDLKEMGSQIREEDVAGGRQFTSYAHTTWKYADTPKKQS

SEQ ID NO: 5557 - DNA, 1867 bp, Zea mays subsp. mays
  misc_feature (1)..(1867): Ceres Seq. ID no. 12595058
  misc_feature (1)..(1867): Ortholog of  Ceres SEQ ID NO 15176433 as cited in SEQ ID NO 59539
aatcccccgccgcgttcccccgcacgctttgacccataaagtcgatccatctccgagcaccaagttgaacacgcgatcccattcccattctcttgctcaatacaacctccggcttcagcaagccgcagcgccaagcctagaagcggagcgcggaacacacgaggccaggaagaggaggtgctgccgtccccgcgccgccgctgtgggagtgcggggaatggggcggcacggcgtggaccagatcggcgctgtggcagcgttcgtctgggtcaccctccttcccttgctgcttgtgtgcgtcgtgtggccgggcgcccaggccggccatacaagcgagtaccggcgccaactcggctccgccatcgacatgccactcgacgccgatgtcttccgccctccctcgggctacaatgcgcccgagcaggttcacatcacacaaggcaatcatgatggcacagccatgataatctcatgggtgacaacaagtgagcctggctcgagtactgtgatctacgggacttcagaggataacctcaactatactgcaaatgggaagcatactcagtatactttctacaactacacctcaggatacattcatcattgcacaataaaaaagttggagtttgacacactattactatgctgttgggattggacaaactgtgaggaagttttggtttttgacccctccaaaaagcggcccagatgttccatatacactcggtctcataggtgatcttggtcagagctttgattccaatgttacgctcacccattatgagtccaatgcaaaagcacagggagttctttttgttggggacttgtcatatgcagataactacccatatcatgataatgtgagatgggatacgtgggcaagatttgtagaaaggagcgtcgcgtaccagccttggatctggactgctggaaatcatgagatagatttcgctcctgaacttggtgaaacaaagccattcaagccattcagccataggtaccccacaccctacaaggcttctggtagcacggcaccttattggtattccatcaaaagggcctctgcctacattattgtcttggcatcgtactcagcatacggcaaatacactcctcagtacaagtggcttgaagctgaatttcccaaggtcaacaggagtgaaacgccatggttggttgtcctcatgcatgctccatggtacaatagctataactatcactacatggaaggtgaaaccatgagggtgatgtatgagccatggttcgtgaagtacaaagttgacgttgtgtttgcaggacatgtccacgcctacgaacgcacacacaggatatcgaatgtcgcatacaatgttgtgaatggcctgtgcactccaatccctgatcaatcggccccagtttacatcaccatcggtgatggagggaaccaggaaggattggctaccaacatgtcgcagccgcagccgagctactcggccttcagggaggcgagcttcgggcacgccatcctggacatcaagaaccggacacaccgcgtactacacgtggcaccgcaacccaggacgggagcgcggtggccgccgactccatgtggtttaccaatcggtactgggaaccgacggacgattcggccgacgatttccagtgaggacgagagctgcagctgggttggttattcgttgcggttcctcacgaccaataagcatcgccctgaatacacgaagcctccgaagctccgatgcaggcctctgccacttcttatagctctccttggtcgttgcccgtcttctcttggagagagaaaaaaacgtgtgaagagtaaaacggagtgtctctactctgattgtgtaaagaactcacgttcacagcg

SEQ ID NO: 5558 - protein, 245 aa, Zea mays subsp. mays
  peptide (1)..(245): Ceres Seq. ID no. 12595059
IPRRVPPHALTHKVDPSPSTKLNTRSHSHSLAQYNLRLQQAAAPSLEAERGTHEARKRRCCRPRAAAVGVRGMGRHGVDQIGAVAAFVWVTLLPLLLVCVVWPGAQAGHTSEYRRQLGSAIDMPLDADVFRPPSGYNAPEQVHITQGNHDGTAMIISWVTTSEPGSSTVIYGTSEDNLNYTANGKHTQYTFYNYTSGYIHHCTIKKLEFDTLLLCCWDWTNCEEVLVFDPSKKRPRCSIYTRSHR

SEQ ID NO: 5559 - protein, 227 aa, Zea mays subsp. mays
  peptide (1)..(227): Ceres Seq. ID no. 12595060
MHAPWYNSYNYHYMEGETMRVMYEPWFVKYKVDVVFAGHVHAYERTHRISNVAYNVVNGLCTPIPDQSAPVYITIGDGGNQEGLATNMSQPQPSYSAFREASFGHAILDIKNRTHRVLHVAPQPRTGARWPPTPCGLPIGTGNRRTIRPTISSEDESCSWVGYSLRFLTTNKHRPEYTKPPKLRCRPLPLLIALLGRCPSSLGERKKRVKSKTECLYSDCVKNSRSQ

SEQ ID NO: 5560 - protein, 214 aa, Zea mays subsp. mays
  peptide (1)..(214): Ceres Seq. ID no. 12595061
MEGETMRVMYEPWFVKYKVDVVFAGHVHAYERTHRISNVAYNVVNGLCTPIPDQSAPVYITIGDGGNQEGLATNMSQPQPSYSAFREASFGHAILDIKNRTHRVLHVAPQPRTGARWPPTPCGLPIGTGNRRTIRPTISSEDESCSWVGYSLRFLTTNKHRPEYTKPPKLRCRPLPLLIALLGRCPSSLGERKKRVKSKTECLYSDCVKNSRSQ

SEQ ID NO: 5561 - protein, 173 aa, Zea mays subsp. mays
  peptide (1)..(173): Ceres Seq. ID no. 12595062
MGRHGVDQIGAVAAFVWVTLLPLLLVCVVWPGAQAGHTSEYRRQLGSAIDMPLDADVFRPPSGYNAPEQVHITQGNHDGTAMIISWVTTSEPGSSTVIYGTSEDNLNYTANGKHTQYTFYNYTSGYIHHCTIKKLEFDTLLLCCWDWTNCEEVLVFDPSKKRPRCSIYTRSHR

SEQ ID NO: 5562 - DNA, 1811 bp, Zea mays subsp. mays
  misc_feature (1)..(1811): Ceres Seq. ID no. 12406923
  misc_feature (1)..(1811): Ortholog of  Ceres SEQ ID NO 14303423 as cited in SEQ ID NO 54243
  misc_feature (1)..(1811): Ortholog of  Ceres SEQ ID NO 12611314 as cited in SEQ ID NO 56535
  misc_feature (1)..(1811): Ortholog of  Ceres SEQ ID NO 15178046 as cited in SEQ ID NO 60380
  misc_feature (1)..(1811): Ortholog of  Ceres SEQ ID NO 14312016 as cited in SEQ ID NO 60412
  misc_feature (1)..(1811): Ortholog of  Ceres SEQ ID NO 13661438 as cited in SEQ ID NO 61414
ctcttctagtcgcctctacccagttacttgcatcgccccgtcaagcacgccgccggcacgcggccctcggtctccccgccgcgccctctgcctccgcccgaacaaagccgtctcgccgtcgcgttgccttccttaccgtccaccgcgggcagccgtcctagtactcggttggtcctcccctgctgcccttctacggtggaggagcggagatcctgccgttttccggctgatttcttctaattgcggggcaagttccgtggatagtcaatactgcttgtgctgttgagctaatattaagttcctgctgggagaacttctgcagttcctatggcaaagcctctcaatggcagtggccgtagcatgccaagatcgaatgagggaatgcggctcatattttcggcagttgtaggtgtcatgctgggttacctgtttgggatctccttccctacagtcaacataaccaagcttcacttcccttcgagtatcatctcttatatcgaagataggaactctggcatcacaacccagacattgttgaaccatgcttgggcatctgcaaacaatcataaaaagaatagttctgaatctaacactgatgaaattcccgagatttatgttcctacaaacccaaaaggtgctgagagacttccaccaggcattgtagtgtctgaaacagatctttatccccgaagactatggggtgatcctagtgaggaccttactagcgagccgaggtatcttgttacttttactgttggtattgggcaaaaggcaaatattgatgcagcggtcagaaagttttcagacaaattcaccattatgttgttccattatgatggtcggactacagagtgggatgaatttgagtggtctaaaagagcaatccatgtgagtgccaggaagcagacaaaatggtggtatgcaaaacgatttttgcatcccgatgttgttgccagatatgattacattttcatctgggatgaggatctaggtgtagagcatttcaacgcagagaagtacattgagcttgttagaaagcatgggttggaaatctctcagcctggtttgcaacctgatagaggactaacatggcaaatgactaaacggcgtggtgaccaggaagttcacaaagtaactgaggagagaccaggctggtgcactgatccacatctaccaccatgtgcagcatttgttgagattatggcaacagtgttctccagaaatgcatggcgctgtgtatggcatatgattcagaatgacttggtccatggatggggtcttgactttgctcttagaaaatgtgtggagccggctcatgagaaaattggagttgttgatgctcaatggattgttcatcaatcagttccttcacttggcaaccagggcaagtcagataatggaagaccaccatgggaaggggtaagagcacgctgcagaaaagaatgggggatatttcagacaaggctggctgatgcggagaaggcttattacttggagcgaggcatcacacccccgaactcaacatcagtttagatgaacacatgctcctcagatgccacggcaaggtttctgttgggggaacctgctgcaaactggcatgttcatcgaagctgctgcagcccagggcaaatccatatatttgtacattagaggtcccacgaatcgccatgattaatctttagtgtcgctcacctggttttaatgtcatttcttttgttagtgatactagctgcgatgtaagtaggaggatacagcagagaccgtgatgatacccatttgtgtattaatgacctgatgcaatatggatgttg

SEQ ID NO: 5563 - protein, 401 aa, Zea mays subsp. mays
  peptide (1)..(401): Ceres Seq. ID no. 12406924
MAKPLNGSGRSMPRSNEGMRLIFSAVVGVMLGYLFGISFPTVNITKLHFPSSIISYIEDRNSGITTQTLLNHAWASANNHKKNSSESNTDEIPEIYVPTNPKGAERLPPGIVVSETDLYPRRLWGDPSEDLTSEPRYLVTFTVGIGQKANIDAAVRKFSDKFTIMLFHYDGRTTEWDEFEWSKRAIHVSARKQTKWWYAKRFLHPDVVARYDYIFIWDEDLGVEHFNAEKYIELVRKHGLEISQPGLQPDRGLTWQMTKRRGDQEVHKVTEERPGWCTDPHLPPCAAFVEIMATVFSRNAWRCVWHMIQNDLVHGWGLDFALRKCVEPAHEKIGVVDAQWIVHQSVPSLGNQGKSDNGRPPWEGVRARCRKEWGIFQTRLADAEKAYYLERGITPPNSTSV

SEQ ID NO: 5564 - protein, 390 aa, Zea mays subsp. mays
  peptide (1)..(390): Ceres Seq. ID no. 12406925
MPRSNEGMRLIFSAVVGVMLGYLFGISFPTVNITKLHFPSSIISYIEDRNSGITTQTLLNHAWASANNHKKNSSESNTDEIPEIYVPTNPKGAERLPPGIVVSETDLYPRRLWGDPSEDLTSEPRYLVTFTVGIGQKANIDAAVRKFSDKFTIMLFHYDGRTTEWDEFEWSKRAIHVSARKQTKWWYAKRFLHPDVVARYDYIFIWDEDLGVEHFNAEKYIELVRKHGLEISQPGLQPDRGLTWQMTKRRGDQEVHKVTEERPGWCTDPHLPPCAAFVEIMATVFSRNAWRCVWHMIQNDLVHGWGLDFALRKCVEPAHEKIGVVDAQWIVHQSVPSLGNQGKSDNGRPPWEGVRARCRKEWGIFQTRLADAEKAYYLERGITPPNSTSV

SEQ ID NO: 5565 - protein, 383 aa, Zea mays subsp. mays
  peptide (1)..(383): Ceres Seq. ID no. 12406926
MRLIFSAVVGVMLGYLFGISFPTVNITKLHFPSSIISYIEDRNSGITTQTLLNHAWASANNHKKNSSESNTDEIPEIYVPTNPKGAERLPPGIVVSETDLYPRRLWGDPSEDLTSEPRYLVTFTVGIGQKANIDAAVRKFSDKFTIMLFHYDGRTTEWDEFEWSKRAIHVSARKQTKWWYAKRFLHPDVVARYDYIFIWDEDLGVEHFNAEKYIELVRKHGLEISQPGLQPDRGLTWQMTKRRGDQEVHKVTEERPGWCTDPHLPPCAAFVEIMATVFSRNAWRCVWHMIQNDLVHGWGLDFALRKCVEPAHEKIGVVDAQWIVHQSVPSLGNQGKSDNGRPPWEGVRARCRKEWGIFQTRLADAEKAYYLERGITPPNSTSV

SEQ ID NO: 5566 - DNA, 1057 bp, Zea mays subsp. mays
  misc_feature (1)..(1057): Ceres Seq. ID no. 13493461
  misc_feature (1)..(1057): Ortholog of  Ceres SEQ ID NO 15178295 as cited in SEQ ID NO 52699
  misc_feature (1)..(1057): Ortholog of  Ceres SEQ ID NO 13597725 as cited in SEQ ID NO 64806
ggtgccccccacccccacccccacccccaccccgtgtgtgcgcggaaatgtcgccgacgaagtcatcgtgcctcgcggacgccggcgcggagccgttccgggtgttcgtgggctacgactcccgcgaggacgtggcgtaccgcgtgtgccggcgctcccttctgcgccgctcgtccatcccgctggagatcaccccgatcgtgcagcaggagctccgcgaggcggggctgtactggcgggagcgcggcccgacggagagcaccgagttctccttcacccgcttcctgacgccctacctggcggggtaccgcgggtgggcgctgttcgtggactgcgacttcctgttcgtggccgacgtagccgggctggtggcgctggcgcgcgccgacccgcggcgcgcggtgctgtgcgtgcaccacgactacacgcccacggaggccaccaagatggacggcgccgtgcagacggcgtaccctcgcaagaactggtcctccatggtgctcttcaactgcggccaccccaagaaccgcgccgcgctcacgccggaggccgtcagcacgcgcagccggtgcgtacctgcaccgcttcatgtggctcgacgaccgacgagatcggcgaggtgccgttcgtgtggaacttcctcgtggggcacaaccgcgtcgaccccgccgacgaggctggcacggcgccgcgcgctatacactacacgtccggcgggccgtggttcgataggtacaaggactgcgaattcgccgacctctgggtccaggagcgcgacgcctacgaggtcgacaaggacgtggatgatggatccatgcccatacgagaggcacctgcaatggtgtcggtggatgcacgcgattgagacggtcgaccatctccctgctgcccacgcgcgcggtcgtgtgctgtttgttgtttacgttgtgtgctgtctcctgtgcgcgcgcgcgctaccagtgtagtaccagtaccacatgtccatgtccatgcatgtactgtctgtcacgttggtgcgttatcgatggtagaataaagaggcgaccgttgcatgccc

SEQ ID NO: 5567 - protein, 320 aa, Zea mays subsp. mays
  peptide (1)..(320): Ceres Seq. ID no. 13493462
CPPPPPPPPPRVCAEMSPTKSSCLADAGAEPFRVFVGYDSREDVAYRVCRRSLLRRSSIPLEITPIVQQELREAGLYWRERGPTESTEFSFTRFLTPYLAGYRGWALFVDCDFLFVADVAGLVALARADPRRAVLCVHHDYTPTEATKMDGAVQTAYPRKNWSSMVLFNCGHPKNRAALTPEAVSTRSRCVPAPLHVARRPTRSARCRSCGTSSWGTTASTPPTRLARRRALYTTRPAGRGSIGTRTANSPTSGSRSATPTRSTRTWMMDPCPYERHLQWCRWMHAIETVDHLPAAHARGRVLFVVYVVCCLLCARALPV

SEQ ID NO: 5568 - protein, 305 aa, Zea mays subsp. mays
  peptide (1)..(305): Ceres Seq. ID no. 13493463
MSPTKSSCLADAGAEPFRVFVGYDSREDVAYRVCRRSLLRRSSIPLEITPIVQQELREAGLYWRERGPTESTEFSFTRFLTPYLAGYRGWALFVDCDFLFVADVAGLVALARADPRRAVLCVHHDYTPTEATKMDGAVQTAYPRKNWSSMVLFNCGHPKNRAALTPEAVSTRSRCVPAPLHVARRPTRSARCRSCGTSSWGTTASTPPTRLARRRALYTTRPAGRGSIGTRTANSPTSGSRSATPTRSTRTWMMDPCPYERHLQWCRWMHAIETVDHLPAAHARGRVLFVVYVVCCLLCARALPV

SEQ ID NO: 5569 - protein, 287 aa, Zea mays subsp. mays
  peptide (1)..(287): Ceres Seq. ID no. 13493464
VPPTPTPTPTPCVRGNVADEVIVPRGRRRGAVPGVRGLRLPRGRGVPRVPALPSAPLVHPAGDHPDRAAGAPRGGAVLAGARPDGEHRVLLHPLPDALPGGVPRVGAVRGLRLPVRGRRSRAGGAGARRPAARGAVRAPRLHAHGGHQDGRRRADGVPSQELVLHGALQLRPPQEPRRAHAGGRQHAQPVRTCTASCGSTTDEIGEVPFVWNFLVGHNRVDPADEAGTAPRAIHYTSGGPWFDRYKDCEFADLWVQERDAYEVDKDVDDGSMPIREAPAMVSVDARD

SEQ ID NO: 5570 - DNA, 1804 bp, Zea mays subsp. mays
  misc_feature (1)..(1804): Ceres Seq. ID no. 12405615
  misc_feature (1)..(1804): Ortholog of  Ceres SEQ ID NO 13663060 as cited in SEQ ID NO 60964
  misc_feature (1)..(1804): Ortholog of  Ceres SEQ ID NO 13655298 as cited in SEQ ID NO 68914
ggaaccgtcaggccgtgaagagcctgcggttcgatctgctgcaagagctcctcgtcgatctcttcttctctgcgaggtttcggtctgagttaccacattgctggagtggaggtatggcgtattctggacaaaggcatgctggtgttgggagctcctcgaggccagcgaatggattcaagggggcagccaactcggtggagttcctgggtagggagatgctgggaatgcgactgagggatgccaagcccgacacagatgatgaaagggagatgtggtcaagttcagatgtgactgatagttctagtaatgaagctggtcatgtaatagcgactactgttcacgggcgcaacggcctgcctaaacagtctgtcacatacatcgctgaacatgtggttggaactggttcttttggggttgtgtatcaggcaaaatgccgagaaacaggggaaattgttgccataaaaaaggttcttcaagataagcgttataagaacagagagctgcaaatcatgcatatgcttgaccatcctaacatcatcggtcttaagcattacttcttttcaacaactgaaagggatgagctttatctcaaccttgttcttgagtttgttccagagacagtaaacaggattgcaaggcagtacaatcgaatgaatcagcggatgcccctcatttatgtcaaactgtacacgtatcagatatgccgagcgcttgcttatatacataactgcattggcatctgccaccgtgatatcaaaccgcagaatgttcttgttaacccacatacacaccaactcaaaatttgcgatttcggaagtgctaaagtattggtcagaggagagccaaacatctcctacatatgctcaaggtattatcgagcaccagagctcatatttggtgcaacggaatatactactgctattgatttgtggtcaacaggctgtgtcatggcagagctgcttctaggacagcctctgtttcctggagaaagtggagtcgaccaactagttgagatcatcaaggttttgggtactccaacaagggaagagatcaagtgcatgaacccaaactacacggagttcaagttcccacaaattaaagctcatccgtggcacaaggtttttcaaagaaggcttccacctgaagcagtggaccttgttagcaggtttctacaatactcaccaaatctacggtgcactgctttggaggcctgtatgcaccctttcttcgatgagctgagagacccaaacactcgtctacccaatggtcggcctctgccgcctctcttcaacttcagatctcaagagctaaaaggcgttcccccagaagtcatcgatcgccttgtcccagagcactcaagaaggcagagtttgttcatggcgctaaggacctagtttttgccgttctttttgcccccctttttcccaccgtttgccaccttgagggaagcttgtaaagctatagcttctcctttcccctcgtccttacttgcccccccccctctctctttcttccgagctttgtgtggatgagagatccttgagatacactgctagagctgtgagttccaggatgtgaggttcgagtgtgtgtgatgtgcagttgtcgcctttgaggtcggagatttcagttgcagtgttgtgagaggcttgtgaagcttttttgtctacttttcagtgcttctctggcttgaagttttccttcaattcttgtgaactggcttcaagatttggcttcgtgaaccctgtgtgcgtgtaaaagtactggttggatgctgctgcaccaattctggaaaaaaaagctt

SEQ ID NO: 5571 - protein, 463 aa, Zea mays subsp. mays
  peptide (1)..(463): Ceres Seq. ID no. 12405616
NRQAVKSLRFDLLQELLVDLFFSARFRSELPHCWSGGMAYSGQRHAGVGSSSRPANGFKGAANSVEFLGREMLGMRLRDAKPDTDDEREMWSSSDVTDSSSNEAGHVIATTVHGRNGLPKQSVTYIAEHVVGTGSFGVVYQAKCRETGEIVAIKKVLQDKRYKNRELQIMHMLDHPNIIGLKHYFFSTTERDELYLNLVLEFVPETVNRIARQYNRMNQRMPLIYVKLYTYQICRALAYIHNCIGICHRDIKPQNVLVNPHTHQLKICDFGSAKVLVRGEPNISYICSRYYRAPELIFGATEYTTAIDLWSTGCVMAELLLGQPLFPGESGVDQLVEIIKVLGTPTREEIKCMNPNYTEFKFPQIKAHPWHKVFQRRLPPEAVDLVSRFLQYSPNLRCTALEACMHPFFDELRDPNTRLPNGRPLPPLFNFRSQELKGVPPEVIDRLVPEHSRRQSLFMALRT

SEQ ID NO: 5572 - protein, 426 aa, Zea mays subsp. mays
  peptide (1)..(426): Ceres Seq. ID no. 12405617
MAYSGQRHAGVGSSSRPANGFKGAANSVEFLGREMLGMRLRDAKPDTDDEREMWSSSDVTDSSSNEAGHVIATTVHGRNGLPKQSVTYIAEHVVGTGSFGVVYQAKCRETGEIVAIKKVLQDKRYKNRELQIMHMLDHPNIIGLKHYFFSTTERDELYLNLVLEFVPETVNRIARQYNRMNQRMPLIYVKLYTYQICRALAYIHNCIGICHRDIKPQNVLVNPHTHQLKICDFGSAKVLVRGEPNISYICSRYYRAPELIFGATEYTTAIDLWSTGCVMAELLLGQPLFPGESGVDQLVEIIKVLGTPTREEIKCMNPNYTEFKFPQIKAHPWHKVFQRRLPPEAVDLVSRFLQYSPNLRCTALEACMHPFFDELRDPNTRLPNGRPLPPLFNFRSQELKGVPPEVIDRLVPEHSRRQSLFMALRT

SEQ ID NO: 5573 - protein, 392 aa, Zea mays subsp. mays
  peptide (1)..(392): Ceres Seq. ID no. 12405618
MLGMRLRDAKPDTDDEREMWSSSDVTDSSSNEAGHVIATTVHGRNGLPKQSVTYIAEHVVGTGSFGVVYQAKCRETGEIVAIKKVLQDKRYKNRELQIMHMLDHPNIIGLKHYFFSTTERDELYLNLVLEFVPETVNRIARQYNRMNQRMPLIYVKLYTYQICRALAYIHNCIGICHRDIKPQNVLVNPHTHQLKICDFGSAKVLVRGEPNISYICSRYYRAPELIFGATEYTTAIDLWSTGCVMAELLLGQPLFPGESGVDQLVEIIKVLGTPTREEIKCMNPNYTEFKFPQIKAHPWHKVFQRRLPPEAVDLVSRFLQYSPNLRCTALEACMHPFFDELRDPNTRLPNGRPLPPLFNFRSQELKGVPPEVIDRLVPEHSRRQSLFMALRT

SEQ ID NO: 5574 - DNA, 1449 bp, Zea mays subsp. mays
  misc_feature (1)..(1449): Ceres Seq. ID no. 13498734
  misc_feature (1)..(1449): Ortholog of  Ceres SEQ ID NO 13598313 as cited in SEQ ID NO 68293
agagcgaagagagcgaaatccagagcacacggcgtcgcatttggaacgctcctgctcgtcgcacgtacgaagcccacgcgtccgcgcacgtgccagagccgagcccccgcgccggcgccccgccggagaggatgacgcggcggtgctcgcactgcagcaacaacggccacaactcgcgtacctgccccgtccgctccgccggcggcggcagcggcggcggcggggtgaggctgttcggcgtgcggctcacgacggcgccggcgccggcggtgatgaagaagagcgccagcatgagctgcattgtgtcctcgctcggcggcggtttcggcggctcgtcgccgccggtggaaggagtgggtgctggcagaggaggggaagacagtgggaccggctacgtgtccgatgatcccgcgcacgcatcctgctcgacgaatggccgcgccgagcgcaagaaaggtacaccttggactgaagaagagcatagaatgtttctgatgggtctgcagaagcttggtaagggagactggcgcgggatatccagaaactttgttgtttccaggaccccgactcaagttgcaagccatgctcaaaagtactttgttagacagacaaactcatcgagacggaagaggcggtcaagcttatttgacatggtcccagaaatgccaatggatgagtccccagctgctgtggaacaatttactctccaaaatactcaagatgaagatacaagttcaaatcacgtgccaaccttacatcttggacaacggaaggaaacagagtttgctaagcagctacaaacttttcagccagggcaccatgagaaatctgaatacgcagaaccttcattgctgctaccagatttggagatgaaccccagtgtaccattcaagaccataactgatccaacaggaccagcattctacccatcattggtccctgttccactaactctttggcctccaagtgtttcccacgtggaggaagcagccagaacccatgaaatcctaaaaccaactcctttgaatggtaagggggtggttaaggcagatgatgttgttggtatgtctaagctcagcatcgacgaagctagctctggctccatggaacccactgctctttcccttgagcttattggatccacagatacaaggcaatcagcttttcatgtgagtccaccgatgaatagacctgaactaagcaagagaaacagcagtccaattcatgcagtttgaggaagcatgaaacatgcccgctgggtcaagtcttacaaattatactgatggtctcaatacctcagaacgtgaccatgtactttgtaacgactttttagttatcctgtttccagcttatgttccttgccatcgacaaatgtagagagatacatgtgtcaatggaagtagcatgccattagtttcaaaaaaaaaaaaaaaaaaaaaaaaataaaaa

SEQ ID NO: 5575 - protein, 410 aa, Zea mays subsp. mays
  peptide (1)..(410): Ceres Seq. ID no. 13498735
SEESEIQSTRRRIWNAPARRTYEAHASAHVPEPSPRAGAPPERMTRRCSHCSNNGHNSRTCPVRSAGGGSGGGGVRLFGVRLTTAPAPAVMKKSASMSCIVSSLGGGFGGSSPPVEGVGAGRGGEDSGTGYVSDDPAHASCSTNGRAERKKGTPWTEEEHRMFLMGLQKLGKGDWRGISRNFVVSRTPTQVASHAQKYFVRQTNSSRRKRRSSLFDMVPEMPMDESPAAVEQFTLQNTQDEDTSSNHVPTLHLGQRKETEFAKQLQTFQPGHHEKSEYAEPSLLLPDLEMNPSVPFKTITDPTGPAFYPSLVPVPLTLWPPSVSHVEEAARTHEILKPTPLNGKGVVKADDVVGMSKLSIDEASSGSMEPTALSLELIGSTDTRQSAFHVSPPMNRPELSKRNSSPIHAV

SEQ ID NO: 5576 - protein, 367 aa, Zea mays subsp. mays
  peptide (1)..(367): Ceres Seq. ID no. 13498736
MTRRCSHCSNNGHNSRTCPVRSAGGGSGGGGVRLFGVRLTTAPAPAVMKKSASMSCIVSSLGGGFGGSSPPVEGVGAGRGGEDSGTGYVSDDPAHASCSTNGRAERKKGTPWTEEEHRMFLMGLQKLGKGDWRGISRNFVVSRTPTQVASHAQKYFVRQTNSSRRKRRSSLFDMVPEMPMDESPAAVEQFTLQNTQDEDTSSNHVPTLHLGQRKETEFAKQLQTFQPGHHEKSEYAEPSLLLPDLEMNPSVPFKTITDPTGPAFYPSLVPVPLTLWPPSVSHVEEAARTHEILKPTPLNGKGVVKADDVVGMSKLSIDEASSGSMEPTALSLELIGSTDTRQSAFHVSPPMNRPELSKRNSSPIHAV

SEQ ID NO: 5577 - protein, 320 aa, Zea mays subsp. mays
  peptide (1)..(320): Ceres Seq. ID no. 13498737
MKKSASMSCIVSSLGGGFGGSSPPVEGVGAGRGGEDSGTGYVSDDPAHASCSTNGRAERKKGTPWTEEEHRMFLMGLQKLGKGDWRGISRNFVVSRTPTQVASHAQKYFVRQTNSSRRKRRSSLFDMVPEMPMDESPAAVEQFTLQNTQDEDTSSNHVPTLHLGQRKETEFAKQLQTFQPGHHEKSEYAEPSLLLPDLEMNPSVPFKTITDPTGPAFYPSLVPVPLTLWPPSVSHVEEAARTHEILKPTPLNGKGVVKADDVVGMSKLSIDEASSGSMEPTALSLELIGSTDTRQSAFHVSPPMNRPELSKRNSSPIHAV

SEQ ID NO: 5578 - DNA, 1760 bp, Zea mays subsp. mays
  misc_feature (1)..(1760): Ceres Seq. ID no. 12350346
  misc_feature (1)..(1760): Ortholog of  Ceres SEQ ID NO 13657220 as cited in SEQ ID NO 66169
  misc_feature (1)..(1760): Ortholog of  Ceres SEQ ID NO 13663074 as cited in SEQ ID NO 69191
cccaaatcccaccacccttttccccttccaaccatcgggatctctccggcccgccatggaggtgttctactacctcgtgttcggcgcgctcgccgccatcgtggcggcgctggagctcgccaagtccggcaaggaccgcgtcgccacctccccggccttcaactcatttaagaacaactacatcctcgtttactccctcatgatgtctggggactggctgcaggggccctacgtgtactacctctacagccagtacggcttcgacaagggcgacattggccgcctcttcatcgccggcttcggttcctccatgctcttcggcaccatcgtcggatccctcgcggataagcaggggcggaagagggcgtgtgtcacgtactgcatcacctacatcctcagctgcatcaccaagcactctccccagtacaaagttcttatgattgggcgcgtccttggtggcattgccacttcgctgctcttctcagcgtttgagtcgtggctcgtggcagagcacaacaagaaaggatttgatccacaatggttgtcgataacattctccaaggctatatttcttggcaatggtctagtggccattgttgctggcctatttgcaaattttcttgctgataacatgggttttggtcctgtggctccatttgatgccgctgcttgcttcctagcaataggaatggcaattatcttatcatcatggggtgagaactacggagattcgtctgacagcaaggacttgataacccagttcaagggtgcagctaaagccattgcttcagacgagaagattgcattgcttggagccatacagtcattgtttgagggatcaatgtatactttcgttttcctgtggactcctgctctgagcccaaaggatgaggaaattcctcacggcttcatatttgctaccttcatgctttcctcgatgctgggtagctcaattgcttctcgtttgttagctaggaagctgaaggttgaaggttatatgcaaatcgtgttttcagtatcagcctttactcttttcctccctgttgtcaccaatttcctagtacctccctccggggagaaaggcggcagcatttcgttaggaggctgcttacagcttcttggtttctgtacctttgagtcatgtgttggtatattttggccatcaatcatgaagatgagatctcaatatattcccgaggaggcaagaagcacaatcatgaatttcttccgtataccgctcaacctgtttgtttgcgtggtactatacaatgtgaatgcattcccaataactgtcatgttcggcatgtgctccattttccttctcatggcagcagtcttgcagaggcgcttaatggctgtctctgatcttcacagatcgacaaaggctgtaatgatgactgcggaagatgagcctctaaacccttagagaacatcataaaagtgaatcggaagtttaaatggccccaatcctcgacttattcccatggggttgctgaataagattgatatctaaaagttgtaacgactgtaacagaacacggtttttactgtgttataggattggtgctagtgcagtttccggttgtcatggtagagaacatgatgtggctcctgactattgtgccacacacggcagagtagatctcggcatagcctccccacgatttccccatgtttttcttctcgtgttttctgataggattgatatttgtattcaagtgaagtatcatatggaaacccgcatcgtccattttggatgc

SEQ ID NO: 5579 - protein, 474 aa, Zea mays subsp. mays
  peptide (1)..(474): Ceres Seq. ID no. 12350347
PNPTTLFPFQPSGSLRPAMEVFYYLVFGALAAIVAALELAKSGKDRVATSPAFNSFKNNYILVYSLMMSGDWLQGPYVYYLYSQYGFDKGDIGRLFIAGFGSSMLFGTIVGSLADKQGRKRACVTYCITYILSCITKHSPQYKVLMIGRVLGGIATSLLFSAFESWLVAEHNKKGFDPQWLSITFSKAIFLGNGLVAIVAGLFANFLADNMGFGPVAPFDAAACFLAIGMAIILSSWGENYGDSSDSKDLITQFKGAAKAIASDEKIALLGAIQSLFEGSMYTFVFLWTPALSPKDEEIPHGFIFATFMLSSMLGSSIASRLLARKLKVEGYMQIVFSVSAFTLFLPVVTNFLVPPSGEKGGSISLGGCLQLLGFCTFESCVGIFWPSIMKMRSQYIPEEARSTIMNFFRIPLNLFVCVVLYNVNAFPITVMFGMCSIFLLMAAVLQRRLMAVSDLHRSTKAVMMTAEDEPLNP

SEQ ID NO: 5580 - protein, 456 aa, Zea mays subsp. mays
  peptide (1)..(456): Ceres Seq. ID no. 12350348
MEVFYYLVFGALAAIVAALELAKSGKDRVATSPAFNSFKNNYILVYSLMMSGDWLQGPYVYYLYSQYGFDKGDIGRLFIAGFGSSMLFGTIVGSLADKQGRKRACVTYCITYILSCITKHSPQYKVLMIGRVLGGIATSLLFSAFESWLVAEHNKKGFDPQWLSITFSKAIFLGNGLVAIVAGLFANFLADNMGFGPVAPFDAAACFLAIGMAIILSSWGENYGDSSDSKDLITQFKGAAKAIASDEKIALLGAIQSLFEGSMYTFVFLWTPALSPKDEEIPHGFIFATFMLSSMLGSSIASRLLARKLKVEGYMQIVFSVSAFTLFLPVVTNFLVPPSGEKGGSISLGGCLQLLGFCTFESCVGIFWPSIMKMRSQYIPEEARSTIMNFFRIPLNLFVCVVLYNVNAFPITVMFGMCSIFLLMAAVLQRRLMAVSDLHRSTKAVMMTAEDEPLNP

SEQ ID NO: 5581 - protein, 408 aa, Zea mays subsp. mays
  peptide (1)..(408): Ceres Seq. ID no. 12350349
MMSGDWLQGPYVYYLYSQYGFDKGDIGRLFIAGFGSSMLFGTIVGSLADKQGRKRACVTYCITYILSCITKHSPQYKVLMIGRVLGGIATSLLFSAFESWLVAEHNKKGFDPQWLSITFSKAIFLGNGLVAIVAGLFANFLADNMGFGPVAPFDAAACFLAIGMAIILSSWGENYGDSSDSKDLITQFKGAAKAIASDEKIALLGAIQSLFEGSMYTFVFLWTPALSPKDEEIPHGFIFATFMLSSMLGSSIASRLLARKLKVEGYMQIVFSVSAFTLFLPVVTNFLVPPSGEKGGSISLGGCLQLLGFCTFESCVGIFWPSIMKMRSQYIPEEARSTIMNFFRIPLNLFVCVVLYNVNAFPITVMFGMCSIFLLMAAVLQRRLMAVSDLHRSTKAVMMTAEDEPLNP

SEQ ID NO: 5582 - DNA, 583 bp, Zea mays subsp. mays
  misc_feature (1)..(583): Ceres Seq. ID no. 13564574
  misc_feature (1)..(583): Ortholog of  Ceres SEQ ID NO 15225826 as cited in SEQ ID NO 64774
ttagaccgagcagtactcggtacgccaaagttcacgcggtactgctgtgtccttcgtttactaaggatcaaagtcaaacgtcgagaaatatagatttacctggaagttgctgataatccgccatctagtcggtaggcatgtatggcaaagttcagttggtgttcacttgttcctcaatggaggccaagaacaagaaaaaagggtcaaagatggagagagtttgtgagaacacagtggctgttgacttcaagcagactaagctgaacaactttgtcccattcatccggtcargggagtggktctgatattggagggtcgcggrttacatgggaagatgcccatgtgtgsatctctgatctggcaaagaattttggctatgactcagtcgatgatgaagtaatttccttctatggggtgtttgawggccataatggcaaagatgctgctcattatgtccgtgataacttgccacgggtcatcgtggaagacgctgattttcckcttgagcttgaaaaggtagtaaagaggtcatttgtgcaaactggatrgtaaagtttgcagagaaattctctcaccacagggg

SEQ ID NO: 5583 - protein, 55 aa, Zea mays subsp. mays
  peptide (1)..(55): Ceres Seq. ID no. 13564575
  misc_feature (52)..(52): Xaa is any aa, unknown or other
  misc_feature (55)..(55): Xaa is any aa, unknown or other
MYGKVQLVFTCSSMEAKNKKKGSKMERVCENTVAVDFKQTKLNNFVPFIRSXEWX

SEQ ID NO: 5584 - protein, 42 aa, Zea mays subsp. mays
  peptide (1)..(42): Ceres Seq. ID no. 13564576
  misc_feature (39)..(39): Xaa is any aa, unknown or other
  misc_feature (42)..(42): Xaa is any aa, unknown or other
MEAKNKKKGSKMERVCENTVAVDFKQTKLNNFVPFIRSXEWX

SEQ ID NO: 5585 - protein, 40 aa, Zea mays subsp. mays
  peptide (1)..(40): Ceres Seq. ID no. 13564577
MAKFSWCSLVPQWRPRTRKKGQRWREFVRTQWLLTSSRLS

SEQ ID NO: 5586 - DNA, 1568 bp, Zea mays subsp. mays
  misc_feature (1)..(1568): Ceres Seq. ID no. 12409445
  misc_feature (1)..(1568): Ortholog of  Ceres SEQ ID NO 12618559 as cited in SEQ ID NO 64385
agacttatttcgagagaggagtacgttttaagccggtgctccatgtgtcccgtcccgtgtcccgtcccgtctacgttttaagctgcgagcgagatctgctttcacagcgtggctgaccagcagatccgtcgttgccggaacccacgctcgccggctgcgaatgcatctgtagcctgctcttcgtccacacggacaattggacgagctagactctgcgtcgccggcgatggggtgctccttctcagggctgaacgcactgtacgacaccgtcggcggtcggggtggtgacgtctgggttaacgactaccacttccgcgtgctccgcaggctcggcgatgccggccctgcgggctcgtcggtcttcctcgtcaaggaggtcgtcgccgccgcaaccgcctccgacggcacggctgggtcagagcccggcgcctcagggatcgccgggaagaaaggcatcgacccatcacacatctcagctgacgggacatatgctctcaagaaagttcttgttcagagtgatcagcacttagagcttgttcagcaagagatccgagtgtcctctcaattcagccatccaaatttacttcctcttcttgaacatgccatcgttgctgtcaagggtgttcaggatggatcccagaactatgaggcctacttattattcccagttcatttagaaggaacattacatgatataactaaaaccatgcttgaaaagaaggaattcttcccaacaattactgttctccagatatttcgccagctttgttctggattaaagcacatgcacagttttgatccaccatatgcgcacaatggggttaaaccagataatgtcctcataacacagaggaagcagtctcatctagcaattttgatggattttgagagtgctggtccagcaagaaagactattagatcacaagctgaagctttgcagttacaggaatgggcttcagagcactgttcttctcattaccgtgcccccgaactatgggagtgtccaagtcatgctgacattgatgagaggacagatatatggtctttgggatgcactttgtatgctatgatgtatggaaagtctccatttgattatgagcttgatgagtcttctggtgaaagcttgcacagtgttattaaaaatgtacagattaaatggcctgaagaagcgggatctacataccctgattccctccgccagtttataacttggatgctgcagccacatcccgcagttcgtcctcatattgatgatatcataattcatgttgataaacttgtcatgaagtactctaattaaccgctacaccaagccgcttctccaccagaaaaaagaatcattattatgtaagtctacacgattcattagcaaaatgtgatatgtatgttccttgatagctattactgtattaaacgagaaaaggacattctgctgtagtcttcaaccattcgtggactcgccattgttcatgagtatgttatctatagatgttttttttgtatgcccgacagtgttaccgggttaataaatgatacagtacctcttttatagttataatggtgccctt

SEQ ID NO: 5587 - protein, 357 aa, Zea mays subsp. mays
  peptide (1)..(357): Ceres Seq. ID no. 12409446
MGCSFSGLNALYDTVGGRGGDVWVNDYHFRVLRRLGDAGPAGSSVFLVKEVVAAATASDGTAGSEPGASGIAGKKGIDPSHISADGTYALKKVLVQSDQHLELVQQEIRVSSQFSHPNLLPLLEHAIVAVKGVQDGSQNYEAYLLFPVHLEGTLHDITKTMLEKKEFFPTITVLQIFRQLCSGLKHMHSFDPPYAHNGVKPDNVLITQRKQSHLAILMDFESAGPARKTIRSQAEALQLQEWASEHCSSHYRAPELWECPSHADIDERTDIWSLGCTLYAMMYGKSPFDYELDESSGESLHSVIKNVQIKWPEEAGSTYPDSLRQFITWMLQPHPAVRPHIDDIIIHVDKLVMKYSN

SEQ ID NO: 5588 - protein, 197 aa, Zea mays subsp. mays
  peptide (1)..(197): Ceres Seq. ID no. 12409447
MLEKKEFFPTITVLQIFRQLCSGLKHMHSFDPPYAHNGVKPDNVLITQRKQSHLAILMDFESAGPARKTIRSQAEALQLQEWASEHCSSHYRAPELWECPSHADIDERTDIWSLGCTLYAMMYGKSPFDYELDESSGESLHSVIKNVQIKWPEEAGSTYPDSLRQFITWMLQPHPAVRPHIDDIIIHVDKLVMKYSN

SEQ ID NO: 5589 - DNA, 721 bp, Zea mays subsp. mays
  misc_feature (1)..(721): Ceres Seq. ID no. 12349054
  misc_feature (1)..(721): Ortholog of  Ceres SEQ ID NO 12784459 as cited in SEQ ID NO 66415
acaacgacgctagggtttcactcgcagccgccgacgccaaaagcccgctcttctgccccaagccgcgacgccccacgacgccgctgcggtgccaccagagcggtggcttctccgacgctgaacgctctttccagggcgacgagagcggcctgtcgtcggcgtccccgcagccgccgctgttctacggctcaccgccacggcgagcgtcaaacccggtggtccacgacagtaggttcggcgcggactgcccgcccgtgcccgtgccggggctgtccgtgcaccggcccagcccgcggtcgtcggcggcggcgccgtccatgtcgccgcgcgggtgcacccgcgcgcggttcgcgttctagcccgcgaatagttaggtggtatgtcctagttcgtcaattaatgatgctttcttttttggtttttgatggggaattgtttttttctttgttgtccgtccgtccatgcaaccaagaaatttcatggagaatctgtacaaaagagtggctagctactacacgagagtctggtctgagagaagcaacacgaggtcagtcagtggatgaacttagagagagacattcacacgctgagagggttgataatttgtgatattttcctcctttttttcttcttcctgattttgtatattgtatatcctgctggattaacaaatactagcaaccacttatagtcagtcaacataggccatctactgccagtg

SEQ ID NO: 5590 - protein, 202 aa, Zea mays subsp. mays
  peptide (1)..(202): Ceres Seq. ID no. 12349055
TTTLGFHSQPPTPKARSSAPSRDAPRRRCGATRAVASPTLNALSRATRAACRRRPRSRRCSTAHRHGERQTRWSTTVGSARTARPCPCRGCPCTGPARGRRRRRRPCRRAGAPARGSRSSPRIVRWYVLVRQLMMLSFLVFDGELFFSLLSVRPCNQEISWRICTKEWLATTRESGLREATRGQSVDELRERHSHAERVDNL

SEQ ID NO: 5591 - protein, 118 aa, Zea mays subsp. mays
  peptide (1)..(118): Ceres Seq. ID no. 12349056
NDARVSLAAADAKSPLFCPKPRRPTTPLRCHQSGGFSDAERSFQGDESGLSSASPQPPLFYGSPPRRASNPVVHDSRFGADCPPVPVPGLSVHRPSPRSSAAAPSMSPRGCTRARFAF

SEQ ID NO: 5592 - DNA, 1409 bp, Zea mays subsp. mays
  misc_feature (1)..(1409): Ceres Seq. ID no. 12357947
  misc_feature (1)..(1409): Ortholog of  Ceres SEQ ID NO 15177718 as cited in SEQ ID NO 0
aggcttggttccccgtgaccttgccagccgcgctagatacacactcttcatcacccggagtcccggacggacgcacacgcatcgcttgcttgtcgttctccactcctcttcccccgctgctcgcctctcgattccgcctcatcgcgtccgcgaactccatgtccactgcgaccgcgaccctggccgccgcgcgatccccggctgtcgcgcttctcagcctgcgccgccgcgcacccgcggctgcccccattcgcttccccggtctccgcgtcgtctctggttgccgtcacatagctatggcttccggcggcgcactcccgcgcccccaccgacccgcttcccaagggtgctgatttatttttccgggcagtaatctcgaacatggaaaaggtttatttgagcaggaatcctacagccaaaaccattctggagcttgtacgatcttatgatggtgatcacatttgctatgatcactttgctttccggacatttggggtcaatggttatggtataaactcactttctgattttttcactgattttggttatttacctcgcgaagaactcagatttccagctaaaaagcttagggcactatggttttccccgcccactaatgatggctactctggaactggtacatatggacctttgccaaggatattcatttcagaacttcttgtggatgagttgactactcaaagccaggaaattatacataaatacattaaaacttctggcaatggaaataatcatgctgctattgcaagtacatctggggagctaacatgggagaagcccatttattcagatttccagattttgtctagggaaagtgaatatgctgcatggactcttgttaatggctatgcactaaatcatgccacaattgccacccatcgcctagaatcagatatcagaagtattaataagttcaacaaatttgtggaggacaatggcttcaagttaaattcagaaggagggattctgaaagtgagtcctgatggtctccttcaacaaagttcaacagtagctgactcatcattgtttacgtttgctgatggaataactgaatctattcctcgatcatacattgaatttgctgaacgtctcctgttaccacagtttcaaagatttacaagatgaagaggtgaaagaataccacaggcgtgatggtttttgaggtgggcaatgcggacaagatattcgaaagtacatcgaaggatcagctgacgcggagatctgcatgaacagtgaactctagatctgcatatgaccccgtgaactctctagatctgcaaacaacccagtgtgcctcttggaagtgtgttggtgactgtgaaatgattgtacctacttgggtgaaataaagcatgggagtcaataaaaagtaactgtttctttattcc

SEQ ID NO: 5593 - protein, 254 aa, Zea mays subsp. mays
  peptide (1)..(254): Ceres Seq. ID no. 12357948
MEKVYLSRNPTAKTILELVRSYDGDHICYDHFAFRTFGVNGYGINSLSDFFTDFGYLPREELRFPAKKLRALWFSPPTNDGYSGTGTYGPLPRIFISELLVDELTTQSQEIIHKYIKTSGNGNNHAAIASTSGELTWEKPIYSDFQILSRESEYAAWTLVNGYALNHATIATHRLESDIRSINKFNKFVEDNGFKLNSEGGILKVSPDGLLQQSSTVADSSLFTFADGITESIPRSYIEFAERLLLPQFQRFTR

SEQ ID NO: 5594 - DNA, 1480 bp, Zea mays subsp. mays
  misc_feature (1)..(1480): Ceres Seq. ID no. 12435038
  misc_feature (1)..(1480): Ortholog of  Ceres SEQ ID NO 14311515 as cited in SEQ ID NO 51680
  misc_feature (1)..(1480): Ortholog of  Ceres SEQ ID NO 14306553 as cited in SEQ ID NO 53121
  misc_feature (1)..(1480): Ortholog of  Ceres SEQ ID NO 14316263 as cited in SEQ ID NO 55294
  misc_feature (1)..(1480): Ortholog of  Ceres SEQ ID NO 13582301 as cited in SEQ ID NO 56509
  misc_feature (1)..(1480): Ortholog of  Ceres SEQ ID NO 13595567 as cited in SEQ ID NO 56760
  misc_feature (1)..(1480): Ortholog of  Ceres SEQ ID NO 14315035 as cited in SEQ ID NO 56880
  misc_feature (1)..(1480): Ortholog of  Ceres SEQ ID NO 13594276 as cited in SEQ ID NO 57728
  misc_feature (1)..(1480): Ortholog of  Ceres SEQ ID NO 13594147 as cited in SEQ ID NO 58975
  misc_feature (1)..(1480): Ortholog of  Ceres SEQ ID NO 15176751 as cited in SEQ ID NO 59719
  misc_feature (1)..(1480): Ortholog of  Ceres SEQ ID NO 13597380 as cited in SEQ ID NO 64054
  misc_feature (1)..(1480): Ortholog of  Ceres SEQ ID NO 12625474 as cited in SEQ ID NO 64169
  misc_feature (1)..(1480): Ortholog of  Ceres SEQ ID NO 13597502 as cited in SEQ ID NO 64681
agggacggagcagttggtcgcccgccattggtccgccgatatctatttttcctctctctccttttctctgcttcagttcccgtccacgagcaggtgtagtagcttctagtagctagcaagtcggccagcacgctcgctcgcagcagtcgctagccagacagcattggcgccggcccgctcgcacgcgcgctatggaggaggcgaggcaaaggcggcggctgtgcctgtgcctggtggtggcggccgggagctgggcgctgctggcggcggtggcgcggtgcgacccgcaggtgccgtgctacttcatcttcggcgactcgctggtggacaacggcaacaacaactacatcgtgtcgctggcgcgcgccaactacccgccctacggcatcgacttcgccgccggcccgtcggggcgcttcaccaacggactcaccaccgtcgatgtcatcgctcaacttctgggtttcgacaacttcatcccgccgttcgccgcaacgagcgcagaccagctcctgggcggcgccaacttcgcctccgcggccgccggcatccgcgccgaaaccggccagcagctgggcgggcggatcccgttcgcggggcaggtgcagaactaccagacggcggtgcagacgctggtgagcatcctgggcgaccaggacacggcgtcggaccacctgagccggtgcatcttcagcgtgggcatgggcagcaacgactacctcaacaactacttcatgccggccttctacaacacgggcagccggtacaccccggagcagttcgccgactcgctcatcgccgactaccgccgccacctgcgggtgctgtacaactacggcgcgcgcaaggtggtgatgatcggggtcggccaggtcgggtgcagccccaacgagctggcccgctacagcgccgacggcgtcacctgcgtcgaccgcatcgacgacgccatccagatgttcaaccgccgcctcgtcggcctcgtcgacgagttcaacgcgctcccaggcgcgcacttcaccttcatcaacgcctacaacatcttcgacgacatcctcgccaacgccgcctcctacgggttcacggtgaccaacgccgggtgctgcggggtcggcaggaacaacgggcaggtgacgtgcctgccctaccaggcgccgtgcgccaacagggaccagcacatcttctgggacgccttccacccgtcggaggcggccaacatcatcgtcggccgccggtcctaccgcgccgagtcgcccaacgacgtctacccgatggacatcagcacgctcgcctccatctgattctcattctgatccctccataaatataaacataaatatatatataatccacccaccactgcgcaaatgctgcaatactaaacggggctccaagaggaggtagccgtgcaattctttcctgtgtacaagctcgcgccttatctgtaatttttcatgctttcatatatttgcatcgggcactt

SEQ ID NO: 5595 - protein, 368 aa, Zea mays subsp. mays
  peptide (1)..(368): Ceres Seq. ID no. 12435039
MEEARQRRRLCLCLVVAAGSWALLAAVARCDPQVPCYFIFGDSLVDNGNNNYIVSLARANYPPYGIDFAAGPSGRFTNGLTTVDVIAQLLGFDNFIPPFAATSADQLLGGANFASAAAGIRAETGQQLGGRIPFAGQVQNYQTAVQTLVSILGDQDTASDHLSRCIFSVGMGSNDYLNNYFMPAFYNTGSRYTPEQFADSLIADYRRHLRVLYNYGARKVVMIGVGQVGCSPNELARYSADGVTCVDRIDDAIQMFNRRLVGLVDEFNALPGAHFTFINAYNIFDDILANAASYGFTVTNAGCCGVGRNNGQVTCLPYQAPCANRDQHIFWDAFHPSEAANIIVGRRSYRAESPNDVYPMDISTLASI

SEQ ID NO: 5596 - protein, 198 aa, Zea mays subsp. mays
  peptide (1)..(198): Ceres Seq. ID no. 12435040
MGSNDYLNNYFMPAFYNTGSRYTPEQFADSLIADYRRHLRVLYNYGARKVVMIGVGQVGCSPNELARYSADGVTCVDRIDDAIQMFNRRLVGLVDEFNALPGAHFTFINAYNIFDDILANAASYGFTVTNAGCCGVGRNNGQVTCLPYQAPCANRDQHIFWDAFHPSEAANIIVGRRSYRAESPNDVYPMDISTLASI

SEQ ID NO: 5597 - protein, 187 aa, Zea mays subsp. mays
  peptide (1)..(187): Ceres Seq. ID no. 12435041
MPAFYNTGSRYTPEQFADSLIADYRRHLRVLYNYGARKVVMIGVGQVGCSPNELARYSADGVTCVDRIDDAIQMFNRRLVGLVDEFNALPGAHFTFINAYNIFDDILANAASYGFTVTNAGCCGVGRNNGQVTCLPYQAPCANRDQHIFWDAFHPSEAANIIVGRRSYRAESPNDVYPMDISTLASI

SEQ ID NO: 5598 - DNA, 1366 bp, Zea mays subsp. mays
  misc_feature (1)..(1366): Ceres Seq. ID no. 12405611
  misc_feature (1)..(1366): Ortholog of  Ceres SEQ ID NO 12614389 as cited in SEQ ID NO 67917
gtgtaggcatggcactaggttcgatttgggcctaaacaggctttggtgggacatccacatccttgtccgcggcgaaacaaaatttcccacagtgagcgaggttcccctcccgactcggtgatggcggcgccggcggcggacgaggcatggtgccggaagacggtgccacgggtgatggaactggtgtgtccgcgccttccgcagcgggacgcatgcgcgctgctcgctgtcagtccctggtgctaccgtgccctcgttgctaactccaggctctgggaggtacttgatctacgtgagatgaagaatgctggaaaccgacttatttcagcactttcactggcaaggtatcgtcacctcaaagtattaaaccttgaatttgctcaagatattgaggatcgatattttgttcatctaaaagaaacgagtggcatctcactggaaaatttggaattcctgaacctaaatgcatgtcagaagatctctgataaaggaattgaagctgttaccagtctttgtcctaatcttcagcgccttgctatctattggattgtaggactgacagactcaagtattgggcacattacaaagaactgcaagcatctagtgcaccttaacttgagcggttgtaagaatatcacggataaaggaatgcagttgattgctaataattaccaaggactaaagacattgaacataaccaggtgtgttaagttgacagatgatgggcttaaccaagttcttctgaagtgttcttcacttgaaagcctaaacctttttgccctttcaagttttactgacagtgtttatagggagataggatcattaagtaatcttacatttctagacctatgtggtgctcagaatctaacggacgatggccttgcatgcatatcaagatgtggacgtctaacatacctcaatttgacttggtgtgtacgtgttactgacgctggcattttagctattgcgcaaggttgtcgagccctcgaactgttaagtttgtttggaatagttggggtgaccgatgcatgccttgaggctttatcaaaatcttgctcgtccagcctcacaacactcgacgtaaatggctgcataggtattaagaggaggagccgggatgacctgctgaagctcttcccatcactgagttgcttcaaagtgcacagctagcaggcacggtggttctcgatggctttgtattctacatctaggaaggggaagggagatgttgaggtgtgtcttgacttcatgttcttgtgttagtatatactttctttgtttcggattttctatgttcgttgattttgctatgtatggagacattgtgtatatctaagttcgtatcaagagaagttctacagcagct

SEQ ID NO: 5599 - protein, 349 aa, Zea mays subsp. mays
  peptide (1)..(349): Ceres Seq. ID no. 12405612
MAAPAADEAWCRKTVPRVMELVCPRLPQRDACALLAVSPWCYRALVANSRLWEVLDLREMKNAGNRLISALSLARYRHLKVLNLEFAQDIEDRYFVHLKETSGISLENLEFLNLNACQKISDKGIEAVTSLCPNLQRLAIYWIVGLTDSSIGHITKNCKHLVHLNLSGCKNITDKGMQLIANNYQGLKTLNITRCVKLTDDGLNQVLLKCSSLESLNLFALSSFTDSVYREIGSLSNLTFLDLCGAQNLTDDGLACISRCGRLTYLNLTWCVRVTDAGILAIAQGCRALELLSLFGIVGVTDACLEALSKSCSSSLTTLDVNGCIGIKRRSRDDLLKLFPSLSCFKVHS

SEQ ID NO: 5600 - protein, 331 aa, Zea mays subsp. mays
  peptide (1)..(331): Ceres Seq. ID no. 12405613
MELVCPRLPQRDACALLAVSPWCYRALVANSRLWEVLDLREMKNAGNRLISALSLARYRHLKVLNLEFAQDIEDRYFVHLKETSGISLENLEFLNLNACQKISDKGIEAVTSLCPNLQRLAIYWIVGLTDSSIGHITKNCKHLVHLNLSGCKNITDKGMQLIANNYQGLKTLNITRCVKLTDDGLNQVLLKCSSLESLNLFALSSFTDSVYREIGSLSNLTFLDLCGAQNLTDDGLACISRCGRLTYLNLTWCVRVTDAGILAIAQGCRALELLSLFGIVGVTDACLEALSKSCSSSLTTLDVNGCIGIKRRSRDDLLKLFPSLSCFKVHS

SEQ ID NO: 5601 - protein, 290 aa, Zea mays subsp. mays
  peptide (1)..(290): Ceres Seq. ID no. 12405614
MKNAGNRLISALSLARYRHLKVLNLEFAQDIEDRYFVHLKETSGISLENLEFLNLNACQKISDKGIEAVTSLCPNLQRLAIYWIVGLTDSSIGHITKNCKHLVHLNLSGCKNITDKGMQLIANNYQGLKTLNITRCVKLTDDGLNQVLLKCSSLESLNLFALSSFTDSVYREIGSLSNLTFLDLCGAQNLTDDGLACISRCGRLTYLNLTWCVRVTDAGILAIAQGCRALELLSLFGIVGVTDACLEALSKSCSSSLTTLDVNGCIGIKRRSRDDLLKLFPSLSCFKVHS

SEQ ID NO: 5602 - DNA, 1460 bp, Zea mays subsp. mays
  misc_feature (1)..(1460): Ceres Seq. ID no. 12405090
  misc_feature (1)..(1460): Ortholog of  Ceres SEQ ID NO 13654989 as cited in SEQ ID NO 63117
  misc_feature (1)..(1460): Ortholog of  Ceres SEQ ID NO 13657138 as cited in SEQ ID NO 65923
  misc_feature (1)..(1460): Ortholog of  Ceres SEQ ID NO 13584744 as cited in SEQ ID NO 69137
acagccagctgcccagctccgtccggcggaactcggaagccctacgctacgcctaccctcgctgtactactagctgccttcctacccgcttcccctctcctcccgacgccgtctccctccctccctccgcctccgccgtcgccgccgggacacgcgaagcttccaggtcttgtctttgggtagaacatgtcgtgctttgcgtgctgtggtgatgaagatacccaagtaccagacaccagggctcaatacccaggacaccatccagcgagggctgatgcataccgcccttctgatcaacctcccaagggtcctcagcctgtgaaaatgcaaccaatcgcagtccctgctattcctgtggatgagattagggaggtgaccaagggttttggtgatgaagctttgattggtgagggatcctttggcagagtatacttgggtgttctaagaaatggtaggagtgccgcggtcaaaaagttggattctaacaagcagccagaccaagagttcttggcccaggtgtctatggtgtcaaggctgaagcatgaaaatgttgtcgagttgcttggttactgtgctgatgggacactccgcgtccttgcttatgagttcgctacaatgggttcccttcatgatatgcttcatggaaggaaaggggttaaaggggctcaacccggtccagtcttatcgtggtcgcaacgtgtgaagatagcggttggggcagcgaaaggcctcgagtatcttcatgagaaagcgcagccccatatcatacaccgagacatcaagtctagcaacgtccttcttttcgatgacgatgtagctaagatcgctgactttgatctgtcgaaccaagctcctgacatggcagctcggcttcactcaactagggttctcggaacattcggataccatgcgcctgagtatgcgatgacggggcaactcagctctaagagtgatgtatatagttttggggttgttcttcttgagctgttgactgggaggaaacctgtcgaccatacattgccaaggggacagcagagtcttgtgacctgggctacaccaagacttagcgaagacaaggttagacagtgtgttgactcaagacttggaggggactatcctcctaaagctgttgcgaagtttgcggctgtcgccgccttgtgtgttcaatacgaagcggacttccggccgaacatgagcattgttgtcaaggcgctacaacccctgctgaatgcgcatgcgcgggcgactaaccctggagaacatgctgggtcataagctttgcgtttgcttctctccctcctcttgttcttgtatgataggtaaggtatatgactcgtcgatgtcgttgttgcggacatgtggctggcagcgtgtaatgtctgtgattattcttcccctgagctgtaaacaagattcttgtatccccacagtatttgattctttctattggtgccgttttt

SEQ ID NO: 5603 - protein, 362 aa, Zea mays subsp. mays
  peptide (1)..(362): Ceres Seq. ID no. 12405091
MSCFACCGDEDTQVPDTRAQYPGHHPARADAYRPSDQPPKGPQPVKMQPIAVPAIPVDEIREVTKGFGDEALIGEGSFGRVYLGVLRNGRSAAVKKLDSNKQPDQEFLAQVSMVSRLKHENVVELLGYCADGTLRVLAYEFATMGSLHDMLHGRKGVKGAQPGPVLSWSQRVKIAVGAAKGLEYLHEKAQPHIIHRDIKSSNVLLFDDDVAKIADFDLSNQAPDMAARLHSTRVLGTFGYHAPEYAMTGQLSSKSDVYSFGVVLLELLTGRKPVDHTLPRGQQSLVTWATPRLSEDKVRQCVDSRLGGDYPPKAVAKFAAVAALCVQYEADFRPNMSIVVKALQPLLNAHARATNPGEHAGS

SEQ ID NO: 5604 - protein, 316 aa, Zea mays subsp. mays
  peptide (1)..(316): Ceres Seq. ID no. 12405092
MQPIAVPAIPVDEIREVTKGFGDEALIGEGSFGRVYLGVLRNGRSAAVKKLDSNKQPDQEFLAQVSMVSRLKHENVVELLGYCADGTLRVLAYEFATMGSLHDMLHGRKGVKGAQPGPVLSWSQRVKIAVGAAKGLEYLHEKAQPHIIHRDIKSSNVLLFDDDVAKIADFDLSNQAPDMAARLHSTRVLGTFGYHAPEYAMTGQLSSKSDVYSFGVVLLELLTGRKPVDHTLPRGQQSLVTWATPRLSEDKVRQCVDSRLGGDYPPKAVAKFAAVAALCVQYEADFRPNMSIVVKALQPLLNAHARATNPGEHAGS

SEQ ID NO: 5605 - protein, 250 aa, Zea mays subsp. mays
  peptide (1)..(250): Ceres Seq. ID no. 12405093
MVSRLKHENVVELLGYCADGTLRVLAYEFATMGSLHDMLHGRKGVKGAQPGPVLSWSQRVKIAVGAAKGLEYLHEKAQPHIIHRDIKSSNVLLFDDDVAKIADFDLSNQAPDMAARLHSTRVLGTFGYHAPEYAMTGQLSSKSDVYSFGVVLLELLTGRKPVDHTLPRGQQSLVTWATPRLSEDKVRQCVDSRLGGDYPPKAVAKFAAVAALCVQYEADFRPNMSIVVKALQPLLNAHARATNPGEHAGS

SEQ ID NO: 5606 - DNA, 1161 bp, Zea mays subsp. mays
  misc_feature (1)..(1161): Ceres Seq. ID no. 12342860
  misc_feature (1)..(1161): Ortholog of  Ceres SEQ ID NO 13596519 as cited in SEQ ID NO 62572
  misc_feature (1)..(1161): Ortholog of  Ceres SEQ ID NO 12625108 as cited in SEQ ID NO 68102
tcccctctgccccgctctgtcatctttgactgcccctgtccggttcctcccctccatcccactccacgccacgccacccccaccggccaagcaaacacgctgcacatttcagttcagacggtccaagaacagcaccaagaaagactccttgccgctcttcttgcttggctactgactaggagagctccctgccgctggttgatcaacagaggcaggcggacggcatggtcagctctatgccgctgtcctcgctgctgctgctgctctccgcagccagcttcggcggcggcgtaaggctcggcgatggtggctacgaggactggaggctcggcaccgccacctacgtcaaggagttccagtcacaccctctcaatgatggcggtggcgcctgcgggtacggcgacctggacatcttcaggtacgggcgctacacgacggggctgagcgcggcgctgttcgggcgcggcggcgcctgcggcggctgctacgagctgcggtgcgtcaaccacatccagtggtgcctccggggcagccccacggtggtggtgacggcgacggacttctgcccggccaacatgggcctcgccgacgacgacgccggcggctggtgcaacttcccgcgggagcacctcgagctgtcggaggccgcgttcctccgcgtcgccaaggccaaggccggcatcgtgccggtgcagttccggagggtgagctgcgacagggccggcggcatgcggttcaccatcaccggtagcgcccacttcctgcaggtgctcatcaccaacgtggcggcggacggcgaggtggcggccgtgaaggtgaaggggtcgaggacggggtggatcccgatggggcggaactggggccagaactggcagtgcgacgccgacctccgcgcccagccgctgtcgttcgaggtcaccggcgggaggggcaggacggtcaccgcctacagcgtggcgccggcggactggatgttcgcgcagacgttcgagggcaagcagttcgccgagtagagatcgacgccgaaaaccaactctccggcggtggtgatgtaagtagaattatacggatgtcttcttgctcgcgagtcgtgaccggcgactcgagaaaacgagacgtattgaatggcgaaaggatttccagtcacaagaaagtggcagt

SEQ ID NO: 5607 - protein, 262 aa, Zea mays subsp. mays
  peptide (1)..(262): Ceres Seq. ID no. 12342861
MVSSMPLSSLLLLLSAASFGGGVRLGDGGYEDWRLGTATYVKEFQSHPLNDGGGACGYGDLDIFRYGRYTTGLSAALFGRGGACGGCYELRCVNHIQWCLRGSPTVVVTATDFCPANMGLADDDAGGWCNFPREHLELSEAAFLRVAKAKAGIVPVQFRRVSCDRAGGMRFTITGSAHFLQVLITNVAADGEVAAVKVKGSRTGWIPMGRNWGQNWQCDADLRAQPLSFEVTGGRGRTVTAYSVAPADWMFAQTFEGKQFAE

SEQ ID NO: 5608 - protein, 258 aa, Zea mays subsp. mays
  peptide (1)..(258): Ceres Seq. ID no. 12342862
MPLSSLLLLLSAASFGGGVRLGDGGYEDWRLGTATYVKEFQSHPLNDGGGACGYGDLDIFRYGRYTTGLSAALFGRGGACGGCYELRCVNHIQWCLRGSPTVVVTATDFCPANMGLADDDAGGWCNFPREHLELSEAAFLRVAKAKAGIVPVQFRRVSCDRAGGMRFTITGSAHFLQVLITNVAADGEVAAVKVKGSRTGWIPMGRNWGQNWQCDADLRAQPLSFEVTGGRGRTVTAYSVAPADWMFAQTFEGKQFAE

SEQ ID NO: 5609 - protein, 145 aa, Zea mays subsp. mays
  peptide (1)..(145): Ceres Seq. ID no. 12342863
MGLADDDAGGWCNFPREHLELSEAAFLRVAKAKAGIVPVQFRRVSCDRAGGMRFTITGSAHFLQVLITNVAADGEVAAVKVKGSRTGWIPMGRNWGQNWQCDADLRAQPLSFEVTGGRGRTVTAYSVAPADWMFAQTFEGKQFAE

SEQ ID NO: 5610 - DNA, 1027 bp, Zea mays subsp. mays
  misc_feature (1)..(1027): Ceres Seq. ID no. 12374422
  misc_feature (1)..(1027): Ortholog of  Ceres SEQ ID NO 13594613 as cited in SEQ ID NO 52127
atagtgccatagtggacaccatattcacccatttcagccggcagctaggtatttcttttttcaacaagccagaccgccaggcgccagtagccattgagtccttgacccgaagtcccacagccgccgccaaaagggttcctcaccatcttgaacgctcgccggaccaatcccaagcagtcctcgcagcagatggcagttcccggcggccgcaacggactcagggacgaggacgacgacatggcccagcacgccgaggccttcggcggcgtctctgacgacgaggacgtgcccccccaccttcgcgccctcgccaacgccgcccagtccggcgacgtcaccgcccttgtggctgccctcgataatcatgatggcagtattgatgttccagttgaagatggtgatactttgctccatctggcatgcttatatggtcatcttccttgtgtgcagctattgctggaacgtggagctagcttggaatgccaagacgaagaaggtgctattcctcttcacgatgcttgtgctggaggcttcactgagctggtccaatatattctcaactttgctgccaacaaggatggttgcgtagtgagaatgctcaacactattgattctgaaggcgatacgccgctccatcatgctgctagaggagaacatttggatgttgtcaagcttcttctccaggctggggcgtcccccaagaaggagaacacttacgggcagacacccgctgatatggctgaccaagacaccgaagttcgaaccctgttgactgccaagcaaattgaggcaagcacacacatgagtgatgattaagcggcattggaatccttagttgcaactggtactggtaatgttgagaaatagccgtaacatcttatctgccatccaaacttcatttgaactgaagtaatattgtaatcagactagtatggaggggttagcttagctacatgatcatgctccttttccttatcgctgcattatactaaagatgaagtggaacacccatcggtctttcttgtcc

SEQ ID NO: 5611 - protein, 208 aa, Zea mays subsp. mays
  peptide (1)..(208): Ceres Seq. ID no. 12374423
MAVPGGRNGLRDEDDDMAQHAEAFGGVSDDEDVPPHLRALANAAQSGDVTALVAALDNHDGSIDVPVEDGDTLLHLACLYGHLPCVQLLLERGASLECQDEEGAIPLHDACAGGFTELVQYILNFAANKDGCVVRMLNTIDSEGDTPLHHAARGEHLDVVKLLLQAGASPKKENTYGQTPADMADQDTEVRTLLTAKQIEASTHMSDD

SEQ ID NO: 5612 - protein, 192 aa, Zea mays subsp. mays
  peptide (1)..(192): Ceres Seq. ID no. 12374424
MAQHAEAFGGVSDDEDVPPHLRALANAAQSGDVTALVAALDNHDGSIDVPVEDGDTLLHLACLYGHLPCVQLLLERGASLECQDEEGAIPLHDACAGGFTELVQYILNFAANKDGCVVRMLNTIDSEGDTPLHHAARGEHLDVVKLLLQAGASPKKENTYGQTPADMADQDTEVRTLLTAKQIEASTHMSDD

SEQ ID NO: 5613 - DNA, 1345 bp, Zea mays subsp. mays
  misc_feature (1)..(1345): Ceres Seq. ID no. 13494449
  misc_feature (1)..(1345): Ortholog of  Ceres SEQ ID NO 14307589 as cited in SEQ ID NO 20466
  misc_feature (1)..(1345): Ortholog of  Ceres SEQ ID NO 14316404 as cited in SEQ ID NO 57641
  misc_feature (1)..(1345): Ortholog of  Ceres SEQ ID NO 12611159 as cited in SEQ ID NO 59821
gttgagaccgcagagcgctcgccgaagcccgtcctgtcctgtagctagctgatctccctccgaaactctctgctcgcccgctgcctgctggaagcttggcgcggtcccggcggcggcattctccggcaatggggtgcaaggcgtgcgacaagcccaagcccagctaccgcaagggcctgtggtcgccggaggaggaccagaagctccgcgactacatcctcctccacggccacggctgctggagcgcgctccccgccaaagccgggctccagcggaacggcaagagctgcaggctgcggtggatcaactacctccggccgggcctgaagcacggcaccttctccccggaggaggaggagacggtgatgagcctccacgccacgctcggcaacaagtggtctaggatcgccaaacacctgcctggcaggaccgacaacgaggtcaagaaccactggaactcgtacctcaagaagagggtcgagggcaaggatggacccagcacgccgccgtccgattcagacgactcgcattgcgccaagcccgggggcggaagcacggcgcgggagacgggagacgaccgcccagcggactactccggctcgtcggagccgcgcgagccgtcgtcgtcgtcgtcgcccgacacgagctgcctgacgggcccgcccaaggtcatgttcgtggactggctcgacatggactgcatgggtggtggtggtggtggcccgccgggcgcggcggcagcggcagcggcacctggtctgggcgctgctgcgggcgtggccagggccagcacgggcgatgatcagatgacgatggatgatgggtcggcgtccggtcgtgccgacgtgtccctgcacggtacgttcggtgacagcggcggcgccggctgctgggagttccacgagagcttcgatcagatgcaggcggccggcttctgcgacctgctctcctccattggcgagtactacttcggactcgactaggctctcggccctggttggtgatcggtcgttgctcaaaggatttgcgcgtttttttttttttaactttgttagaagtttcgatggatggctttgtctgtgcttgtaaattgttgtcgtgtacggtatagatagagcaattttaaaggcagataaaagtcaaggacggtgacgagtcacgagtgtcgtgtttcttgcgggttcactttggggaggagtggagagcaccgacggatgggtaggaagatttattagttatatatgaggatataaagtacttaagagttgcnacgcttgcagctagcgattgggctgcacaaactgtgctttcttaatttgaaaatggggcgtcctcttttagtgtt

SEQ ID NO: 5614 - protein, 284 aa, Zea mays subsp. mays
  peptide (1)..(284): Ceres Seq. ID no. 15222931
MGCKACDKPKPSYRKGLWSPEEDQKLRDYILLHGHGCWSALPAKAGLQRNGKSCRLRWINYLRPGLKHGTFSPEEEETVMSLHATLGNKWSRIAKHLPGRTDNEVKNHWNSYLKKRVEGKDGPSTPPSDSDDSHCAKPGGGSTARETGDDRPADYSGSSEPREPSSSSSPDTSCLTGPPKVMFVDWLDMDCMGGGGGGPPGAAAAAAAPGLGAAAGVARASTGDDQMTMDDGSASGRADVSLHGTFGDSGGAGCWEFHESFDQMQAAGFCDLLSSIGEYYFGLD

SEQ ID NO: 5615 - protein, 205 aa, Zea mays subsp. mays
  peptide (1)..(205): Ceres Seq. ID no. 15222932
MSLHATLGNKWSRIAKHLPGRTDNEVKNHWNSYLKKRVEGKDGPSTPPSDSDDSHCAKPGGGSTARETGDDRPADYSGSSEPREPSSSSSPDTSCLTGPPKVMFVDWLDMDCMGGGGGGPPGAAAAAAAPGLGAAAGVARASTGDDQMTMDDGSASGRADVSLHGTFGDSGGAGCWEFHESFDQMQAAGFCDLLSSIGEYYFGLD

SEQ ID NO: 5616 - DNA, 1041 bp, Zea mays subsp. mays
  misc_feature (1)..(1041): Ceres Seq. ID no. 13498730
  misc_feature (1)..(1041): Ortholog of  Ceres SEQ ID NO 14304408 as cited in SEQ ID NO 58051
  misc_feature (1)..(1041): Ortholog of  Ceres SEQ ID NO 14314759 as cited in SEQ ID NO 59915
  misc_feature (1)..(1041): Ortholog of  Ceres SEQ ID NO 13661769 as cited in SEQ ID NO 61435
  misc_feature (1)..(1041): Ortholog of  Ceres SEQ ID NO 13600585 as cited in SEQ ID NO 0
taatcgaaaaaggtctctagtctccactccgctgtcgctccggcccagcagctcgaccaccaccgctccgcaggcaggaagccgccaaggacatggacgacgctcaggagcctccctcccctccctccccctcgcagtcatcctcctcctcttcctcgtcgtcctccgtggccccgaacccgaagaagcgggcgcgcaaggacggcagccggcacccgacgtaccgcggcgtgcgcatgcggagctggggcaagtgggtgtcggagatcagggagccccgcaagaagtctcgcatctggctgggcaccttcgccaccgcggagatggcggcgcgcgcgcacgacgtggccgcgctcgccatcaagggcgcgcgcgacgcgcacctcaacttcccgggcctcgcgcacctgctcccgcgcccggccaccgcggcgcccaaggacgtgcaggccgcggccgcgctcgccgcggccgccgacttccctctgccgccgtcccccggcggcgccaatgccaagagccccgagagcagcagctccggctccgcctccgcctccgcctccgacgacgccagcgccgcctcgccggcggcgccgcaggacgccgagcccaacccggacgacgcgctgttcgacctcccggacctgcttctggacctgagatgctgcgggccgtcgtcgtgggccgtcgacgacgacgtggccggcggcggcgcgttccggatcatcgaggagccgctgctgtgggagtactgaactgatcaatgccaccgcgccagtcctgtccttgagcggttggcagtgatcagcgagttcatgcatcggtagctgttgagtgttagatcgaccggacggacacatgtaaatgcagctcctttccgctcctctgtttcgtgctctggattactctgctgtttcttctctttatgccagatttaggtgccgcgcttgtataaagttagttcctttttttccctccttctcttgcttgatttggaagacaagaatatgtataaccataagaagcatcttatcttgtgcc

SEQ ID NO: 5617 - protein, 252 aa, Zea mays subsp. mays
  peptide (1)..(252): Ceres Seq. ID no. 13498731
NRKRSLVSTPLSLRPSSSTTTAPQAGSRQGHGRRSGASLPSLPLAVILLLFLVVLRGPEPEEAGAQGRQPAPDVPRRAHAELGQVGVGDQGAPQEVSHLAGHLRHRGDGGARARRGRARHQGRARRAPQLPGPRAPAPAPGHRGAQGRAGRGRARRGRRLPSAAVPRRRQCQEPREQQLRLRLRLRLRRRQRRLAGGAAGRRAQPGRRAVRPPGPASGPEMLRAVVVGRRRRRGRRRRVPDHRGAAAVGVLN

SEQ ID NO: 5618 - protein, 220 aa, Zea mays subsp. mays
  peptide (1)..(220): Ceres Seq. ID no. 13498732
MDDAQEPPSPPSPSQSSSSSSSSSSVAPNPKKRARKDGSRHPTYRGVRMRSWGKWVSEIREPRKKSRIWLGTFATAEMAARAHDVAALAIKGARDAHLNFPGLAHLLPRPATAAPKDVQAAAALAAAADFPLPPSPGGANAKSPESSSSGSASASASDDASAASPAAPQDAEPNPDDALFDLPDLLLDLRCCGPSSWAVDDDVAGGGAFRIIEEPLLWEY

SEQ ID NO: 5619 - protein, 172 aa, Zea mays subsp. mays
  peptide (1)..(172): Ceres Seq. ID no. 13498733
MRSWGKWVSEIREPRKKSRIWLGTFATAEMAARAHDVAALAIKGARDAHLNFPGLAHLLPRPATAAPKDVQAAAALAAAADFPLPPSPGGANAKSPESSSSGSASASASDDASAASPAAPQDAEPNPDDALFDLPDLLLDLRCCGPSSWAVDDDVAGGGAFRIIEEPLLWEY

SEQ ID NO: 5620 - DNA, 1578 bp, Zea mays subsp. mays
  misc_feature (1)..(1578): Ceres Seq. ID no. 12349057
  misc_feature (1)..(1578): Ortholog of  Ceres SEQ ID NO 13503499 as cited in SEQ ID NO 68684
accccaacccaacccctgccgcgcccgcacccagcgccccgagccctgctcccccatcgtcttcttccttgtccgtctccactaccgaccaacggctgcctgctcacacttcgccactactgctgctgcgcgttggcgagcgcgcgtggttcacgagcgagctccaccacaagcccagtcgcgcacggcagccgttttgcttgttttgtttgcttaccgcctcttccgtccttcctcttttgcgcggcctggctggctgggctagctagctgttctgttcattccgagttcccggcatagcacacgaggttggagttggaggcgtaccgagggagcagacagcagaggacactataagagtagctagccctacccaacatcttcagccgtgcttgccaacttggagagagagagagagaaaagagaagagaagggagtgatcgcaggaaggaggatcggagtgatgggagacgcagcagagaccaacaagactcttcacaactggatgggcgagccgaggccgaggtcgagcgaccagcgcgacgaggaggagacgcttcagctcagcctcggcctccccggaggaggagcaagtgcgggtggtgtggtagcacccgccgcctggagaatgctgccggccagagacgaggagatgcgctctgctgctgctgtcgtcgacacctccctgctctctctcggctactccgccccagctttctcgccccgctcaccaggcaaggcaaaggggtccccagcagcagctacagagaatgcccttgcatccaccaacaacgcctcccagagaagatctccaaataccccggttattgggtggcctccagttcgtgccttcagaagaaatctggccacctctagcagagcatctcttgaaaatcagaatgggaagaaggcagccaaacctgaacagaccacaaaaagagctccatttgtaaagatcaacatggacggcatccctattggtagaaaaatcgacctgagtgccctcggtagttacgatgagctgtctctgtctgtcgacaagctattccgggggcttcttgcagcacaacaagaccctctggctgccggcgcaaaggagtgttcacaggaagaggtggcgatatcgggtttactagatggaactggggagtacactctggtttatgaggattatgaaggcgatagggtgctggttggcgatgtcccctgggggatgtttgtttcttcggtgaagaggctgcgcgttctgaagacatctgacctctcttcatctctaacagcacctcctggccagaagaggacggtaaccgagtgtccagtgtttacctcttagacacttccttgcagtgatgttggtgtgctgtgaagaagaaaacgtcttctgagcttgtatcatctttcttcctggtttcttcctcttcttttccctactttctcttggaaggaatcatcaaagaaccgaaccgaccttttgggttttcctgctcttgtttattttgtttctctttccgggaagcgatgtgaccttttgggttgtatgtaaatgttcagacgaaccagctctatgtttatgcagcc

SEQ ID NO: 5621 - protein, 289 aa, Zea mays subsp. mays
  peptide (1)..(289): Ceres Seq. ID no. 12349058
MGDAAETNKTLHNWMGEPRPRSSDQRDEEETLQLSLGLPGGGASAGGVVAPAAWRMLPARDEEMRSAAAVVDTSLLSLGYSAPAFSPRSPGKAKGSPAAATENALASTNNASQRRSPNTPVIGWPPVRAFRRNLATSSRASLENQNGKKAAKPEQTTKRAPFVKINMDGIPIGRKIDLSALGSYDELSLSVDKLFRGLLAAQQDPLAAGAKECSQEEVAISGLLDGTGEYTLVYEDYEGDRVLVGDVPWGMFVSSVKRLRVLKTSDLSSSLTAPPGQKRTVTECPVFTS

SEQ ID NO: 5622 - protein, 275 aa, Zea mays subsp. mays
  peptide (1)..(275): Ceres Seq. ID no. 12349059
MGEPRPRSSDQRDEEETLQLSLGLPGGGASAGGVVAPAAWRMLPARDEEMRSAAAVVDTSLLSLGYSAPAFSPRSPGKAKGSPAAATENALASTNNASQRRSPNTPVIGWPPVRAFRRNLATSSRASLENQNGKKAAKPEQTTKRAPFVKINMDGIPIGRKIDLSALGSYDELSLSVDKLFRGLLAAQQDPLAAGAKECSQEEVAISGLLDGTGEYTLVYEDYEGDRVLVGDVPWGMFVSSVKRLRVLKTSDLSSSLTAPPGQKRTVTECPVFTS

SEQ ID NO: 5623 - protein, 234 aa, Zea mays subsp. mays
  peptide (1)..(234): Ceres Seq. ID no. 12349060
MLPARDEEMRSAAAVVDTSLLSLGYSAPAFSPRSPGKAKGSPAAATENALASTNNASQRRSPNTPVIGWPPVRAFRRNLATSSRASLENQNGKKAAKPEQTTKRAPFVKINMDGIPIGRKIDLSALGSYDELSLSVDKLFRGLLAAQQDPLAAGAKECSQEEVAISGLLDGTGEYTLVYEDYEGDRVLVGDVPWGMFVSSVKRLRVLKTSDLSSSLTAPPGQKRTVTECPVFTS

SEQ ID NO: 5624 - DNA, 1685 bp, Zea mays subsp. mays
  misc_feature (1)..(1685): Ceres Seq. ID no. 12409422
  misc_feature (1)..(1685): Ortholog of  Ceres SEQ ID NO 15171245 as cited in SEQ ID NO 52264
  misc_feature (1)..(1685): Ortholog of  Ceres SEQ ID NO 14303576 as cited in SEQ ID NO 68428
attcgccctgcctctagctgctgcttcttccaggatcggggatcggagcttgtgctgctactgctactataccagcgctagctagcagcagccgccggccggctcgcgcaagctaaggaagggtcgacatgacgatggggctccgcgtccgcgactcctccgcgctgctggctctggccgtcgcgctcgcctgctgctccgttgcagtggtggcctacgaccccctggacccgaacggcaacatcaccatcaagtgggacgtgatctcgtggacgcccgacgggtacgtggcgatggtgacgatgagcaactaccagatgtaccggcacatcatggcgcccgggtggacgttggggtggtcgtgggccaagaaggaggtgatctggtccatcgtgggggcgcaggccacggagcagggggactgctccaagttcaagggcggcatcccgcactgctgcaagcgcaccccggccgtggtggacctcctcccgggggtgccctacaaccagcagatcgccaactgctgcaaggccggcgtggtgtcggcgtacgggcaggacccggcggggtccgtctccgcgttccaggtctccgtcggcctggccggtaccaccaacaagacggtgaagctgcccaggaacttcacgctcatggggcccgggctgggctacacctgcgggcccgccgccgtggtgccgtccaccgtgtactggacgcccgaccaccggcgccggacgcaggcgctcatgacgtggacggtgacctgcacctactcgcagcagctggcgtcccggtacccgtcctgctgcgtctccttctcctccttctacaacagcaccatcgtgccgtgcgcccggtgcgcgtgcggctgcggcggccacggcggccacgcgggtccgggcggctgcatcgagggggactccaagcgcgcgctgtcggccggggtgaacacgccgngcaaggacggccaggcgctgctgcagtgcacgccgcacatgtgccccatccgggtgcactggcangtcaagctcaactacaaggantactggcgcgccaagatcgccatcaccaactacaactacaggatgaactacacgcagtggacgctggtggcgcagcaccccaacctggacaacgtcaccgaggtcttcagcttccagtacaagccgctgcaaccatacgggagcatcaatgacactggcatgttctacgggctcaagttctacaacgactttctcatggaggccggcccgttcggcaacgtgcagtcggaggtgctcatgcgcaaggacgcaaggaccttcaccttcagcatgggctgggcgttcccgcgcaagatctacttcaacggcgacgagtgcaagatgccgccgccggactcctacccctacctgcccaacgccgcgcccgtcgtcgcctcgcagctggtcctgtccgccgccgcctcggcgttcctactgttgctgctcctggtggcatgaccgtgaccgaaccaagggcaaggcctccgttttgttttcccgtctcgtcccgtgggcagggagcagacttcagtaggcagggcattttatttggtttttttgccaaggattcaacacttgggttttcgtcagaggaaaactgtcgtgtatgtagtgtgagttgcaggtcgtcggatccccacgtacaagacaatctttggatcg

SEQ ID NO: 5625 - protein, 450 aa, Zea mays subsp. mays
  peptide (1)..(450): Ceres Seq. ID no. 12409423
  misc_feature (277)..(277): Xaa is any aa, unknown or other
  misc_feature (298)..(298): Xaa is any aa, unknown or other
  misc_feature (305)..(305): Xaa is any aa, unknown or other
MTMGLRVRDSSALLALAVALACCSVAVVAYDPLDPNGNITIKWDVISWTPDGYVAMVTMSNYQMYRHIMAPGWTLGWSWAKKEVIWSIVGAQATEQGDCSKFKGGIPHCCKRTPAVVDLLPGVPYNQQIANCCKAGVVSAYGQDPAGSVSAFQVSVGLAGTTNKTVKLPRNFTLMGPGLGYTCGPAAVVPSTVYWTPDHRRRTQALMTWTVTCTYSQQLASRYPSCCVSFSSFYNSTIVPCARCACGCGGHGGHAGPGGCIEGDSKRALSAGVNTPXKDGQALLQCTPHMCPIRVHWXVKLNYKXYWRAKIAITNYNYRMNYTQWTLVAQHPNLDNVTEVFSFQYKPLQPYGSINDTGMFYGLKFYNDFLMEAGPFGNVQSEVLMRKDARTFTFSMGWAFPRKIYFNGDECKMPPPDSYPYLPNAAPVVASQLVLSAAASAFLLLLLLVA

SEQ ID NO: 5626 - protein, 448 aa, Zea mays subsp. mays
  peptide (1)..(448): Ceres Seq. ID no. 12409424
  misc_feature (275)..(275): Xaa is any aa, unknown or other
  misc_feature (296)..(296): Xaa is any aa, unknown or other
  misc_feature (303)..(303): Xaa is any aa, unknown or other
MGLRVRDSSALLALAVALACCSVAVVAYDPLDPNGNITIKWDVISWTPDGYVAMVTMSNYQMYRHIMAPGWTLGWSWAKKEVIWSIVGAQATEQGDCSKFKGGIPHCCKRTPAVVDLLPGVPYNQQIANCCKAGVVSAYGQDPAGSVSAFQVSVGLAGTTNKTVKLPRNFTLMGPGLGYTCGPAAVVPSTVYWTPDHRRRTQALMTWTVTCTYSQQLASRYPSCCVSFSSFYNSTIVPCARCACGCGGHGGHAGPGGCIEGDSKRALSAGVNTPXKDGQALLQCTPHMCPIRVHWXVKLNYKXYWRAKIAITNYNYRMNYTQWTLVAQHPNLDNVTEVFSFQYKPLQPYGSINDTGMFYGLKFYNDFLMEAGPFGNVQSEVLMRKDARTFTFSMGWAFPRKIYFNGDECKMPPPDSYPYLPNAAPVVASQLVLSAAASAFLLLLLLVA

SEQ ID NO: 5627 - protein, 395 aa, Zea mays subsp. mays
  peptide (1)..(395): Ceres Seq. ID no. 12409425
  misc_feature (222)..(222): Xaa is any aa, unknown or other
  misc_feature (243)..(243): Xaa is any aa, unknown or other
  misc_feature (250)..(250): Xaa is any aa, unknown or other
MVTMSNYQMYRHIMAPGWTLGWSWAKKEVIWSIVGAQATEQGDCSKFKGGIPHCCKRTPAVVDLLPGVPYNQQIANCCKAGVVSAYGQDPAGSVSAFQVSVGLAGTTNKTVKLPRNFTLMGPGLGYTCGPAAVVPSTVYWTPDHRRRTQALMTWTVTCTYSQQLASRYPSCCVSFSSFYNSTIVPCARCACGCGGHGGHAGPGGCIEGDSKRALSAGVNTPXKDGQALLQCTPHMCPIRVHWXVKLNYKXYWRAKIAITNYNYRMNYTQWTLVAQHPNLDNVTEVFSFQYKPLQPYGSINDTGMFYGLKFYNDFLMEAGPFGNVQSEVLMRKDARTFTFSMGWAFPRKIYFNGDECKMPPPDSYPYLPNAAPVVASQLVLSAAASAFLLLLLLVA

SEQ ID NO: 5628 - DNA, 1237 bp, Zea mays subsp. mays
  misc_feature (1)..(1237): Ceres Seq. ID no. 12356266
  misc_feature (1)..(1237): Ortholog of  Ceres SEQ ID NO 13594377 as cited in SEQ ID NO 58177
  misc_feature (1)..(1237): Ortholog of  Ceres SEQ ID NO 15224613 as cited in SEQ ID NO 58938
  misc_feature (1)..(1237): Ortholog of  Ceres SEQ ID NO 13664309 as cited in SEQ ID NO 60596
atattcattgttcggcccccaagcgagagcatactccgcattgcgaatttgcaagctaaccatggcaccctcgcatgcccactctcgctccgtgccgctcctcctcctcgtgataggagtttgttgctgctgcagtggagcagtcatcgccccgtcgtcggtcgtctccgacgacgacccgacctgtcctcgggagccgacggcggcggtggcagccgtgtcgtcagctgagtctagctacgtcgagccacgccggtgccagccgccggcgccgcacatcgcggtggccgtgttcccctacgacgtcgacccgatgcagttcgcgctgaacctggagtacaccgaggccgagttcttcctgcacggcgcgtacggcgtggggctcgaccacctcgcgccgaggctggcgctgggcggcccgcctccggtgggcgcccggaaggccaacctcgacgaggtgacgaggcgcatcgtcgcggagtttggcctgcaggaagttggccacatcagggctatccagcgcacggtcggcgggattcctcggccgttgatagacctcagcgcccacaacttcgctagggtgatggacgaggcgttcgggacccgcctggaccctcccttcgatccctacgtcaacagcctcaacttcctgctggcctcgtacgtcatcccctacctcggcatcaacggctacgtcggcaccaaccccatcgtcgacggctaccagacaaagaagcttctggcagggctgctgggggtggaggcggcgcaggacgcggtgttccgggcacgcctcttcgagcgcctcggcgaggccgtgccaccgtacgggaacatcacggtggccgagttcacggaccgcgtgtcggcgctgcgcaaccggctggggcggtgcggggtcaaggacgaggggctcacggtgccccgccggctcggcgccgagggcgccatctgcaccaacgtgctctccgcggacagggactcgctctcctacgcccggacgcccgccgagctgctcagcatcctctacctcaccggcgacgagcgcgtgcccggcgggttctatccggagggtgccaacgggaggatcgccaggtcctttcttggcaagccacatggaaactagccaatgcaagctgccgatttgaactacgtgtccgtgcagaaacccggaacatatatatgcatggttggatgaacttgcaaagtttgctgaataatataacagtggattgat

SEQ ID NO: 5629 - protein, 374 aa, Zea mays subsp. mays
  peptide (1)..(374): Ceres Seq. ID no. 12356267
YSLFGPQARAYSALRICKLTMAPSHAHSRSVPLLLLVIGVCCCCSGAVIAPSSVVSDDDPTCPREPTAAVAAVSSAESSYVEPRRCQPPAPHIAVAVFPYDVDPMQFALNLEYTEAEFFLHGAYGVGLDHLAPRLALGGPPPVGARKANLDEVTRRIVAEFGLQEVGHIRAIQRTVGGIPRPLIDLSAHNFARVMDEAFGTRLDPPFDPYVNSLNFLLASYVIPYLGINGYVGTNPIVDGYQTKKLLAGLLGVEAAQDAVFRARLFERLGEAVPPYGNITVAEFTDRVSALRNRLGRCGVKDEGLTVPRRLGAEGAICTNVLSADRDSLSYARTPAELLSILYLTGDERVPGGFYPEGANGRIARSFLGKPHGN

SEQ ID NO: 5630 - protein, 354 aa, Zea mays subsp. mays
  peptide (1)..(354): Ceres Seq. ID no. 12356268
MAPSHAHSRSVPLLLLVIGVCCCCSGAVIAPSSVVSDDDPTCPREPTAAVAAVSSAESSYVEPRRCQPPAPHIAVAVFPYDVDPMQFALNLEYTEAEFFLHGAYGVGLDHLAPRLALGGPPPVGARKANLDEVTRRIVAEFGLQEVGHIRAIQRTVGGIPRPLIDLSAHNFARVMDEAFGTRLDPPFDPYVNSLNFLLASYVIPYLGINGYVGTNPIVDGYQTKKLLAGLLGVEAAQDAVFRARLFERLGEAVPPYGNITVAEFTDRVSALRNRLGRCGVKDEGLTVPRRLGAEGAICTNVLSADRDSLSYARTPAELLSILYLTGDERVPGGFYPEGANGRIARSFLGKPHGN

SEQ ID NO: 5631 - protein, 270 aa, Zea mays subsp. mays
  peptide (1)..(270): Ceres Seq. ID no. 12356269
MQFALNLEYTEAEFFLHGAYGVGLDHLAPRLALGGPPPVGARKANLDEVTRRIVAEFGLQEVGHIRAIQRTVGGIPRPLIDLSAHNFARVMDEAFGTRLDPPFDPYVNSLNFLLASYVIPYLGINGYVGTNPIVDGYQTKKLLAGLLGVEAAQDAVFRARLFERLGEAVPPYGNITVAEFTDRVSALRNRLGRCGVKDEGLTVPRRLGAEGAICTNVLSADRDSLSYARTPAELLSILYLTGDERVPGGFYPEGANGRIARSFLGKPHGN

SEQ ID NO: 5632 - DNA, 1354 bp, Zea mays subsp. mays
  misc_feature (1)..(1354): Ceres Seq. ID no. 12405084
  misc_feature (1)..(1354): Ortholog of  Ceres SEQ ID NO 13596359 as cited in SEQ ID NO 68396
atcgaaaagctcgttcagtcgtcctcttcctccaaacctttccgctgccggtgaacttcctccacctgaagcccctaccacgataagccctaatcccagcgccacctcgatggcgaccacctctttctttcatccgctcgccgccccgatggaccgcggtaggtgtgtgttttcgtcgctgcccgttcagcctaaccatccccgcccgtacagcgccccggcgaccggcgccgnttctcgtcgtcngcgctaagcgcgcnnggcagccagcnccctgntgcngcngcntcgcgtnanccgcgaatcccagcgcnggtcccgaagccgggacgtggnaagaagaggaggaggaggtcgagggaggagatgccctggatccaggacaaggcgctggacctcgtggagttcactggcaccgtcacacaggccatcccagggccccgtgttggctctagccctgttccatggcttctcgcggttcccctcgcctacgtcggggtctcctttgtgctcgcggtcgtccgcaccgtgcgcaagttcacctcgccgcacactaagaagaagcgaagggtgagtaagaatatattcttgttgaagtcactagatgatctgtttcagaagggcagggaggcaataaattatcctgctcttcaggacctaatgcaaaagacaggatttgacatggatgatgtagtaaggaagtacatccgttacacactgaatgaaaaacagttcagtcctgatgtggttgtggatctcatacatcttaggaaggcatcaatgctggaagatgcagaagttgctgaaattttaaatgagatttcaagacgaattgtccgggaaaaagggccagtagttatggacttattctggttttacagagcaaggttttaagcggaagcttgctgtacaagcactgtttggaaaaatcctatacttatcagaacttccggagttctgttcacgggacagctcacttgtagtcaaagaaatctttggagttacagatgaggatgcagacagcctgcggattcacaccctatcancaacaggtgatatcgaatctatacagaagatggtggacgatctagacctagaacaaggtcccccatcatcgtcttgagttatggtggtggaataatgctaaacatcttcgttgatagtgttgcaattttagattgatgtgagtttctcgaatcttttcgtttagttttttcagctgctgaagtaggacttgggcctgtgaacacaggatactttcggctggagcctggaggttttgtaaattgcctctcgattaggataacgtatgtcagacctgcccatgatttgagtaaacgagaatactattatt

SEQ ID NO: 5633 - protein, 175 aa, Zea mays subsp. mays
  peptide (1)..(175): Ceres Seq. ID no. 12405085
MPWIQDKALDLVEFTGTVTQAIPGPRVGSSPVPWLLAVPLAYVGVSFVLAVVRTVRKFTSPHTKKKRRVSKNIFLLKSLDDLFQKGREAINYPALQDLMQKTGFDMDDVVRKYIRYTLNEKQFSPDVVVDLIHLRKASMLEDAEVAEILNEISRRIVREKGPVVMDLFWFYRARF

SEQ ID NO: 5634 - DNA, 1766 bp, Zea mays subsp. mays
  misc_feature (1)..(1766): Ceres Seq. ID no. 12408037
  misc_feature (1)..(1766): Ortholog of  Ceres SEQ ID NO 15177298 as cited in SEQ ID NO 52711
caggctccctcctcctccctgcaaatcctgcagacaccaccgctcgtttttctctccgggacaggagaaaaggggagagagaggtgaggcgcggtgtccgcccgatctgctctgccccgacgcagctgttacgacctcctcagtctcaggagcaagatgggtgccggcggcaggatgaccgagaaggagcgggagaagcaggagcagctcgcccgagctaccggtggcgccgcgatgcagcggtcgccggtggagaagcctccgttcactctgggtcagatcaagaaggccatcccgccacactgcttcgagcgctcggtgcctcaagtccttctcgtacgtggtccacgacctggtgatcgccgcggcgctcctctacttcgcgctggccatcataccggcgctcccaagcccgctcggctacgcggcctggccgctgtactggatcgcgcaggggtgcgtgtgcaccggcgtgtgggtcatcgcgcacgagtgcggccaccacgccttctcggactactcgctcctggacgacgtggtcggcctggtgctgcactcgtcgctcatggtgccctacttctcgtggaagtacagccaccggcgccaccactccaacactgggtccctggagcgcgacgaggtgttcgtgcccaagaagaaggaggcgctgccgtggtacaccccgtacgtgtacaacaacccggtcggccggctggtgcacatcgtggtgcagctcaccctcgggtggcccgctgtacctggcgaccaacgcgtcggggcggcccgtacccgcgcttcgcctgccacttcgacccctacggccccatctacaacgaccgggagcgcgcccagatcttcgtctcggacgccggcgtcgtggccgtggcgttcgggctgtacaagctggcggcggcgttcggggtctggtgggtggtgcgcgtgtacgccgtgccgctgctgatcgtgaacgcgtggctggtgctcatcacctacctgcagcacacccacccgtcgctcccccactacgactcgagcgagtgggactggctgcgcggcgcgctggccaccatggaccgcgactacggcatcctcaaccgcgtgttccacaacatcacggacacgcacgtcgcgcaccacctcttctccaccatgccgcactaccacgccatggaggccaccaaggcgatcaggcccatcctcggcgactactaccacttcgacccgacccctgtggccaaggcgacctggcgcgaggccggggaatgcatctacgtcgagcccgaggaccgcaagggcgtcttctctacaacaagaagttctagccgccgccgctcgcagagctgagaggacgctaccataggaatgggagcaggaaccaggaggaggagacggtactcgccccaaagtctccgtctacctatctaatcgttagtcgtcagtcttttagacgggaagagagagcatttggacacagagacgaaggcttactgcagtgccatcgctagagctgccatcaagtacaagtaggcaaattcgtcaacttagtgtgtcccatgttgtttttcttagtcgtccgctgctgtaggctttccggcggcggtcgtttgtgtggttggcatccgtggccatgcctgtgcgtgcgtggccgcgcttgtcgtgtgcgtctgtcgtcgcgttggcgtcgtctcttcgtgctccccgtgtgttgttgtaaaacaagaagatgttttctggtgtctttggcggaataacagatcgtccgaacg

SEQ ID NO: 5635 - protein, 395 aa, Zea mays subsp. mays
  peptide (1)..(395): Ceres Seq. ID no. 12408038
MGAGGRMTEKEREKQEQLARATGGAAMQRSPVEKPPFTLGQIKKAIPPHCFERSVPQVLLVRGPRPGDRRGAPLLRAGHHTGAPKPARLRGLAAVLDRAGVRVHRRVGHRARVRPPRLLGLLAPGRRGRPGAALVAHGALLLVEVQPPAPPLQHWVPGARRGVRAQEEGGAAVVHPVRVQQPGRPAGAHRGAAHPRVARCTWRPTRRGGPYPRFACHFDPYGPIYNDRERAQIFVSDAGVVAVAFGLYKLAAAFGVWWVVRVYAVPLLIVNAWLVLITYLQHTHPSLPHYDSSEWDWLRGALATMDRDYGILNRVFHNITDTHVAHHLFSTMPHYHAMEATKAIRPILGDYYHFDPTPVAKATWREAGECIYVEPEDRKGVFSTTRSSSRRRSQS

SEQ ID NO: 5636 - protein, 389 aa, Zea mays subsp. mays
  peptide (1)..(389): Ceres Seq. ID no. 12408039
MTEKEREKQEQLARATGGAAMQRSPVEKPPFTLGQIKKAIPPHCFERSVPQVLLVRGPRPGDRRGAPLLRAGHHTGAPKPARLRGLAAVLDRAGVRVHRRVGHRARVRPPRLLGLLAPGRRGRPGAALVAHGALLLVEVQPPAPPLQHWVPGARRGVRAQEEGGAAVVHPVRVQQPGRPAGAHRGAAHPRVARCTWRPTRRGGPYPRFACHFDPYGPIYNDRERAQIFVSDAGVVAVAFGLYKLAAAFGVWWVVRVYAVPLLIVNAWLVLITYLQHTHPSLPHYDSSEWDWLRGALATMDRDYGILNRVFHNITDTHVAHHLFSTMPHYHAMEATKAIRPILGDYYHFDPTPVAKATWREAGECIYVEPEDRKGVFSTTRSSSRRRSQS

SEQ ID NO: 5637 - protein, 369 aa, Zea mays subsp. mays
  peptide (1)..(369): Ceres Seq. ID no. 12408040
MQRSPVEKPPFTLGQIKKAIPPHCFERSVPQVLLVRGPRPGDRRGAPLLRAGHHTGAPKPARLRGLAAVLDRAGVRVHRRVGHRARVRPPRLLGLLAPGRRGRPGAALVAHGALLLVEVQPPAPPLQHWVPGARRGVRAQEEGGAAVVHPVRVQQPGRPAGAHRGAAHPRVARCTWRPTRRGGPYPRFACHFDPYGPIYNDRERAQIFVSDAGVVAVAFGLYKLAAAFGVWWVVRVYAVPLLIVNAWLVLITYLQHTHPSLPHYDSSEWDWLRGALATMDRDYGILNRVFHNITDTHVAHHLFSTMPHYHAMEATKAIRPILGDYYHFDPTPVAKATWREAGECIYVEPEDRKGVFSTTRSSSRRRSQS

SEQ ID NO: 5638 - DNA, 1434 bp, Zea mays subsp. mays
  misc_feature (1)..(1434): Ceres Seq. ID no. 12362303
  misc_feature (1)..(1434): Ortholog of  Ceres SEQ ID NO 13661504 as cited in SEQ ID NO 61294
  misc_feature (1)..(1434): Ortholog of  Ceres SEQ ID NO 13596227 as cited in SEQ ID NO 68750
  misc_feature (1)..(1434): Ortholog of  Ceres SEQ ID NO 15179068 as cited in SEQ ID NO 0
accgatcacacaatcccgacttcccgaggccgcccggcccgagagcaccgagcacgcttctcccaaactgcactgctccgtccacggcacggcgaggcggggacgccaaagcaaaaaggcaataaagccagcggccagggccaggaccaggagccggcgtcggtggaggctgaggcagaggcgccgaagcggcggcggcatgggggtgctgcggagcacgcagagcctggaggccgaggtagaggagatgcgcggcgcgctgctgctccatggcgcgtgggcgtggaggcccggcgggggcgccgccaagcgcgcggcccgcgccgtggagcccgccgccgcggaggcgcgcaccgtgtgcgtcacggggggcacgtccttcctcggcttcgccgtcgtcgaccgcctgctccgccacggctacaccgtccgcctcgccctcgagacgcaagaggaccttgacaagctgcgggagatggagatgtttggggagaatggcagggatggggtctggactgtgatcgcaaatgtgatggacccggagagtttgcatgaggctttcgacggctgtgttggtgtctttcacacttcgtcgcatgtggatccagcgggcatctccggttacacgaaacacatggcaggcttggaggccaaagcagcagagctggtggtggaagcatgtgtgaggacagaatccgtgaggaagtgcgtcctgacgtcgtcactgttggcatgcgtctggaggcagaactaccctcatgaccgccgccggttcccaactaccatcgatgagaactgttggagcgacgagagcttgtgccgcgacaacaagctgtggctgtcactcggcaagacgatggcggaaaaggcggcgtggagggccgcacggggaacagacctgaagctagtgaccatatgcccagcactggtaactgggccggggttccggaggcggaaccctactccatccattgcatacctcaaaggagcgcacgccatgctcgtccaaggtctgctggcgactgcgaacgtggagagggtggcggaggcgcacgtccgcgtgtacgaggagctgagcggcacggccgggggccggtacatctgctacgaccacgtggtgcgacgaggcgaggagttcgcggagctgcagcggcagctggggctcagggtccccgcgacgcccgacggctatggtggcgacgacgacgacggccgggcgccgcggttccagctctgtaaccggaagctggcggcgctcatgtccgcgcggaggcggtgcacctacgacgcctacttccccatgccgcaggagtgagaccggaagaggagagagagctgctgatgctggacaacgactggagcgtgcgtgacaagtgacctcgtgtacatagcaatagtggtgatcggctcgcatcaatataataaatcggcccc

SEQ ID NO: 5639 - protein, 437 aa, Zea mays subsp. mays
  peptide (1)..(437): Ceres Seq. ID no. 12362304
PITQSRLPEAARPESTEHASPKLHCSVHGTARRGRQSKKAIKPAARARTRSRRRWRLRQRRRSGGGMGVLRSTQSLEAEVEEMRGALLLHGAWAWRPGGGAAKRAARAVEPAAAEARTVCVTGGTSFLGFAVVDRLLRHGYTVRLALETQEDLDKLREMEMFGENGRDGVWTVIANVMDPESLHEAFDGCVGVFHTSSHVDPAGISGYTKHMAGLEAKAAELVVEACVRTESVRKCVLTSSLLACVWRQNYPHDRRRFPTTIDENCWSDESLCRDNKLWLSLGKTMAEKAAWRAARGTDLKLVTICPALVTGPGFRRRNPTPSIAYLKGAHAMLVQGLLATANVERVAEAHVRVYEELSGTAGGRYICYDHVVRRGEEFAELQRQLGLRVPATPDGYGGDDDDGRAPRFQLCNRKLAALMSARRRCTYDAYFPMPQE

SEQ ID NO: 5640 - protein, 371 aa, Zea mays subsp. mays
  peptide (1)..(371): Ceres Seq. ID no. 12362305
MGVLRSTQSLEAEVEEMRGALLLHGAWAWRPGGGAAKRAARAVEPAAAEARTVCVTGGTSFLGFAVVDRLLRHGYTVRLALETQEDLDKLREMEMFGENGRDGVWTVIANVMDPESLHEAFDGCVGVFHTSSHVDPAGISGYTKHMAGLEAKAAELVVEACVRTESVRKCVLTSSLLACVWRQNYPHDRRRFPTTIDENCWSDESLCRDNKLWLSLGKTMAEKAAWRAARGTDLKLVTICPALVTGPGFRRRNPTPSIAYLKGAHAMLVQGLLATANVERVAEAHVRVYEELSGTAGGRYICYDHVVRRGEEFAELQRQLGLRVPATPDGYGGDDDDGRAPRFQLCNRKLAALMSARRRCTYDAYFPMPQE

SEQ ID NO: 5641 - protein, 355 aa, Zea mays subsp. mays
  peptide (1)..(355): Ceres Seq. ID no. 12362306
MRGALLLHGAWAWRPGGGAAKRAARAVEPAAAEARTVCVTGGTSFLGFAVVDRLLRHGYTVRLALETQEDLDKLREMEMFGENGRDGVWTVIANVMDPESLHEAFDGCVGVFHTSSHVDPAGISGYTKHMAGLEAKAAELVVEACVRTESVRKCVLTSSLLACVWRQNYPHDRRRFPTTIDENCWSDESLCRDNKLWLSLGKTMAEKAAWRAARGTDLKLVTICPALVTGPGFRRRNPTPSIAYLKGAHAMLVQGLLATANVERVAEAHVRVYEELSGTAGGRYICYDHVVRRGEEFAELQRQLGLRVPATPDGYGGDDDDGRAPRFQLCNRKLAALMSARRRCTYDAYFPMPQE

SEQ ID NO: 5642 - DNA, 1334 bp, Zea mays subsp. mays
  misc_feature (1)..(1334): Ceres Seq. ID no. 12365472
  misc_feature (1)..(1334): Ortholog of  Ceres SEQ ID NO 12609146 as cited in SEQ ID NO 52118
  misc_feature (1)..(1334): Ortholog of  Ceres SEQ ID NO 14316158 as cited in SEQ ID NO 52413
  misc_feature (1)..(1334): Ortholog of  Ceres SEQ ID NO 13638136 as cited in SEQ ID NO 58644
  misc_feature (1)..(1334): Ortholog of  Ceres SEQ ID NO 13596868 as cited in SEQ ID NO 62806
  misc_feature (1)..(1334): Ortholog of  Ceres SEQ ID NO 12587035 as cited in SEQ ID NO 63605
  misc_feature (1)..(1334): Ortholog of  Ceres SEQ ID NO 13595885 as cited in SEQ ID NO 69265
  misc_feature (1)..(1334): Ortholog of  Ceres SEQ ID NO 12566239 as cited in SEQ ID NO 0
  misc_feature (1)..(1334): Ortholog of  Ceres SEQ ID NO 13599119 as cited in SEQ ID NO 0
gccagtcttctcgccttcacgccgcccgctgtcctgcaaggccgctcccgcgtcgccggagcccgccgtcgccgtctccgcctcttccgcggcgcccgcgcccgccgccgccggttcgccgctccgccccttcgcgctccgcgcgctgctccgggaggaggtatttccgtctccatcgccccagctggcctctgccgcagcggtggcctcggtaccaagcggggccgtgctgaagcggcggcgacctgcgccgctccttgtgccggcgtccggcgcggctgctgctgctccggtggccgccgtggaggcagatccgaggaacgaggtggaggaggagggggaggagttcgcagcgtattgccggagggggaaggggagaagggtggaaatggaggaccggcatgtggccaaggtcgctctcggcggagatccccaagtggcgctctttggtgtattcgatggtcacgggggcaaaaatgcggcagagttcgctgcggagaacatgcccaagtttttggccgaggagttcaagaaggtgaacggcggaggagagatcgaaggagttgtcaagaggggttacctcaagacggacgaggagttcctcaagagggacgagagcgggggcgcgtgctgcgtcacagccgttctccaaaagggtggactggtcgtctccaatgctggagactgccgtgcggtgctcagccgagcagggaaggcagaggtgctcacctctgaccaccggggcctcccgggaggatgagaaggagagaattgaaaaattgggtggatttgtggtgaattaccatgggacatggcgagtccagggttccctggcagtgtctaggggcattggggatggacaactaaagcagtgggttgtggctaacccagacactaggacgctcctcgtcgaccaccagtgcgagttcttgatacttgcttctgatggcctatgggataaggtcgataatcaggaggcagtagaccttgcacgtcctctatgcattagcaatgacaagacctctcgcctggctgcctgcaggatgctcactgagacgtcgatttccaggggctcaactgatgatatcagtgttatgatcgtgcaattgcagaagttttcaagttcctaacttaattggagaaacttgaccaaaactctaggcattagcaccaacagactggcggaaggcaggactttgctggctaaagttttcatgagtcagcgctatttttggctgtttaacgttcattcattcattctttgtcatagaaccatttttattattattagatgtaattagatctatttgattcattctttgacaatatttatc

SEQ ID NO: 5643 - protein, 252 aa, Zea mays subsp. mays
  peptide (1)..(252): Ceres Seq. ID no. 12365473
PVFSPSRRPLSCKAAPASPEPAVAVSASSAAPAPAAAGSPLRPFALRALLREEVFPSPSPQLASAAAVASVPSGAVLKRRRPAPLLVPASGAAAAAPVAAVEADPRNEVEEEGEEFAAYCRRGKGRRVEMEDRHVAKVALGGDPQVALFGVFDGHGGKNAAEFAAENMPKFLAEEFKKVNGGGEIEGVVKRGYLKTDEEFLKRDESGGACCVTAVLQKGGLVVSNAGDCRAVLSRAGKAEVLTSDHRGLPGG

SEQ ID NO: 5644 - protein, 244 aa, Zea mays subsp. mays
  peptide (1)..(244): Ceres Seq. ID no. 12365474
ASLLAFTPPAVLQGRSRVAGARRRRLRLFRGARARRRRFAAPPLRAPRAAPGGGISVSIAPAGLCRSGGLGTKRGRAEAAATCAAPCAGVRRGCCCSGGRRGGRSEERGGGGGGGVRSVLPEGEGEKGGNGGPACGQGRSRRRSPSGALWCIRWSRGQKCGRVRCGEHAQVFGRGVQEGERRRRDRRSCQEGLPQDGRGVPQEGRERGRVLRHSRSPKGWTGRLQCWRLPCGAQPSREGRGAHL

SEQ ID NO: 5645 - protein, 151 aa, Zea mays subsp. mays
  peptide (1)..(151): Ceres Seq. ID no. 12365475
MLETAVRCSAEQGRQRCSPLTTGASREDEKERIEKLGGFVVNYHGTWRVQGSLAVSRGIGDGQLKQWVVANPDTRTLLVDHQCEFLILASDGLWDKVDNQEAVDLARPLCISNDKTSRLAACRMLTETSISRGSTDDISVMIVQLQKFSSS

SEQ ID NO: 5646 - DNA, 1800 bp, Zea mays subsp. mays
  misc_feature (1)..(1800): Ceres Seq. ID no. 12409414
  misc_feature (1)..(1800): Ortholog of  Ceres SEQ ID NO 15176532 as cited in SEQ ID NO 58184
  misc_feature (1)..(1800): Ortholog of  Ceres SEQ ID NO 14303627 as cited in SEQ ID NO 62070
  misc_feature (1)..(1800): Ortholog of  Ceres SEQ ID NO 13597546 as cited in SEQ ID NO 65017
  misc_feature (1)..(1800): Ortholog of  Ceres SEQ ID NO 14308015 as cited in SEQ ID NO 65798
  misc_feature (1)..(1800): Ortholog of  Ceres SEQ ID NO 14307912 as cited in SEQ ID NO 66380
  misc_feature (1)..(1800): Ortholog of  Ceres SEQ ID NO 15176077 as cited in SEQ ID NO 66728
  misc_feature (1)..(1800): Ortholog of  Ceres SEQ ID NO 14307908 as cited in SEQ ID NO 67189
  misc_feature (1)..(1800): Ortholog of  Ceres SEQ ID NO 14308045 as cited in SEQ ID NO 67444
  misc_feature (1)..(1800): Ortholog of  Ceres SEQ ID NO 13654353 as cited in SEQ ID NO 68318
acaagcgcaagcagggcaagaaaactccgcaggccagtctgcgcgagttggatggccttcttcttggccctcgtgtgcatcctcgtcttgctagccatcgcctcctacgtccagtacactcgctggcagaaggggaaaggccgcttcggcggccatgggaggtctgctcccttgaagctgcctcctggctccatgggctggccttaccttggcgagaccctccagctttactcccaggaccccagcgtcttcttcgcttccaaacagaagaggtacggcgagatcttcaagacgcaccttctgggctgcccgtgcgtgatgctggcgagcccggaggcggcgcggttcgtgctggtgacgcaggcgcacctgttcaagccgacctacccgcggagcaaggagcgcatgatcgggccgtcggctctcttcttccaccagggcgactaccacctccgcctccgcaagctcgtccagggcgcgctcggccccgacgcgctgcgcgcgctcgttcctgaggtggaggccgccgtgcggtccactctcgcttcctgggacgccggccacgtcagaagcacgttccacgccatgaagacgctgtcgtttgacgtgggcatcgtgacgatcttcggcggccggctggacgagtggcgcaaggcggagctgaggaagaattactccgtcgtggagaaggggtacaactccttccccaacagcctgccggggacgctccattacaaggcgatgcaggcgcggcggcggctgcacggcgtgctgtgcgacatcatgcgggagcgtcgtggccaggcccaggcgggcaccaccggcctgctgggctgcctgatgcggtcccggggcgacgacggcgcgccgctgctgagcgacgagcagatcgccgacaacgtcatcggcgtgctgttcgcggcgcaggacacgacggccagcgcgctcacctggatcgtcaagtacctccacgaccaccccaagctcctcgaggccgtccgggcggagcaggcggcggtccgcgaggccaccggcggcgggaggcagccgctggcgtgggcgcacacgaagagcatggcgctaacgcatagggtgattttggagagcttaaggatggcgagcatcatctcgttcacgttcagggaggccgtggccgacgtggagtacaaagggttccttatccccaaggggtgggaaggtgatgcctctcttcaggaacatccaccacagccctgactacttccaggatccacacaagttcgacccttctagattccaggtggcgccgcgtccgagcacgttcctgccgtttgggcacggcgtgcacgcgtgccccgggaacgagctgggccaagctcgagatgctcgtcctcatccaccacctggtcaccggctacaggtggcaaatcgttggatccagtgacgaggtcgagtacagcccgttccctgtgcccaagcacggcttgcctgtcagattatggagacaaaacaatccggtcgtcgacagaaaggggcgtgagaccgacgacgatgatgtggaggatattttagtttgactcttgagttaggcatgaatttaaccccaagctagctagagaagttttttttccctttgaaattcttctttgctcgccttcctcctggatcaaattacgttggaggacaagaaacggcagctttctctttcgttttctttgcctgcttcaccgcgacgataatggtgaaaatatgtaagctacgtggacatcaatgatccacagcatcgttgatatatataatatagagagaaaattctctgct

SEQ ID NO: 5647 - protein, 411 aa, Zea mays subsp. mays
  peptide (1)..(411): Ceres Seq. ID no. 12409415
TSASRARKLRRPVCASWMAFFLALVCILVLLAIASYVQYTRWQKGKGRFGGHGRSAPLKLPPGSMGWPYLGETLQLYSQDPSVFFASKQKRYGEIFKTHLLGCPCVMLASPEAARFVLVTQAHLFKPTYPRSKERMIGPSALFFHQGDYHLRLRKLVQGALGPDALRALVPEVEAAVRSTLASWDAGHVRSTFHAMKTLSFDVGIVTIFGGRLDEWRKAELRKNYSVVEKGYNSFPNSLPGTLHYKAMQARRRLHGVLCDIMRERRGQAQAGTTGLLGCLMRSRGDDGAPLLSDEQIADNVIGVLFAAQDTTASALTWIVKYLHDHPKLLEAVRAEQAAVREATGGGRQPLAWAHTKSMALTHRVILESLRMASIISFTFREAVADVEYKGFLIPKGWEGDASLQEHPPQP

SEQ ID NO: 5648 - protein, 394 aa, Zea mays subsp. mays
  peptide (1)..(394): Ceres Seq. ID no. 12409416
MAFFLALVCILVLLAIASYVQYTRWQKGKGRFGGHGRSAPLKLPPGSMGWPYLGETLQLYSQDPSVFFASKQKRYGEIFKTHLLGCPCVMLASPEAARFVLVTQAHLFKPTYPRSKERMIGPSALFFHQGDYHLRLRKLVQGALGPDALRALVPEVEAAVRSTLASWDAGHVRSTFHAMKTLSFDVGIVTIFGGRLDEWRKAELRKNYSVVEKGYNSFPNSLPGTLHYKAMQARRRLHGVLCDIMRERRGQAQAGTTGLLGCLMRSRGDDGAPLLSDEQIADNVIGVLFAAQDTTASALTWIVKYLHDHPKLLEAVRAEQAAVREATGGGRQPLAWAHTKSMALTHRVILESLRMASIISFTFREAVADVEYKGFLIPKGWEGDASLQEHPPQP

SEQ ID NO: 5649 - protein, 347 aa, Zea mays subsp. mays
  peptide (1)..(347): Ceres Seq. ID no. 12409417
MGWPYLGETLQLYSQDPSVFFASKQKRYGEIFKTHLLGCPCVMLASPEAARFVLVTQAHLFKPTYPRSKERMIGPSALFFHQGDYHLRLRKLVQGALGPDALRALVPEVEAAVRSTLASWDAGHVRSTFHAMKTLSFDVGIVTIFGGRLDEWRKAELRKNYSVVEKGYNSFPNSLPGTLHYKAMQARRRLHGVLCDIMRERRGQAQAGTTGLLGCLMRSRGDDGAPLLSDEQIADNVIGVLFAAQDTTASALTWIVKYLHDHPKLLEAVRAEQAAVREATGGGRQPLAWAHTKSMALTHRVILESLRMASIISFTFREAVADVEYKGFLIPKGWEGDASLQEHPPQP

SEQ ID NO: 5650 - DNA, 1448 bp, Zea mays subsp. mays
  misc_feature (1)..(1448): Ceres Seq. ID no. 12409411
  misc_feature (1)..(1448): Ortholog of  Ceres SEQ ID NO 13592768 as cited in SEQ ID NO 20317
  misc_feature (1)..(1448): Ortholog of  Ceres SEQ ID NO 14303656 as cited in SEQ ID NO 61363
gtgaaagggccgtgcgggaagctaaccaccgcgaaagcgcctctgggggagtcagacgaacgaagcaatccaaccgaacgaaccgacctaggtcgtcgtcggctcgtcccctccgcaggaccggttcgccgtctcgtcgcgatctcgccgcctgcccgccgcgccctattaccgccatggaggcgctgtggaagcaggcctccaggctcaaggaccaggtctctcggcagggtgtgttcaagcagtttggctacgggaattctgataatgcgtttacagatgagtcagaggttaaactgcatcagagattggaaaagctttacttatcgactcgtgctgctaaacattttcaaagggacattgttcggggcgtggagggctatatagtcacaggatctaaacaagtcgaaatagggaataaattgtctgatgacagccagaaatacggtgttggaaacacatgtacaagtggtgatactttgtccaaagctgctacatatttcggaaaggcacgctcacagatggaaaaggagcgtggcaatatgttgaaagcatttggcacacaggtggcagagccactgcgggcgatggttatgggtgcacctttagaggatgccagacatatggcccagagatatgacagaacgaggcaagaagctgaagcacaggctgtcgaagtatcaagacggcagaacagggtgagggaatctactgggaatggcgatatggtatcaaaattggaagctgccgagtacaagcttgaagaactgaagtcaaacatggtgggattagggaaggaagctattgcagcaatgtcggctgttgaggctcagcagcaacggttgaccttacagcgtctcattgcactggttgaggctgagagaacttaccatcagagagttctggagatacttgacaaattggaagaagaaatggtgtctgagcgccaaaaaaattgaagcacccccgactccagcagctgaaaattatataccaccaccagcaccaccatcttatgatgaaattaatggagcatttgcatccacttctgttaacgagtcagtccaatctgtcgatttcttccttggagaggcccttgattcatttaatgctgaaagtgagtttgagcttaccttgtcagctggtgacattgtaattgtccgaaagatctcaagcaatggttgggcagaaggtgaatgcaagggcaaagcaggatggttccctcatgcttatatcgaaaggcaggaacgtgttctagcaagcaaagttccacatatattttaggagtttctggcagtcgcattacacggttttcatttctattgttgggagctggaactgtatccatgttttcacttcctcttagtttccgcgatgtaattactggctgtcatgtgcatagattaaatttacttccctttttttagtctggaaaaggttttggatgt

SEQ ID NO: 5651 - protein, 318 aa, Zea mays subsp. mays
  peptide (1)..(318): Ceres Seq. ID no. 12409412
ERAVREANHRESASGGVRRTKQSNRTNRPRSSSARPLRRTGSPSRRDLAACPPRPITAMEALWKQASRLKDQVSRQGVFKQFGYGNSDNAFTDESEVKLHQRLEKLYLSTRAAKHFQRDIVRGVEGYIVTGSKQVEIGNKLSDDSQKYGVGNTCTSGDTLSKAATYFGKARSQMEKERGNMLKAFGTQVAEPLRAMVMGAPLEDARHMAQRYDRTRQEAEAQAVEVSRRQNRVRESTGNGDMVSKLEAAEYKLEELKSNMVGLGKEAIAAMSAVEAQQQRLTLQRLIALVEAERTYHQRVLEILDKLEEEMVSERQKN

SEQ ID NO: 5652 - protein, 260 aa, Zea mays subsp. mays
  peptide (1)..(260): Ceres Seq. ID no. 12409413
MEALWKQASRLKDQVSRQGVFKQFGYGNSDNAFTDESEVKLHQRLEKLYLSTRAAKHFQRDIVRGVEGYIVTGSKQVEIGNKLSDDSQKYGVGNTCTSGDTLSKAATYFGKARSQMEKERGNMLKAFGTQVAEPLRAMVMGAPLEDARHMAQRYDRTRQEAEAQAVEVSRRQNRVRESTGNGDMVSKLEAAEYKLEELKSNMVGLGKEAIAAMSAVEAQQQRLTLQRLIALVEAERTYHQRVLEILDKLEEEMVSERQKN

SEQ ID NO: 5653 - DNA, 1749 bp, Zea mays subsp. mays
  misc_feature (1)..(1749): Ceres Seq. ID no. 12405080
  misc_feature (1)..(1749): Ortholog of  Ceres SEQ ID NO 14312212 as cited in SEQ ID NO 54399
  misc_feature (1)..(1749): Ortholog of  Ceres SEQ ID NO 15225341 as cited in SEQ ID NO 55222
  misc_feature (1)..(1749): Ortholog of  Ceres SEQ ID NO 14311755 as cited in SEQ ID NO 57271
  misc_feature (1)..(1749): Ortholog of  Ceres SEQ ID NO 15171156 as cited in SEQ ID NO 58259
  misc_feature (1)..(1749): Ortholog of  Ceres SEQ ID NO 14302212 as cited in SEQ ID NO 66507
  misc_feature (1)..(1749): Ortholog of  Ceres SEQ ID NO 13653980 as cited in SEQ ID NO 69253
atctataacagccgccaccttcccccttatactcgccggaggccaaccagtactcgtgccacgactgccacccctcctcttccttgtgatctccgaatacccatctcagattccaagggccgcgccgtgtaatccccggctctccccacccaccatatatctagtatccgcgcctcaaatccctcgcgaaacgccccgccgtaagcagttgttgtctgccgtgatttgagccgggcggacggattgatcccgggacgaggtgtctcagctcttgatcttgatcctgatcctgggaggcgttcctggtttattggtgggagcgaagaagccatgataccttccgtgaggctctctcctggtcctgcagccttctcaggctccagcctacgctcaaaattaccgtcaattccatccatctccagtctcaaaccctccaaatatgtggtctcctcgctgaaaccactctacctagcaccgctagatggtccgcgcactgccgagcttaagtctcggagacagccacttgagttccgttgttctgcttctgctgctgatgacaaggagtcaaagactcaggtggtgccagttcagtcggaaggcgcacagaggttgaagatctccatctatttcgccacctggtgggcgcttaatgtgatatttaacatttacaacaagaaggttctcaatgcattcccttacccctggctcacctccacactctccctcgcctgtggctctgctatgatgcttttctcgtgggccacccgtcttgttgaggcccctaagaccgacctggacttctggaaagttcttttcccggttgctgtggcgcatacaattggccatgttgctgctacagtgagcatgtctaaggtggcagtgtcattcacacacataattaaaagcgcagaacctgcattcagtgttttggtgtcaaggttcttccttggggagacgtttccaattccagtatatctttctcttcttccaatcattggtggttgtgctctagctgctgtcacagagctgaactttaatatggttggatttatgggtgccatgatatccaaccttgcatttgttttccgcaacatcttctcgaagaggggcatgaaggggaagtccgtcagtggcatgaattactacgcttgcctgtcaattatgtccctggtcatactgactccatttgctatagctatggaaggccctcaaatgtgggctgctggttggcaaaaggctcttgcagaagttggacccaatgttgtctggtggattgctgcacagagcgtgttctaccacttatataaccaggtgtcctacatgtctctcgatcagatttctccattgacattcagcattggcaatacaatgaagcgtatatcagtgattgtttcatcaatcattatcttccacactcctgtccgcgctgtcaatgcactgggagctgccattgccatccttggcacattcctgtactctcaggcaaaggcgtgaggcgggccatgatgacgaacgtctgcagaatcagtagcaagcactaaatccaattttgcttgttccagtggcatgtaaatatcgggttaggtttccgtatgagagtttgtaataatggatgaatggctctgctgtttcgttcttgtttgttggccagactcaaatccataggccatgaactgcggtcgagtgtacctgaataatactgtaacggagaattcgccgatgctgtttctttatgggtatatatatagt

SEQ ID NO: 5654 - protein, 387 aa, Zea mays subsp. mays
  peptide (1)..(387): Ceres Seq. ID no. 12405081
MIPSVRLSPGPAAFSGSSLRSKLPSIPSISSLKPSKYVVSSLKPLYLAPLDGPRTAELKSRRQPLEFRCSASAADDKESKTQVVPVQSEGAQRLKISIYFATWWALNVIFNIYNKKVLNAFPYPWLTSTLSLACGSAMMLFSWATRLVEAPKTDLDFWKVLFPVAVAHTIGHVAATVSMSKVAVSFTHIIKSAEPAFSVLVSRFFLGETFPIPVYLSLLPIIGGCALAAVTELNFNMVGFMGAMISNLAFVFRNIFSKRGMKGKSVSGMNYYACLSIMSLVILTPFAIAMEGPQMWAAGWQKALAEVGPNVVWWIAAQSVFYHLYNQVSYMSLDQISPLTFSIGNTMKRISVIVSSIIIFHTPVRAVNALGAAIAILGTFLYSQAKA

SEQ ID NO: 5655 - protein, 250 aa, Zea mays subsp. mays
  peptide (1)..(250): Ceres Seq. ID no. 12405082
MMLFSWATRLVEAPKTDLDFWKVLFPVAVAHTIGHVAATVSMSKVAVSFTHIIKSAEPAFSVLVSRFFLGETFPIPVYLSLLPIIGGCALAAVTELNFNMVGFMGAMISNLAFVFRNIFSKRGMKGKSVSGMNYYACLSIMSLVILTPFAIAMEGPQMWAAGWQKALAEVGPNVVWWIAAQSVFYHLYNQVSYMSLDQISPLTFSIGNTMKRISVIVSSIIIFHTPVRAVNALGAAIAILGTFLYSQAKA

SEQ ID NO: 5656 - protein, 249 aa, Zea mays subsp. mays
  peptide (1)..(249): Ceres Seq. ID no. 12405083
MLFSWATRLVEAPKTDLDFWKVLFPVAVAHTIGHVAATVSMSKVAVSFTHIIKSAEPAFSVLVSRFFLGETFPIPVYLSLLPIIGGCALAAVTELNFNMVGFMGAMISNLAFVFRNIFSKRGMKGKSVSGMNYYACLSIMSLVILTPFAIAMEGPQMWAAGWQKALAEVGPNVVWWIAAQSVFYHLYNQVSYMSLDQISPLTFSIGNTMKRISVIVSSIIIFHTPVRAVNALGAAIAILGTFLYSQAKA

SEQ ID NO: 5657 - DNA, 1174 bp, Zea mays subsp. mays
  misc_feature (1)..(1174): Ceres Seq. ID no. 12365527
  misc_feature (1)..(1174): Ortholog of  Ceres SEQ ID NO 12608629 as cited in SEQ ID NO 57974
catcacaagattggctgaagttttcatcatacaaggagcgcctacttggcctttcatttggtttgctgtcaacaaggaaccatgacttgtcatacaaccttgcgtggcgtaccttaactgatccatcacgtgtctcatcaaaggccataaggaggcagttagggcataaccttctttctgcattgaagtacacatacaagattgataagagggattcacatcttaggccaacgaaaggatatgcgtttcagtcaacttctcaagttggtggtctatggaatagcaaaggattgagatatttccggcaggagttcgatgtacgtggtgctgtgcctttgggattttatagtgctgctctcaacgttggtgtaggagcgggtgtcattttaccgcttgcagggggattcatgaattcgacttcatcagtgccagagaggttttatcttggaggtaattcttctccagtgtgcagcttgggcggaccgtcatctctgctgggtttcagattaaggggagttggcccaacagaggcgcggaggcatgtccttaataactcggagagtggttcggctgaccctggaagggattacttgggaggtgatctggccgtgtctgccttcgctgacttttcttttgatctgcccctcaagatattccagagacgctggaatgccatggccacgcattccttactgctggaaaccttgcgaaactgtcggagggtgagtacaagaacttttcggcttctgaatttcggcaaacgttctggagctctgctggcgttgggattattttgcctaccaaacttttccgggtggaggtgaactattgtcgcatcctaaagcaagctgagcatgacagcgcgaagactggaatccagttcagcttttcctcgcccatgtaggaacttgccatggcagccgaagtagctgcactttcctctgtagacttgcattcttcccgttcttttcatgctgaagcaattgaagaggtttacgtgctcccttttcttgtgacgcttgttcattgacacgaggagctgctccttttttttggtgtcttcaggagatgaatttattatttgctgtttttgacctcacgagggatttgtcctcgcacaactcaaataccgatgctgtggctacacaatggtggatagaataatattttggct

SEQ ID NO: 5658 - protein, 273 aa, Zea mays subsp. mays
  peptide (1)..(273): Ceres Seq. ID no. 12365528
SQDWLKFSSYKERLLGLSFGLLSTRNHDLSYNLAWRTLTDPSRVSSKAIRRQLGHNLLSALKYTYKIDKRDSHLRPTKGYAFQSTSQVGGLWNSKGLRYFRQEFDVRGAVPLGFYSAALNVGVGAGVILPLAGGFMNSTSSVPERFYLGGNSSPVCSLGGPSSLLGFRLRGVGPTEARRHVLNNSESGSADPGRDYLGGDLAVSAFADFSFDLPLKIFQRRWNAMATHSLLLETLRNCRRVSTRTFRLLNFGKRSGALLALGLFCLPNFSGWR

SEQ ID NO: 5659 - protein, 138 aa, Zea mays subsp. mays
  peptide (1)..(138): Ceres Seq. ID no. 12365529
MNSTSSVPERFYLGGNSSPVCSLGGPSSLLGFRLRGVGPTEARRHVLNNSESGSADPGRDYLGGDLAVSAFADFSFDLPLKIFQRRWNAMATHSLLLETLRNCRRVSTRTFRLLNFGKRSGALLALGLFCLPNFSGWR

SEQ ID NO: 5660 - DNA, 1288 bp, Zea mays subsp. mays
  misc_feature (1)..(1288): Ceres Seq. ID no. 12373648
  misc_feature (1)..(1288): Ortholog of  Ceres SEQ ID NO 12637271 as cited in SEQ ID NO 0
ccattcgtttctcccctccagcgccgaggccgagtacctcactgtggctaatggcgtcgctgaggcggcatggcttcgtcagctgctccaggagctgcacagtccgttgacatggagcacacttgtctactgtgataacgtcagtgccatgtatctctccaccaatcctgttcagcaccagcgcacaaatcatgttgagctcgacctctacttcgtccgcgagcgtgtcgccgtcggggatgtgcgagttctctatgtcccgaccacttctcagtttgtcgacatcttcaccaagggcctaactacatcgttatttgaggaggtttggtccagtcttaacatctgtcgtggctagaatttcgaccacgagagtgttagagttatttgtggctttgtattgtaatggggtgttttctatgtaatgggcttagggccaacaactctattataaatatagctcccccaaccctggttaggggttagggtttccagcccactaacagattgaactatgactagattagtcatgcgaagattttaaatatttgtggattgatatgtctacaggtccttccgtgactatggagaatccgtcttgagacatttagagaatgcaatcagcaaagacccaaatctccgtaaagccccggtgaaccatgagggcgtatgtacatattctttgctttgttctttcgaaacttgaatatagatcttgatgcataatttttcttctccgagaaagctggatttctgcttattttatggcataccatacacaggtaagggtttcaggatatggtgggtggttcttgctgaggctctctctgcatgatcctgttcttcccctaaacattgaggcacagagtaacgatgatgcgattaagctggggcttgcggttcttgctgctgtgaatgaatttccagcactggatgtgacggcactgaacaaattcgtgcatcagtgaatataagggacggacattggcatcataatgtgatcagcttcgcatggtgtcgtgttcgccccggtcgaacatgttctacatgtggcacgagtatcatacagaaatataccagtttattacttgcacaggctttttagtttggaaagacaagggagatttcagtgttgagatgattcttgtgtgtgtttataccagctatcagagtaagaatatgcgtgcgtactgttgaggctgatctttacttgagaataaggtttgagttacctgagtatttttttaaaaggatcaggaggcttgctgtgatgtgaggccacgaatttgcc

SEQ ID NO: 5661 - protein, 117 aa, Zea mays subsp. mays
  peptide (1)..(117): Ceres Seq. ID no. 12373649
HSFLPSSAEAEYLTVANGVAEAAWLRQLLQELHSPLTWSTLVYCDNVSAMYLSTNPVQHQRTNHVELDLYFVRERVAVGDVRVLYVPTTSQFVDIFTKGLTTSLFEEVWSSLNICRG

SEQ ID NO: 5662 - protein, 68 aa, Zea mays subsp. mays
  peptide (1)..(68): Ceres Seq. ID no. 12373650
MYLSTNPVQHQRTNHVELDLYFVRERVAVGDVRVLYVPTTSQFVDIFTKGLTTSLFEEVWSSLNICRG

SEQ ID NO: 5663 - protein, 67 aa, Zea mays subsp. mays
  peptide (1)..(67): Ceres Seq. ID no. 12373651
MAYHTQVRVSGYGGWFLLRLSLHDPVLPLNIEAQSNDDAIKLGLAVLAAVNEFPALDVTALNKFVHQ

SEQ ID NO: 5664 - DNA, 1173 bp, Zea mays subsp. mays
  misc_feature (1)..(1173): Ceres Seq. ID no. 12409399
  misc_feature (1)..(1173): Ortholog of  Ceres SEQ ID NO 14306538 as cited in SEQ ID NO 53117
atctggattatggcagcaccggaggggagtacatctctgttagttcttcacaactctagactctcagttatcttacggcggtccaaaacccgcaaactgcaggtccgtcgcgcggtacttatcccgtgacttgccatacgagctgtcgcccgacgacgtctacctgacgaacggcggcgctcaggcgatcgagatagtgtgctcggcgctggctcgtccgggcgccaacatcttgctcccgaggcccggctacaagctctacgaggcgcgcgccgtgttcagcgggatggaggcccggtacttcgaccttgtacccggcgaaggctgggaggtcgacaccgacggtgtccgagctctcgccgacaagaacacggttgccgtcgtcatcatcaaccccggaaacccgtgcggttgctgagactgcgcggaagctcggcgtgtttgtcgtagcggacgaggcttacgcgcacttgacgtttggagagaggaggttcgtgccgatgggcgtgtttggggccgtggctccggtcatcacgctggggtccatttcgaagaggtggctggtgcccggctggcggctcgggtggatcgctaccagtgaccctagtggcgtgtttcagagaaccaaggtagccagcagcatcaagacctaccattacatctgctctgaccctacgacgtttgttcagggagcggttccaaacctcctggagaacacaagcgaggagttcttccgaagaaacatcagaactctaaaagaaagcgcggacatgtgctgggagaagctgaagggcgtcaacgggatcgcatgcccaagcagaccgatggggtccatgttcgtaatggtgaaactggacctgtcctgcctgcaggggatcgaagacgacatggacttctgctgccggctcgccaaggaagaatcggtggttgttctgccagggcgtgttgtgggatgcgaggactggctccggatcaccttcgccatcgatccgtcctctctcgaagacggcctggacaggctcaggtccttctgctcgcgacacagcaagccggcggcacagggttctgctgcctctgtagtctagtagtttctgttagaggatctgaagcactccacgtcttggaaacaatgaagtttgggtcaatatgagaacgtaataataaagttgattc

SEQ ID NO: 5665 - protein, 194 aa, Zea mays subsp. mays
  peptide (1)..(194): Ceres Seq. ID no. 12409400
MGVFGAVAPVITLGSISKRWLVPGWRLGWIATSDPSGVFQRTKVASSIKTYHYICSDPTTFVQGAVPNLLENTSEEFFRRNIRTLKESADMCWEKLKGVNGIACPSRPMGSMFVMVKLDLSCLQGIEDDMDFCCRLAKEESVVVLPGRVVGCEDWLRITFAIDPSSLEDGLDRLRSFCSRHSKPAAQGSAASVV

SEQ ID NO: 5666 - protein, 113 aa, Zea mays subsp. mays
  peptide (1)..(113): Ceres Seq. ID no. 12409401
MPKQTDGVHVRNGETGPVLPAGDRRRHGLLLPARQGRIGGCSARACCGMRGLAPDHLRHRSVLSRRRPGQAQVLLLATQQAGGTGFCCLCSLVVSVRGSEALHVLETMKFGSI

SEQ ID NO: 5667 - protein, 104 aa, Zea mays subsp. mays
  peptide (1)..(104): Ceres Seq. ID no. 12409402
MCWEKLKGVNGIACPSRPMGSMFVMVKLDLSCLQGIEDDMDFCCRLAKEESVVVLPGRVVGCEDWLRITFAIDPSSLEDGLDRLRSFCSRHSKPAAQGSAASVV

SEQ ID NO: 5668 - DNA, 1343 bp, Zea mays subsp. mays
  misc_feature (1)..(1343): Ceres Seq. ID no. 12409395
  misc_feature (1)..(1343): Ortholog of  Ceres SEQ ID NO 13638160 as cited in SEQ ID NO 58847
agttcccatccgccgcccgcgcacttgttccttccggcacagcacacaggacaccgtagacagattcatcgcgacgatggggctggacgtcgtggagatcgggatgggcgccgatttgagcctggatctgaggcacttcgcctccaaggccgtgcggcagagcaaggactacgcgccggcgccggcgccggacatggacgcctgcatccgccgcctcgaggaggagcggggcaagatcgagatgttcaagcgggagctgccgctctgcgcgcgcctcctcgcagacgtgatcgatgtgatgaaggaggaagcggggaaggcggtggcggaggaggacggcgccgccggggacaagagcaagtggatgagcacggcgcagctctggacgggcgattgcggccgcgaggacgcggaaccagagaagcaagacaaggagaggagctcgcctgaggccaggtctcgcgccgccggcggcgctttcttgccgctcaaggctgccgtgggctccggcgcgccggcgttcgcgccgctcggcttgagaatggacgacaaggccgccgcgcgcgccgggatgcccgacctgtgcttgctgtcgccgccggcgaccaagagcgccgccgaggagagccgacgccaggtggtggggtttgcgcaggcggcgacgagggcggccgccgccacggcgccagctgccccttcgcttagcgttggcgtccagtccccgtcgcagcaggcgaggaaggctcggcgttgctggtccacggagctgcatcgccagttcgtcgccgccttgaaccagctcggtggcccccaagttgccaccccaaagcagatcagggagctgatgaaggtggacggcctcacaaacgacgaagtgaaaagccaccttcagaaataccggctgcacaaccggagggcgccagggtccggcgtggtgagccagcccatcgtgctggtgggagggctgtggattccgcaggagcaaagcagctcgcagtccgggtctcccccacggcccgctccacttctccacctcaggcatcgcagtctcgtcggcggccaccgtcagctgcgaggaggaagacggacggtccgagagctatggctggaaatgatgcagaggctgctgctgctgctgctgctgagaggggagctgcagcctcaggaacgggaatcatcaggagggaaactgagagtagtgtagctgtctgtacacatacatagttacattacattacatacagggagtgagggagatcgggccttgagcgctcgagaccaaactgatgcttcgggtttgtacatcccaaagagatgagatgatacagttttgcggctaatcc

SEQ ID NO: 5669 - protein, 400 aa, Zea mays subsp. mays
  peptide (1)..(400): Ceres Seq. ID no. 12409396
VPIRRPRTCSFRHSTQDTVDRFIATMGLDVVEIGMGADLSLDLRHFASKAVRQSKDYAPAPAPDMDACIRRLEEERGKIEMFKRELPLCARLLADVIDVMKEEAGKAVAEEDGAAGDKSKWMSTAQLWTGDCGREDAEPEKQDKERSSPEARSRAAGGAFLPLKAAVGSGAPAFAPLGLRMDDKAAARAGMPDLCLLSPPATKSAAEESRRQVVGFAQAATRAAAATAPAAPSLSVGVQSPSQQARKARRCWSTELHRQFVAALNQLGGPQVATPKQIRELMKVDGLTNDEVKSHLQKYRLHNRRAPGSGVVSQPIVLVGGLWIPQEQSSSQSGSPPRPAPLLHLRHRSLVGGHRQLRGGRRTVRELWLEMMQRLLLLLLLRGELQPQERESSGGKLRVV

SEQ ID NO: 5670 - protein, 375 aa, Zea mays subsp. mays
  peptide (1)..(375): Ceres Seq. ID no. 12409397
MGLDVVEIGMGADLSLDLRHFASKAVRQSKDYAPAPAPDMDACIRRLEEERGKIEMFKRELPLCARLLADVIDVMKEEAGKAVAEEDGAAGDKSKWMSTAQLWTGDCGREDAEPEKQDKERSSPEARSRAAGGAFLPLKAAVGSGAPAFAPLGLRMDDKAAARAGMPDLCLLSPPATKSAAEESRRQVVGFAQAATRAAAATAPAAPSLSVGVQSPSQQARKARRCWSTELHRQFVAALNQLGGPQVATPKQIRELMKVDGLTNDEVKSHLQKYRLHNRRAPGSGVVSQPIVLVGGLWIPQEQSSSQSGSPPRPAPLLHLRHRSLVGGHRQLRGGRRTVRELWLEMMQRLLLLLLLRGELQPQERESSGGKLRVV

SEQ ID NO: 5671 - protein, 366 aa, Zea mays subsp. mays
  peptide (1)..(366): Ceres Seq. ID no. 12409398
MGADLSLDLRHFASKAVRQSKDYAPAPAPDMDACIRRLEEERGKIEMFKRELPLCARLLADVIDVMKEEAGKAVAEEDGAAGDKSKWMSTAQLWTGDCGREDAEPEKQDKERSSPEARSRAAGGAFLPLKAAVGSGAPAFAPLGLRMDDKAAARAGMPDLCLLSPPATKSAAEESRRQVVGFAQAATRAAAATAPAAPSLSVGVQSPSQQARKARRCWSTELHRQFVAALNQLGGPQVATPKQIRELMKVDGLTNDEVKSHLQKYRLHNRRAPGSGVVSQPIVLVGGLWIPQEQSSSQSGSPPRPAPLLHLRHRSLVGGHRQLRGGRRTVRELWLEMMQRLLLLLLLRGELQPQERESSGGKLRVV

SEQ ID NO: 5672 - DNA, 1857 bp, Zea mays subsp. mays
  misc_feature (1)..(1857): Ceres Seq. ID no. 12413145
  misc_feature (1)..(1857): Ortholog of  Ceres SEQ ID NO 14303137 as cited in SEQ ID NO 53594
  misc_feature (1)..(1857): Ortholog of  Ceres SEQ ID NO 13585454 as cited in SEQ ID NO 65280
  misc_feature (1)..(1857): Ortholog of  Ceres SEQ ID NO 14307889 as cited in SEQ ID NO 67245
accaaattcccctaacccgtcggtctgctatcccatctgagctcacggcgatcctctttctcctcatcggcatgagcggcttcttggcggtggtcggcaaggtcggcacctttctgctgtgggtgctgttcctggtcttgcagaccgccaccaggatcgtcggcagcctccttgccagctcagctgagcagcaggatgaccaccatcaggaatcggcggcggcacggcgcaggtcgccgccagcctccccacatcccgaactttacgagccggcgtctgcgtcgctggcgcagctgtgggacccaccgccacttccgcaccttgcttttgctcccgctgcggatgagagctcttcgtcctccagcttacggcggcgtgccagtgcgccgctgccccgagcggatgaagactttgtggtgccatcgagcgcttactcgcgtccaacagtgggggtggctcatacacactctgtgtcagcaccaccactgagggcaatcgagacgcgggcggtgccatctaggctggtgacagccgggggtaagcggccaaggctggagaggaagtactccaagattgttgaccagtaccgatccttggatgaggttattgaagcattagcacaggctggtcttgagtcttctaatttgatcataggaattgatttcacaaagagtaatgaatggacaggaaagaattgcttcaatggtatcagcctgcataatatcagtgacaacccaaatccttatgaacaggcaatatccatcattgggaaaaccttatctgcttttgatgaggataatttaattccttgctttggttttggagacgcatctactcatgaccaagatgtatttgccttctatcctgatgaaagaccatgcaatggttttcaagaagctttagctcgatacagagagattgtacctcatcttcgcctttcgggtcctacatcattcgccccaataattgacatggccacaaccattgtggagcaaagtggtggccaataccatgttttagtaattattgctgacgggcaggtcacaagaagtgtagatactgaatttggtcagttaagcacccaggagcaaatgacagttgatgctattgtacaagcaagccaattcccattgtctataattcttgttggagttggagatggtccatgggatatgatgaaggaatttgatgacaatataccagctaggtcttttgacaatttccagtttgtcaacttcactgcgatcatgtcaaaaaagataagtcaaagcaaaaaggagacagagttcgccctttcagcactaatggaaattccattgcaatacaaggcaacattagagcttggaattttaggacgtcgaattggagagtcacctgagcggattccacttcctcctccttttgcaagttatagcacagtttcaagagcagaaccatctcgggcaaatagttatcgaagtgtgccttcacatccaagggaggagccagctgtaaattcaactatcacagcatcagttacatccccatcagctgccgaaagtagagttttagaaccccagatgtgcccagtttgcctttccaaaccccgggacatggcatttggttgtggccaccagacatgttcagaatgtggaccgcaagtcacagattgccccatctgtcgaaggcccattgacacgagagtaaaattctactaattatttttgggtggaactaggtttaactgaagcacatgccaggagtagaatccactaaaataaatctctatttgactgttaacgatgtagtgtgaattaatttaataaatcagacgtagagaaaaggaggatacttgttctttgcttgtatcctgttcct

SEQ ID NO: 5673 - protein, 564 aa, Zea mays subsp. mays
  peptide (1)..(564): Ceres Seq. ID no. 12413146
QIPLTRRSAIPSELTAILFLLIGMSGFLAVVGKVGTFLLWVLFLVLQTATRIVGSLLASSAEQQDDHHQESAAARRRSPPASPHPELYEPASASLAQLWDPPPLPHLAFAPAADESSSSSSLRRRASAPLPRADEDFVVPSSAYSRPTVGVAHTHSVSAPPLRAIETRAVPSRLVTAGGKRPRLERKYSKIVDQYRSLDEVIEALAQAGLESSNLIIGIDFTKSNEWTGKNCFNGISLHNISDNPNPYEQAISIIGKTLSAFDEDNLIPCFGFGDASTHDQDVFAFYPDERPCNGFQEALARYREIVPHLRLSGPTSFAPIIDMATTIVEQSGGQYHVLVIIADGQVTRSVDTEFGQLSTQEQMTVDAIVQASQFPLSIILVGVGDGPWDMMKEFDDNIPARSFDNFQFVNFTAIMSKKISQSKKETEFALSALMEIPLQYKATLELGILGRRIGESPERIPLPPPFASYSTVSRAEPSRANSYRSVPSHPREEPAVNSTITASVTSPSAAESRVLEPQMCPVCLSKPRDMAFGCGHQTCSECGPQVTDCPICRRPIDTRVKFY

SEQ ID NO: 5674 - protein, 541 aa, Zea mays subsp. mays
  peptide (1)..(541): Ceres Seq. ID no. 12413147
MSGFLAVVGKVGTFLLWVLFLVLQTATRIVGSLLASSAEQQDDHHQESAAARRRSPPASPHPELYEPASASLAQLWDPPPLPHLAFAPAADESSSSSSLRRRASAPLPRADEDFVVPSSAYSRPTVGVAHTHSVSAPPLRAIETRAVPSRLVTAGGKRPRLERKYSKIVDQYRSLDEVIEALAQAGLESSNLIIGIDFTKSNEWTGKNCFNGISLHNISDNPNPYEQAISIIGKTLSAFDEDNLIPCFGFGDASTHDQDVFAFYPDERPCNGFQEALARYREIVPHLRLSGPTSFAPIIDMATTIVEQSGGQYHVLVIIADGQVTRSVDTEFGQLSTQEQMTVDAIVQASQFPLSIILVGVGDGPWDMMKEFDDNIPARSFDNFQFVNFTAIMSKKISQSKKETEFALSALMEIPLQYKATLELGILGRRIGESPERIPLPPPFASYSTVSRAEPSRANSYRSVPSHPREEPAVNSTITASVTSPSAAESRVLEPQMCPVCLSKPRDMAFGCGHQTCSECGPQVTDCPICRRPIDTRVKFY

SEQ ID NO: 5675 - DNA, 1867 bp, Zea mays subsp. mays
  misc_feature (1)..(1867): Ceres Seq. ID no. 12376488
  misc_feature (1)..(1867): Ortholog of  Ceres SEQ ID NO 13586110 as cited in SEQ ID NO 656
ccctttcttctttggcttggcatctccacccttcctgagttccttccttcctcgcctggcgttcccaccccttgccacctcgcccgcttccggctcctcccccctcgcccgtcctgactctggtcgcggcggagccgtcagatctgggccacgggtgccagcccagccggcgggcggcgggacggagggctgcgggatgaagtcgtcgttgaggagccggcaggagccgcggcgggtcagcaacggcgtcatcatcggcgccatgctgctatccctctgcgtcctcagcatcgtcaaggccagatactgcgccacccccttcggcaaggccgaggaccagctccaggagcagatgaactccagcatccggatggagccggaggagtcgtcgccggccaggacgcccggagaggaggaggaggaggaggacgacggagagaatggggcgtcggccaccaccaccacggcgcccgcggtgacgaaaacgccggcggccgtcgcggccggcggcaacaggggcaagggcaagccgacgtgctacatgacgagcaagcgctcggagcggtgcgacgcgtccggtgacatccgtgtggacgggaaccgctccaccatctacgtcagcgggatagaccgggagtggaagaccaagccgtatgcgcgctaccacgacccggtcgccatggcccacgtccgcgagtacaccctcaagccgctcccggaggcggcgccggcgccggcgtgcacccggaaccactccgtcccgggttttctcttctccaacggcggcttctccggcaacctgtaccacgactacacggacgtgttggtgccgctgttcatcagcacgcaccagttccggggccgggtgcagttcctgctgagcgggatgaagccgtggtgggtggccaagttcacgcccttcttccggcagctgacccggtacgacgtcatcgacgtggacaacgaccaggaggtgcactgcttcccccggatcgtggtcggcgccaccttccacaaggacatgggcgtggacccgcggcggtcgccgggccacgtctccgtggtggacttcaagcgcgcgctgcgccgcgccttcggcctgccgcgcgaggccgccacgcgcggcggcgccacggggcgcggcaagccccgnntgctgatcatctcgcgccggggctcccggcggttcctgaacgagcgggagatggcgcgcgccgcggcgggagccgggttcgaggtgcgcgtggcggagcccgaccagcacacggacacggccgcgttcgcggcgctggtgaactcggcggacgtgatggtgggcgtgcacggcgccgggctgaccaacatggtgttcctgccccgcggcgccgtgctcgtccaggttgtgccgttcggcgggctggagtggctcacgggcgtcactttcaaggaccccgccgcggacatggaggtgagctacatgggctacgacgtgacgctggaggagagctcgctgatcgaccagtaccccaggaaccaccaggtgctcaccgacccctacgccgtgcacaagcagggctgggacgcgctcaaggcggcgtacctggacaagcagaacatccggatggatctcgacaggttcagggccacgctgagggaggccatgagccggttgccgccggctccgtgaccggccgccgtgccccggcccggaggtagataggttggtgtatctatcgtccccgttgtcatgctctcaacaagttgacttaatcttcttcttcttctccgtcccccctttttatttttattatgtcactagcaagattcttttggtccattgttttgttgtgttgtttactgctgctacataaggaatcaatctcatggg

SEQ ID NO: 5676 - protein, 554 aa, Zea mays subsp. mays
  peptide (1)..(554): Ceres Seq. ID no. 12376489
  misc_feature (384)..(384): Xaa is any aa, unknown or other
  misc_feature (385)..(385): Xaa is any aa, unknown or other
PFFFGLASPPFLSSFLPRLAFPPLATSPASGSSPLARPDSGRGGAVRSGPRVPAQPAGGGTEGCGMKSSLRSRQEPRRVSNGVIIGAMLLSLCVLSIVKARYCATPFGKAEDQLQEQMNSSIRMEPEESSPARTPGEEEEEEDDGENGASATTTTAPAVTKTPAAVAAGGNRGKGKPTCYMTSKRSERCDASGDIRVDGNRSTIYVSGIDREWKTKPYARYHDPVAMAHVREYTLKPLPEAAPAPACTRNHSVPGFLFSNGGFSGNLYHDYTDVLVPLFISTHQFRGRVQFLLSGMKPWWVAKFTPFFRQLTRYDVIDVDNDQEVHCFPRIVVGATFHKDMGVDPRRSPGHVSVVDFKRALRRAFGLPREAATRGGATGRGKPXXLIISRRGSRRFLNEREMARAAAGAGFEVRVAEPDQHTDTAAFAALVNSADVMVGVHGAGLTNMVFLPRGAVLVQVVPFGGLEWLTGVTFKDPAADMEVSYMGYDVTLEESSLIDQYPRNHQVLTDPYAVHKQGWDALKAAYLDKQNIRMDLDRFRATLREAMSRLPPAP

SEQ ID NO: 5677 - protein, 489 aa, Zea mays subsp. mays
  peptide (1)..(489): Ceres Seq. ID no. 12376490
  misc_feature (319)..(319): Xaa is any aa, unknown or other
  misc_feature (320)..(320): Xaa is any aa, unknown or other
MKSSLRSRQEPRRVSNGVIIGAMLLSLCVLSIVKARYCATPFGKAEDQLQEQMNSSIRMEPEESSPARTPGEEEEEEDDGENGASATTTTAPAVTKTPAAVAAGGNRGKGKPTCYMTSKRSERCDASGDIRVDGNRSTIYVSGIDREWKTKPYARYHDPVAMAHVREYTLKPLPEAAPAPACTRNHSVPGFLFSNGGFSGNLYHDYTDVLVPLFISTHQFRGRVQFLLSGMKPWWVAKFTPFFRQLTRYDVIDVDNDQEVHCFPRIVVGATFHKDMGVDPRRSPGHVSVVDFKRALRRAFGLPREAATRGGATGRGKPXXLIISRRGSRRFLNEREMARAAAGAGFEVRVAEPDQHTDTAAFAALVNSADVMVGVHGAGLTNMVFLPRGAVLVQVVPFGGLEWLTGVTFKDPAADMEVSYMGYDVTLEESSLIDQYPRNHQVLTDPYAVHKQGWDALKAAYLDKQNIRMDLDRFRATLREAMSRLPPAP

SEQ ID NO: 5678 - protein, 467 aa, Zea mays subsp. mays
  peptide (1)..(467): Ceres Seq. ID no. 12376491
  misc_feature (297)..(297): Xaa is any aa, unknown or other
  misc_feature (298)..(298): Xaa is any aa, unknown or other
MLLSLCVLSIVKARYCATPFGKAEDQLQEQMNSSIRMEPEESSPARTPGEEEEEEDDGENGASATTTTAPAVTKTPAAVAAGGNRGKGKPTCYMTSKRSERCDASGDIRVDGNRSTIYVSGIDREWKTKPYARYHDPVAMAHVREYTLKPLPEAAPAPACTRNHSVPGFLFSNGGFSGNLYHDYTDVLVPLFISTHQFRGRVQFLLSGMKPWWVAKFTPFFRQLTRYDVIDVDNDQEVHCFPRIVVGATFHKDMGVDPRRSPGHVSVVDFKRALRRAFGLPREAATRGGATGRGKPXXLIISRRGSRRFLNEREMARAAAGAGFEVRVAEPDQHTDTAAFAALVNSADVMVGVHGAGLTNMVFLPRGAVLVQVVPFGGLEWLTGVTFKDPAADMEVSYMGYDVTLEESSLIDQYPRNHQVLTDPYAVHKQGWDALKAAYLDKQNIRMDLDRFRATLREAMSRLPPAP

SEQ ID NO: 5679 - DNA, 1315 bp, Zea mays subsp. mays
  misc_feature (1)..(1315): Ceres Seq. ID no. 12409386
  misc_feature (1)..(1315): Ortholog of  Ceres SEQ ID NO 12578315 as cited in SEQ ID NO 62451
  misc_feature (1)..(1315): Ortholog of  Ceres SEQ ID NO 12617090 as cited in SEQ ID NO 64005
  misc_feature (1)..(1315): Ortholog of  Ceres SEQ ID NO 13597233 as cited in SEQ ID NO 64370
  misc_feature (1)..(1315): Ortholog of  Ceres SEQ ID NO 13584577 as cited in SEQ ID NO 65298
aatctgacatctcatcttgatccatccagctttgcctcgatcgccggccggtagccatgtcccccacggaagaagccgctggtggtggtctcgacgactatgaccgcttgagcgagctgaaggcgttcgacgacagcaaggccggcgtcaagggcctcgtggacgctggcgtcacgaccatccctgccatcttccgcggccatctccttcaggaagggccgaaggtatcgtcctctagcagtagcagcagtactagtcttagcattatcccggtcatcgacctctcggcggcggacgcagtcgcacgggaggaggtggtcgcccagttgaaggctgcagccgagacggtggggttcttccagctggtgaaccacggcgttcccagcgagctcctgtccgagatgctggcgtcggtgaggcggttcaacgaggagccccacgaggtgaagcggccctactacacgcgggacgcacgtcgcaaggtgcggttcaactccaacttcgatctgttccagtcgccggcggccaactggcgcgacacgctcttctgcgaggcagcgccggagccgccgcgggcggaggagctgccggtcgccgtcaggcacgtgatgctggagtacggcggcgcggtgcgggaggtggcggcgcgcgtgctggggctgctctcggaggccctggggctgagccccgggcacctcgcagggatggggtgcgcggagggcctcagcctggtgtgcaagtgtgcaactactacccgccgtgcccggaaccggacctcaccctgggctgcagcaggcactcggaccccagcttcctgaccgtgctgctgcaggactcgcatgcgcagggcggcctgcaggcgctcctcgcatccaggtggctggacgtgcctccggtggccggcgcgctcctggtgaacgtcggagaccttctccagctggtcagcaacgggcggttcaagagcgtggagcaccgggtggtggctaaccggagcagggacacggcgagagtgtcagtggcgtgcttctgcaacgcggacatcgcgagatccacgaggctgtatggacccatcgcggagctcatcgccgcggacgacagcgacggcgcgggaagggcgctgtacaggaacgtgacggtcccggagttcctagcgcactacgacaagaaaggcctcgacggtcgcccggcgctccaccgcttccagctgcttcaataattttacatcacatcagtcctgactctggtgatatcatgtcagtatgtcactgtgggctactccggtactctaataaagttatggatggatcagatcaat

SEQ ID NO: 5680 - protein, 253 aa, Zea mays subsp. mays
  peptide (1)..(253): Ceres Seq. ID no. 12409387
MSPTEEAAGGGLDDYDRLSELKAFDDSKAGVKGLVDAGVTTIPAIFRGHLLQEGPKVSSSSSSSSTSLSIIPVIDLSAADAVAREEVVAQLKAAAETVGFFQLVNHGVPSELLSEMLASVRRFNEEPHEVKRPYYTRDARRKVRFNSNFDLFQSPAANWRDTLFCEAAPEPPRAEELPVAVRHVMLEYGGAVREVAARVLGLLSEALGLSPGHLAGMGCAEGLSLVCKCATTTRRARNRTSPWAAAGTRTPAS

SEQ ID NO: 5681 - protein, 138 aa, Zea mays subsp. mays
  peptide (1)..(138): Ceres Seq. ID no. 12409388
MLASVRRFNEEPHEVKRPYYTRDARRKVRFNSNFDLFQSPAANWRDTLFCEAAPEPPRAEELPVAVRHVMLEYGGAVREVAARVLGLLSEALGLSPGHLAGMGCAEGLSLVCKCATTTRRARNRTSPWAAAGTRTPAS

SEQ ID NO: 5682 - DNA, 1898 bp, Zea mays subsp. mays
  misc_feature (1)..(1898): Ceres Seq. ID no. 12405599
  misc_feature (1)..(1898): Ortholog of  Ceres SEQ ID NO 14315146 as cited in SEQ ID NO 52929
  misc_feature (1)..(1898): Ortholog of  Ceres SEQ ID NO 14302263 as cited in SEQ ID NO 64701
  misc_feature (1)..(1898): Ortholog of  Ceres SEQ ID NO 13584538 as cited in SEQ ID NO 64739
  misc_feature (1)..(1898): Ortholog of  Ceres SEQ ID NO 15169643 as cited in SEQ ID NO 64826
  misc_feature (1)..(1898): Ortholog of  Ceres SEQ ID NO 15169647 as cited in SEQ ID NO 64930
gaggcgatcgcatcggagactcggagccggcaaaaccctaaggggaaggtttctgcaaggaggagggagatgcagggcgccagccacatgctcctggaggagcccttccgcctcgcctccgtcctctcccccgccaagcctaaagtattcccatcactcaccaagatagttgggacgctcgggcccaattcacactcggttgagattattcaggaatgcctcactgctggaatgtcagttgcacgatttgatttctcatggatggatgctgcgtatcaccaggagacccttgataatttgaggaaagcggcacagaatgtgaagaagttgtgccctgtaatgttggatactcttggtccagaaattcaggttcacaattccactggtgagccaattgagttgaaagctgggaatcatgttatcataactccagatatttctaaagctctctctgctgagatcctaccaattaagtttggtgatctggcaaaagctgtgaagaagggtgatactctttttatgggccaatatctcttcacaggaagtgaaacaacatctgtctggctagaagttgtggaaacttctggggaaaatgtaaattgtctagtgaagaatgcagctacacttgccggccccatattcactctgcatgcttcacaagttcacatcaatttgcccactttgagtgaatatgataaacatgtcatttcaacttggggttcatgtaacagtgttgacattatatcactttcccatacccgctctgctgaagatgtcagggagctcagggcctttttacaagcacacgcccttcctgacacacaaatatacgcgaagattgaaaattctgagggtttggataattttgatgacattctcaacgcggcagatggtatcattatttctcgaggagacctgggtattgaccttcctccagaaaacgttttcatgttccaaaagacagctattcataaatgcaatctggagggtaaacctgtgatcatcactagagttgtggacagcatgattgacaatctacgccctacccgtgcagaggcaactgatgttgcaaatgctgtcctagatggcactgatggcattttgcttggtgcggagacacttcgagggctttatcctgttgatgcagtgagtactgtggggagaatatgtgcagaagctgagactgtgtataatcagccgcttcaattcaagaaagtaatgtggcatgtaggtgacccaatgccccacgaggaatctgtggcatcagcagcggttggttctgcaatcaaagtaaaagctgctgccattgttgtgttcacattctcagggagagctgcgaggttagttgccaagtataggccaacaatgccaattttagcagttatcttcccacgtcaaggatccgatccatcaaagtggcgttcttatggcacaacacaggcaagacaatgtttcgcagtgagaggcgtgtaccctttgatggggagtactgatgaggccgaaactggtgggctaacaaaggaagagtatgggataaaacttgcgatgagctatggtcggtcggtcggcatagtgaagcctttcgacagggtgataatctttgaaaagattggtgattcttctgttgtcaagatcattgagtgtgaaggttaggcattagatgattgatacctacaaggctacaacccatgctgtagtttcatgtatcgcatgggagattacctccagttccatctcacttatttaaccaacaagtagagtacagcaagagcacaagatatcttgttagggaattttgccctcttttcagattgtcttttgatttgacgcaataaattatgatgtcacagatttatactggaattatgatttgattatgcaaatataggattgttggc

SEQ ID NO: 5683 - protein, 550 aa, Zea mays subsp. mays
  peptide (1)..(550): Ceres Seq. ID no. 12405600
EAIASETRSRQNPKGKVSARRREMQGASHMLLEEPFRLASVLSPAKPKVFPSLTKIVGTLGPNSHSVEIIQECLTAGMSVARFDFSWMDAAYHQETLDNLRKAAQNVKKLCPVMLDTLGPEIQVHNSTGEPIELKAGNHVIITPDISKALSAEILPIKFGDLAKAVKKGDTLFMGQYLFTGSETTSVWLEVVETSGENVNCLVKNAATLAGPIFTLHASQVHINLPTLSEYDKHVISTWGSCNSVDIISLSHTRSAEDVRELRAFLQAHALPDTQIYAKIENSEGLDNFDDILNAADGIIISRGDLGIDLPPENVFMFQKTAIHKCNLEGKPVIITRVVDSMIDNLRPTRAEATDVANAVLDGTDGILLGAETLRGLYPVDAVSTVGRICAEAETVYNQPLQFKKVMWHVGDPMPHEESVASAAVGSAIKVKAAAIVVFTFSGRAARLVAKYRPTMPILAVIFPRQGSDPSKWRSYGTTQARQCFAVRGVYPLMGSTDEAETGGLTKEEYGIKLAMSYGRSVGIVKPFDRVIIFEKIGDSSVVKIIECEG

SEQ ID NO: 5684 - protein, 527 aa, Zea mays subsp. mays
  peptide (1)..(527): Ceres Seq. ID no. 12405601
MQGASHMLLEEPFRLASVLSPAKPKVFPSLTKIVGTLGPNSHSVEIIQECLTAGMSVARFDFSWMDAAYHQETLDNLRKAAQNVKKLCPVMLDTLGPEIQVHNSTGEPIELKAGNHVIITPDISKALSAEILPIKFGDLAKAVKKGDTLFMGQYLFTGSETTSVWLEVVETSGENVNCLVKNAATLAGPIFTLHASQVHINLPTLSEYDKHVISTWGSCNSVDIISLSHTRSAEDVRELRAFLQAHALPDTQIYAKIENSEGLDNFDDILNAADGIIISRGDLGIDLPPENVFMFQKTAIHKCNLEGKPVIITRVVDSMIDNLRPTRAEATDVANAVLDGTDGILLGAETLRGLYPVDAVSTVGRICAEAETVYNQPLQFKKVMWHVGDPMPHEESVASAAVGSAIKVKAAAIVVFTFSGRAARLVAKYRPTMPILAVIFPRQGSDPSKWRSYGTTQARQCFAVRGVYPLMGSTDEAETGGLTKEEYGIKLAMSYGRSVGIVKPFDRVIIFEKIGDSSVVKIIECEG

SEQ ID NO: 5685 - protein, 521 aa, Zea mays subsp. mays
  peptide (1)..(521): Ceres Seq. ID no. 12405602
MLLEEPFRLASVLSPAKPKVFPSLTKIVGTLGPNSHSVEIIQECLTAGMSVARFDFSWMDAAYHQETLDNLRKAAQNVKKLCPVMLDTLGPEIQVHNSTGEPIELKAGNHVIITPDISKALSAEILPIKFGDLAKAVKKGDTLFMGQYLFTGSETTSVWLEVVETSGENVNCLVKNAATLAGPIFTLHASQVHINLPTLSEYDKHVISTWGSCNSVDIISLSHTRSAEDVRELRAFLQAHALPDTQIYAKIENSEGLDNFDDILNAADGIIISRGDLGIDLPPENVFMFQKTAIHKCNLEGKPVIITRVVDSMIDNLRPTRAEATDVANAVLDGTDGILLGAETLRGLYPVDAVSTVGRICAEAETVYNQPLQFKKVMWHVGDPMPHEESVASAAVGSAIKVKAAAIVVFTFSGRAARLVAKYRPTMPILAVIFPRQGSDPSKWRSYGTTQARQCFAVRGVYPLMGSTDEAETGGLTKEEYGIKLAMSYGRSVGIVKPFDRVIIFEKIGDSSVVKIIECEG

SEQ ID NO: 5686 - DNA, 1589 bp, Zea mays subsp. mays
  misc_feature (1)..(1589): Ceres Seq. ID no. 12352373
  misc_feature (1)..(1589): Ortholog of  Ceres SEQ ID NO 13599520 as cited in SEQ ID NO 633
  misc_feature (1)..(1589): Ortholog of  Ceres SEQ ID NO 13595142 as cited in SEQ ID NO 56671
  misc_feature (1)..(1589): Ortholog of  Ceres SEQ ID NO 15168569 as cited in SEQ ID NO 58123
  misc_feature (1)..(1589): Ortholog of  Ceres SEQ ID NO 15226382 as cited in SEQ ID NO 63295
  misc_feature (1)..(1589): Ortholog of  Ceres SEQ ID NO 13598460 as cited in SEQ ID NO 63382
  misc_feature (1)..(1589): Ortholog of  Ceres SEQ ID NO 13597403 as cited in SEQ ID NO 64085
tttttttcgaaaaccggttttccccactccacaccaccaccaccaccattgacgacttgactacaaagcccagatccattcctcggggtcgggcggccgccaatcccgccgcataccgctggccgagtcctcgtcggcgccggacggggtgaagtgaaggccgactgggagaattttgtggatcttatctggtctccatcatggaacaagacggcacgacgaacctggctgtcactgaggctgtgcgctcggtgcagctgctcaagatcgacggctactgcgccaccgctaccatgaaatcatcggagttcatcaaattccgatggcacatcgatggccacgagtgggaggtccgtttctatcctgattactggtacttcttcgaggacgaggactgcttcagcacttatggcgacgacgatcactccgagtgggtaggtctgaagctcatccttgtcagtgaaccccagagggacgacgacaaggtgagggtgaacctgagctgccggcttgtatgccccagccccaccagccagcggcggcatctcggtacctgctggtccgaagagaagagggtgtcccatgtgtttgccagcaactcgaaatgctcgcctgaacttctcctcatcctgaagcacgagctaccatcgtcaggttatctcgtggacgattcactgaccgtggaatgcacggtcaccgtgctacgcgacttggacgccgccacggataaggcgctgtcgtccctgccagtgccgccaccctcggacctacaccagcacctcggcgacctcctgcagagcgaggacggagcggacgtcacgttccgtgtctccggggagtccttcgccgcccacagggccatactcgccgcaaggtcccctgtttttaaggccgagttcttcggaggcatggaggaacgcagctccgcttctgtggaggtcaaaggcatggaggctgctgtgttcaggtccatgcttcgcttcatctataccgacacggctccagagctcgacggtgcccaggaccaggagcctgaggcggcggtggccatggctcagcacctactggtagctgctgacaggtatgggctgaacagactgaagctcatgtgcgaatgcaagctctctggcggcatcgacatcggcacagcggccgcgacgttggctctcgccgagcagcacaactgctcgctgctcaaagccaagtgccttgagttcgtcaccaggtcgcctgagactctcgatgctatcctggcgactgacggctacgagcatctggtggcaagctgcccctcggtgctggctgaactgctgagggctgcgcgtggaaggaagatctgagctggacgatgatttcatattatggtttgcctaagatgtgtgcgaactaaaaaccatgcatgatgaactagtagtgcttgcagttgatttcctgcccctcctttcagtttgacctgcgcttgtcatgcatgtattgtatgcacatacatgagacgggcagctagcattttctgtggttcgatctcgtctcggctttgtgcctgccatttgggggcttaattgtaccggttgccgtttctcgttcttcgc

SEQ ID NO: 5687 - protein, 379 aa, Zea mays subsp. mays
  peptide (1)..(379): Ceres Seq. ID no. 12352374
MEQDGTTNLAVTEAVRSVQLLKIDGYCATATMKSSEFIKFRWHIDGHEWEVRFYPDYWYFFEDEDCFSTYGDDDHSEWVGLKLILVSEPQRDDDKVRVNLSCRLVCPSPTSQRRHLGTCWSEEKRVSHVFASNSKCSPELLLILKHELPSSGYLVDDSLTVECTVTVLRDLDAATDKALSSLPVPPPSDLHQHLGDLLQSEDGADVTFRVSGESFAAHRAILAARSPVFKAEFFGGMEERSSASVEVKGMEAAVFRSMLRFIYTDTAPELDGAQDQEPEAAVAMAQHLLVAADRYGLNRLKLMCECKLSGGIDIGTAAATLALAEQHNCSLLKAKCLEFVTRSPETLDAILATDGYEHLVASCPSVLAELLRAARGRKI

SEQ ID NO: 5688 - protein, 348 aa, Zea mays subsp. mays
  peptide (1)..(348): Ceres Seq. ID no. 12352375
MKSSEFIKFRWHIDGHEWEVRFYPDYWYFFEDEDCFSTYGDDDHSEWVGLKLILVSEPQRDDDKVRVNLSCRLVCPSPTSQRRHLGTCWSEEKRVSHVFASNSKCSPELLLILKHELPSSGYLVDDSLTVECTVTVLRDLDAATDKALSSLPVPPPSDLHQHLGDLLQSEDGADVTFRVSGESFAAHRAILAARSPVFKAEFFGGMEERSSASVEVKGMEAAVFRSMLRFIYTDTAPELDGAQDQEPEAAVAMAQHLLVAADRYGLNRLKLMCECKLSGGIDIGTAAATLALAEQHNCSLLKAKCLEFVTRSPETLDAILATDGYEHLVASCPSVLAELLRAARGRKI

SEQ ID NO: 5689 - DNA, 1591 bp, Zea mays subsp. mays
  misc_feature (1)..(1591): Ceres Seq. ID no. 12409382
  misc_feature (1)..(1591): Ortholog of  Ceres SEQ ID NO 14304838 as cited in SEQ ID NO 59750
aaccgcaggttcgggagtactccggaacccgccgccgcatccacacgacgccacgactgacgacggagagccccggtctccttccacggctccaccgccaccaccccgcataaaagtagggaagagagccttgcagcgagaaccgtatcgatctattctcgtctgaagcaattcgcccctgtcgtgagcagaaccctacagctcgtattcgcctcatctcgcagcagcagcagaagaacaagggtatggcgaaggatgggggtcccgactggaacggcctgctcaagtggagcctcgcccacggcgacggcaccaacccgccgcgtgctctcagcgaggaagacagaaaatggttcatggatgctatgcaagccaacacggtagatgttgtgaagaggatgaaggagatcactcaggtgatgaaaactccagaagatgtcttgcagtctcagggcgtgacccctgagaacatcgaagatatgttggatgagctacaggagcatgttgaatccattgacatggcaaatgatctacattctattggtgggctggatcctctacttggttacttgaaaaattcaaatgctggcatccgagcaaaggcagcagaagttgttagtacaattgtgcagaataatcccaagagtcagcaacttgtcatggaatccaatgggctagagccactgttgacgaacttcaaatcagatccaagtacaaatgcacgcacaaaagctttaggagccatatcttctctaattcgtcataaccagcctggagtttccgcatttcgattgggaaatggctatgctggattgaaggatgctgttggttccgatgatgccagactccaaaggaaagctctcaatctcatacaatacttgctgcacaactacaaggcagacaggagtgttgccacagagcttggtcttccgaagctgatgatgcaccttgtgtccagcgatgattccttagtgcgtgaagctgctctaggcggcctccttgagttggcgcgggacaagacatctggtaacgcgctacctgaccaagaaaagctgaaagacatgctcaagcagccgaatagaagggatcagcgcaatggacactgacgatctccacgctgctcgcgaggagcggcagctggtggattcactctggaaggagtgctacaacgaaccttcgtctctcagggagaagggcctcgtcgtgcttccgggagaggatgctccccaacagccgccaccagacgttgcagggaagatgtttgagccaccgcttcgtgcgtgggcggctgcaagacctgctcaggaagatgactctgactctggcagcggaaagaaggatccgccattgctgcttaagttttgacggccttcttatgccgatactagttcttaggctccaccatgggtgttgaaagctgaaagatcagatctgatggatgcctgaccttcttcgaacctcagttgtggttcttgtaatttgcaccgcatttctgttctgagtatgttttatgagaagactgggaagatgacagacagatactgtatcacgtgatgctcgtaaattaacactacatgcgaattctcttgct

SEQ ID NO: 5690 - protein, 286 aa, Zea mays subsp. mays
  peptide (1)..(286): Ceres Seq. ID no. 12409383
MAKDGGPDWNGLLKWSLAHGDGTNPPRALSEEDRKWFMDAMQANTVDVVKRMKEITQVMKTPEDVLQSQGVTPENIEDMLDELQEHVESIDMANDLHSIGGLDPLLGYLKNSNAGIRAKAAEVVSTIVQNNPKSQQLVMESNGLEPLLTNFKSDPSTNARTKALGAISSLIRHNQPGVSAFRLGNGYAGLKDAVGSDDARLQRKALNLIQYLLHNYKADRSVATELGLPKLMMHLVSSDDSLVREAALGGLLELARDKTSGNALPDQEKLKDMLKQPNRRDQRNGH

SEQ ID NO: 5691 - protein, 249 aa, Zea mays subsp. mays
  peptide (1)..(249): Ceres Seq. ID no. 12409384
MDAMQANTVDVVKRMKEITQVMKTPEDVLQSQGVTPENIEDMLDELQEHVESIDMANDLHSIGGLDPLLGYLKNSNAGIRAKAAEVVSTIVQNNPKSQQLVMESNGLEPLLTNFKSDPSTNARTKALGAISSLIRHNQPGVSAFRLGNGYAGLKDAVGSDDARLQRKALNLIQYLLHNYKADRSVATELGLPKLMMHLVSSDDSLVREAALGGLLELARDKTSGNALPDQEKLKDMLKQPNRRDQRNGH

SEQ ID NO: 5692 - protein, 246 aa, Zea mays subsp. mays
  peptide (1)..(246): Ceres Seq. ID no. 12409385
MQANTVDVVKRMKEITQVMKTPEDVLQSQGVTPENIEDMLDELQEHVESIDMANDLHSIGGLDPLLGYLKNSNAGIRAKAAEVVSTIVQNNPKSQQLVMESNGLEPLLTNFKSDPSTNARTKALGAISSLIRHNQPGVSAFRLGNGYAGLKDAVGSDDARLQRKALNLIQYLLHNYKADRSVATELGLPKLMMHLVSSDDSLVREAALGGLLELARDKTSGNALPDQEKLKDMLKQPNRRDQRNGH

SEQ ID NO: 5693 - DNA, 1489 bp, Zea mays subsp. mays
  misc_feature (1)..(1489): Ceres Seq. ID no. 12407941
  misc_feature (1)..(1489): Ortholog of  Ceres SEQ ID NO 13582619 as cited in SEQ ID NO 56520
  misc_feature (1)..(1489): Ortholog of  Ceres SEQ ID NO 13660872 as cited in SEQ ID NO 60830
  misc_feature (1)..(1489): Ortholog of  Ceres SEQ ID NO 15226831 as cited in SEQ ID NO 62916
  misc_feature (1)..(1489): Ortholog of  Ceres SEQ ID NO 12616221 as cited in SEQ ID NO 63291
gaaaaatggcacaagcacacagctcatcagttcttcttcgtcgtcttggctagctgcctagctagctagctagttcctcactcctctccgagaaccccctttttcatctctctctctcgcctagctcctttcgcgatgttatcttctctgctggcctcacaactcgagagagactcgtgaaaagaatccagatatataaagagatcgagggcagctagcttaattattagcatgtcgatgagcttcttgagcatggtggaggcggagctgccgccgggggttccggttccacccgagggacgacgagctcatctgcgactacctcgcgcccaagctcggcgccaagcccggcttctccggctgccgcccgcccatggtcgacgtcgacctcaacaaggtcgagccatgggacctccccgtggcggcgtcggtggggccgcgggagtggtacttcttcagcctcaaggaccgcaagtacgcgacggggcagcggacgaaccgggccacggtgtccgggtactggaaggcgacggggaaggaccgacccgtggtggcggcgcggcgaggcgcgctggtggggatgcgcaagacgctcgtgttctaccaggggagggcgcccaagggcaggaagacggagtgggtgatgcacgagtacaggatggagccagctgctcctcttcttgatcaccaaccctcctcatccaactccaaggatgaagattgggtgctgtgcagagtcatctgcaagaagaaactggcagcaggaggccgcgcaggagggggaagctcaaggagcctggtcgccagcaacggcggccgcgagaccgcgccagccaccccgccgccgccgccgctgccacctcgcatggacacggacgccaccctagcacagctccaggccgccatgcacgccaccgccggcgcgctcgagcaggtgccctgcttctccagcttcaataacaacactactgccagctctagagctgctgccgcagcagcagcagcagcgcagccatgctacctgcccagcatggccacaggcggcagccacggcacgacgagctactacctggaccacgcgatgctgccgcctgagctaggtggctgcttcgatcctctccacggcgacaagagctgctcaaggcggtgctgggccagctcggcggcgacgcggtggcgccgggcctgcacctgcagcacgagatggccgccggcgctgtcgtcgcttcgtccgcttggatgaatcacttctaggggacattagttcagcgaacctaagtatgtgattggttgcgtatattatgggaaatacatacatacatatatacataattgtgtggtgaaacatttgtgtgtgaggcaaggagtagagcatctgagcatgcgtcattttttctgttgctgccgatcgatttggacgagaaggccatgaggcaaggagtaaactctgtaatataatggctgctcaagtgtgtgtacattcagatgc

SEQ ID NO: 5694 - protein, 289 aa, Zea mays subsp. mays
  peptide (1)..(289): Ceres Seq. ID no. 12407942
MVDVDLNKVEPWDLPVAASVGPREWYFFSLKDRKYATGQRTNRATVSGYWKATGKDRPVVAARRGALVGMRKTLVFYQGRAPKGRKTEWVMHEYRMEPAAPLLDHQPSSSNSKDEDWVLCRVICKKKLAAGGRAGGGSSRSLVASNGGRETAPATPPPPPLPPRMDTDATLAQLQAAMHATAGALEQVPCFSSFNNNTTASSRAAAAAAAAAQPCYLPSMATGGSHGTTSYYLDHAMLPPELGGCFDPLHGDKSCSRRCWASSAATRWRRACTCSTRWPPALSSLRPLG

SEQ ID NO: 5695 - protein, 220 aa, Zea mays subsp. mays
  peptide (1)..(220): Ceres Seq. ID no. 12407943
MRKTLVFYQGRAPKGRKTEWVMHEYRMEPAAPLLDHQPSSSNSKDEDWVLCRVICKKKLAAGGRAGGGSSRSLVASNGGRETAPATPPPPPLPPRMDTDATLAQLQAAMHATAGALEQVPCFSSFNNNTTASSRAAAAAAAAAQPCYLPSMATGGSHGTTSYYLDHAMLPPELGGCFDPLHGDKSCSRRCWASSAATRWRRACTCSTRWPPALSSLRPLG

SEQ ID NO: 5696 - protein, 199 aa, Zea mays subsp. mays
  peptide (1)..(199): Ceres Seq. ID no. 12407944
MHEYRMEPAAPLLDHQPSSSNSKDEDWVLCRVICKKKLAAGGRAGGGSSRSLVASNGGRETAPATPPPPPLPPRMDTDATLAQLQAAMHATAGALEQVPCFSSFNNNTTASSRAAAAAAAAAQPCYLPSMATGGSHGTTSYYLDHAMLPPELGGCFDPLHGDKSCSRRCWASSAATRWRRACTCSTRWPPALSSLRPLG

SEQ ID NO: 5697 - DNA, 1238 bp, Zea mays subsp. mays
  misc_feature (1)..(1238): Ceres Seq. ID no. 12387069
  misc_feature (1)..(1238): Ortholog of  Ceres SEQ ID NO 12609518 as cited in SEQ ID NO 51887
  misc_feature (1)..(1238): Ortholog of  Ceres SEQ ID NO 13638980 as cited in SEQ ID NO 55975
  misc_feature (1)..(1238): Ortholog of  Ceres SEQ ID NO 13597466 as cited in SEQ ID NO 65077
  misc_feature (1)..(1238): Ortholog of  Ceres SEQ ID NO 13654590 as cited in SEQ ID NO 68615
attccctcgctcgcggccttgtacagcatactgtccttgcggcgctgctggctccgccgggtgttgggtcaacgttctcccgtccccccgagcgcagtctcgcgtggttctcccgtcccccgaggcccgagcgtagtctctctcttttgccgtggttctccagtcctccctcatccgctctctttctttctctcgtggcgagtggtaacgacgtcaggtgctcaggtcttgttcaggcccttcgccggcgacgagcacacagcaaatggatacaggagctcaagctatgttcatcatcagtcttgtgctctggtgtactacaagctttgccttggatgatgctgctgctacaaggattccaattgtgggcacattacctctgtcaatgaaagaaaatccgcaattatgccaactttgtgaggagtttgcatcagaggccctcttctatttaaatgaaaatgagacccagactgaaatcattgatacactacaccaagcttgttcaaagtttggctcttttaagctggagtgcacgaggttggtggattattatgtccctcttttcttcacaaaaattgcttcattaagccctgaagaattttgtgcatcagcaagtttttgtggggaggtaacattcattcgtcttccaagacatgaagatacttgcaccctttgccatgaggttgtcgatgaggttgttactaatcttgaagatccaggcatggagcttaagataattgagatacttctgaaaggatgcaataatgcagaggattatgtacaaaagtgcaagaggttgataatccaaaatgcacctatcataatggagaatattaagaagttcctcgagaagagagatttttgcaattctatccatgtctgtggaagtaaatccgttcgcgctggatcacaagtcctcagaagcctttcttcagcctgaagccctgaacttgcacggattgttatgatcatgcaacagatattagtgtaaaaacaagtccaggcgccgctatgtgagtcccgtgtgacatcgactgtacagatttggctgtgtacatgttaaaggaaaacacaactgaggcacaaacctcttctgtttacgggtcatgagcagggtgtgtatttgaactgtatatcattataccttggattggatgtcatgttgctctatatttatacgtaaccgagttttgtaactttggagaagtaatgtatatgatgccaaagcttgatcttcc

SEQ ID NO: 5698 - protein, 224 aa, Zea mays subsp. mays
  peptide (1)..(224): Ceres Seq. ID no. 12387070
MDTGAQAMFIISLVLWCTTSFALDDAAATRIPIVGTLPLSMKENPQLCQLCEEFASEALFYLNENETQTEIIDTLHQACSKFGSFKLECTRLVDYYVPLFFTKIASLSPEEFCASASFCGEVTFIRLPRHEDTCTLCHEVVDEVVTNLEDPGMELKIIEILLKGCNNAEDYVQKCKRLIIQNAPIIMENIKKFLEKRDFCNSIHVCGSKSVRAGSQVLRSLSSA

SEQ ID NO: 5699 - protein, 217 aa, Zea mays subsp. mays
  peptide (1)..(217): Ceres Seq. ID no. 12387071
MFIISLVLWCTTSFALDDAAATRIPIVGTLPLSMKENPQLCQLCEEFASEALFYLNENETQTEIIDTLHQACSKFGSFKLECTRLVDYYVPLFFTKIASLSPEEFCASASFCGEVTFIRLPRHEDTCTLCHEVVDEVVTNLEDPGMELKIIEILLKGCNNAEDYVQKCKRLIIQNAPIIMENIKKFLEKRDFCNSIHVCGSKSVRAGSQVLRSLSSA

SEQ ID NO: 5700 - protein, 184 aa, Zea mays subsp. mays
  peptide (1)..(184): Ceres Seq. ID no. 12387072
MKENPQLCQLCEEFASEALFYLNENETQTEIIDTLHQACSKFGSFKLECTRLVDYYVPLFFTKIASLSPEEFCASASFCGEVTFIRLPRHEDTCTLCHEVVDEVVTNLEDPGMELKIIEILLKGCNNAEDYVQKCKRLIIQNAPIIMENIKKFLEKRDFCNSIHVCGSKSVRAGSQVLRSLSSA

SEQ ID NO: 5701 - DNA, 1337 bp, Zea mays subsp. mays
  misc_feature (1)..(1337): Ceres Seq. ID no. 12409361
  misc_feature (1)..(1337): Ortholog of  Ceres SEQ ID NO 13637958 as cited in SEQ ID NO 60404
aactgataaaaggaccatggtactcgcaaagcgataggaagccaccgaaggagagaattggatagcagagagtttgcgtgtggaagcagagatggggtccggcatgagccgcggccggcggcgcggtttcggcgcaggggcgtcgggagggatgctgccactgctggcgcttcaggttctgatcgagtacggccgcgcgggcgcctctcggccgcccgtgacggcggcgttgctcgccggcaacgcgctcatctatctccgtcccggggcgctcgacgggatcctgccctctgtcacacgcgtctccttcaatccgcggctcatcgtcgagaatggcgacttggtgcgcttcttcttgtcaccattctaccacttgagcgaaagccacctgttctacaatatgacatcgctcctatggaagggtattcagcttgaaacatccatgggtagtgtcgagttcgcttccatggttgctgcattgcttgggctgtcacagggcatcgcgctgctcttgtccaaaggcctactcttgcttggtgattatactgcgtactacgaccaatacgcggttgggttctctggtgttctgtttgccatgaaggttgtgctgaacgcctggtcagaagattttgtctatctgcatgggatggtcattccggcgaaatacgctgcctgggctgagttgatcctcatccaggtcttcattcctggcacatcttttcttggccatctcagtggaatacttgctggattggtttacctttggctgaagcgggcgttgaatgggccagatcccctcactcttctggtgtcaagcattaccaaagtcgtgacctggccagtaagatttgcgcagaatcttctatggtctgcccatccacagggacgctttagaggccggggcagggttgggcgccggcaatcagcaagagatactcctcgaggtctatggagatgcccagcctgcacctatgacaactcagtttccacagatatctgtgagatgtgcagcactgcacgagaggaccatgatttttcgctgaggcagtatcatcaggctggaggtactggagaactcacagttgatgagatacgccgaaggaggctgcaaagattcggtagatgatgtaaatccattgttatcagcacactttgtgcggcgctgaacgaagctctatatgagtatgtatgatagctccattcctctgctacatagcgtaggcatatttggttcttctcgtgatggagaatgctttacattattgaattgtttctcatttttgaaggagacagttactgatgtaattttaggtacttcaaagccatagaagtatagt

SEQ ID NO: 5702 - protein, 344 aa, Zea mays subsp. mays
  peptide (1)..(344): Ceres Seq. ID no. 12409362
MGSGMSRGRRRGFGAGASGGMLPLLALQVLIEYGRAGASRPPVTAALLAGNALIYLRPGALDGILPSVTRVSFNPRLIVENGDLVRFFLSPFYHLSESHLFYNMTSLLWKGIQLETSMGSVEFASMVAALLGLSQGIALLLSKGLLLLGDYTAYYDQYAVGFSGVLFAMKVVLNAWSEDFVYLHGMVIPAKYAAWAELILIQVFIPGTSFLGHLSGILAGLVYLWLKRALNGPDPLTLLVSSITKVVTWPVRFAQNLLWSAHPQGRFRGRGRVGRRQSARDTPRGLWRCPACTYDNSVSTDICEMCSTAREDHDFSLRQYHQAGGTGELTVDEIRRRRLQRFGR

SEQ ID NO: 5703 - protein, 340 aa, Zea mays subsp. mays
  peptide (1)..(340): Ceres Seq. ID no. 12409363
MSRGRRRGFGAGASGGMLPLLALQVLIEYGRAGASRPPVTAALLAGNALIYLRPGALDGILPSVTRVSFNPRLIVENGDLVRFFLSPFYHLSESHLFYNMTSLLWKGIQLETSMGSVEFASMVAALLGLSQGIALLLSKGLLLLGDYTAYYDQYAVGFSGVLFAMKVVLNAWSEDFVYLHGMVIPAKYAAWAELILIQVFIPGTSFLGHLSGILAGLVYLWLKRALNGPDPLTLLVSSITKVVTWPVRFAQNLLWSAHPQGRFRGRGRVGRRQSARDTPRGLWRCPACTYDNSVSTDICEMCSTAREDHDFSLRQYHQAGGTGELTVDEIRRRRLQRFGR

SEQ ID NO: 5704 - protein, 324 aa, Zea mays subsp. mays
  peptide (1)..(324): Ceres Seq. ID no. 12409364
MLPLLALQVLIEYGRAGASRPPVTAALLAGNALIYLRPGALDGILPSVTRVSFNPRLIVENGDLVRFFLSPFYHLSESHLFYNMTSLLWKGIQLETSMGSVEFASMVAALLGLSQGIALLLSKGLLLLGDYTAYYDQYAVGFSGVLFAMKVVLNAWSEDFVYLHGMVIPAKYAAWAELILIQVFIPGTSFLGHLSGILAGLVYLWLKRALNGPDPLTLLVSSITKVVTWPVRFAQNLLWSAHPQGRFRGRGRVGRRQSARDTPRGLWRCPACTYDNSVSTDICEMCSTAREDHDFSLRQYHQAGGTGELTVDEIRRRRLQRFGR

SEQ ID NO: 5705 - DNA, 770 bp, Zea mays subsp. mays
  misc_feature (1)..(770): Ceres Seq. ID no. 12343798
  misc_feature (1)..(770): Ortholog of  Ceres SEQ ID NO 13638769 as cited in SEQ ID NO 51773
  misc_feature (1)..(770): Ortholog of  Ceres SEQ ID NO 12583723 as cited in SEQ ID NO 58297
  misc_feature (1)..(770): Ortholog of  Ceres SEQ ID NO 12623263 as cited in SEQ ID NO 60988
  misc_feature (1)..(770): Ortholog of  Ceres SEQ ID NO 15225568 as cited in SEQ ID NO 61512
  misc_feature (1)..(770): Ortholog of  Ceres SEQ ID NO 13664236 as cited in SEQ ID NO 66530
  misc_feature (1)..(770): Ortholog of  Ceres SEQ ID NO 13590249 as cited in SEQ ID NO 68385
  misc_feature (1)..(770): Ortholog of  Ceres SEQ ID NO 12635807 as cited in SEQ ID NO 0
  misc_feature (1)..(770): Ortholog of  Ceres SEQ ID NO 15179245 as cited in SEQ ID NO 0
gcgcttcagcagcagcggcttccactgtagtcccaagccggcgtgaccattccaaatcttccgcacccatctctcgccgcctcgcctgcaccggagactggccctagtgcccgcgcgcctgcgaggtatcgaacacccaaagatggcaatggcaaccttcacatcatccccagttctctgcagcttcaggaccatcgaacagaagaaggcccctctgctgaacaacagcacaaaacggccgcttcacttgggcttcccaaggagcgtgccgacgtcgccgagcttgagagagaggctagacctgcgcgtcgccgctgtctacaaggtgaagctcctcggccccgaagggcaggagagcgtgctcgacgtgccagaggacagctacatcctggacgcggccgaggaggccggtctcgacctgccctactcctgccgcgccggcgcgtgctccacgtgcgccggcaagctcctggagggctccgtcgaccaggcagaccagtcgttcctcgacgaggcgcaggtcggtgccgggtacgcgctcacctgcgtcgcgtacccgacgtctgactgcgtcatccagacgcacagggaggaagacttgtactagcccgggccggtccccgggcatggatcaacccagggccggccctgagggtgtgcagggtatgccaccgctcagggcccccaatatcagtagggccccgtatgtctagataatgtccaaatacatatatgttacaggtaaatctatattctcgtttttttgttgt

SEQ ID NO: 5706 - protein, 154 aa, Zea mays subsp. mays
  peptide (1)..(154): Ceres Seq. ID no. 12343799
MAMATFTSSPVLCSFRTIEQKKAPLLNNSTKRPLHLGFPRSVPTSPSLRERLDLRVAAVYKVKLLGPEGQESVLDVPEDSYILDAAEEAGLDLPYSCRAGACSTCAGKLLEGSVDQADQSFLDEAQVGAGYALTCVAYPTSDCVIQTHREEDLY

SEQ ID NO: 5707 - protein, 152 aa, Zea mays subsp. mays
  peptide (1)..(152): Ceres Seq. ID no. 12343800
MATFTSSPVLCSFRTIEQKKAPLLNNSTKRPLHLGFPRSVPTSPSLRERLDLRVAAVYKVKLLGPEGQESVLDVPEDSYILDAAEEAGLDLPYSCRAGACSTCAGKLLEGSVDQADQSFLDEAQVGAGYALTCVAYPTSDCVIQTHREEDLY

SEQ ID NO: 5708 - DNA, 1264 bp, Zea mays subsp. mays
  misc_feature (1)..(1264): Ceres Seq. ID no. 12409354
  misc_feature (1)..(1264): Ortholog of  Ceres SEQ ID NO 14310917 as cited in SEQ ID NO 53231
  misc_feature (1)..(1264): Ortholog of  Ceres SEQ ID NO 13598527 as cited in SEQ ID NO 64914
aattagttcctcgatcgattatcaccagcatctcacttcgttcagatatatatagcaagtctaagtcttagtttttgcttttggaacatctctctaatttcacgattgagcgtacgtgcgcacaaacaaacaaacaaacaaacaatatatgggttcttccaatgatgtcacggcgattcctctaatcgatgttgccccacttgtcaaaaagattgatgatccagacatggcaaatgataaggatttgctacgagttgttctaacgttggactatgcttgcaaggaggttggattcttttatgtgaaaggccacggcatttgtgagatgctaatgagggaagtgagggatgtgtcacacaaattctttcagcttccacatgaggaaaagatgaagattaagatgacacgtcaaagtgggtatagagggtatcaaaagctaggagagaatgttaccaaggaaaaacgtgatatgcacgaagcagtcaattgcttgactcctattgcacctggcaaatacggagaccttggtaaaacacttgaaggagacaatctgtggcctgaatacccatcaaatttgaaggtagtgctggaaaactatatcagccttgtcaaagatctgtcaaggaagatcatgcgaggtatagctttggcattgggtgggcctgctgatgcctttgaaaggggaatagcaggagatccttactgggctctcaggctggttagctaccctgtttcaagcagtgatgagaaacgcactgatgatactgggatgatgggatcgcacacagactacggacttgttacactggttaaccaggatgatgacatttgtgcccttgaggtccaaaatcgttccggtgtgtggatacgtgccaacccgattcctgaaacctttctttgcaacatcggtgacatgctccaggtctggtcaaatggaatttaccaacccacagttcatagagtcatcaacagctcccatcaacgccgcgtttctgctgtgtttttctatgagaccgattttgatgctgccgtagagcccgttgagttgtgcgtggagaaaacaggcggcgtcgccaagtatgacaaggtcgtgtatggggagcgtctggttcggaaggccttctgctgctttggccatttatagggctggagaataagttatattgctactgtgaaaacaaagggcatactatatgcattgcacacacaatgatctgttgttaaacctatgtgatatatattgtgaaataaaggaacacttatt

SEQ ID NO: 5709 - protein, 331 aa, Zea mays subsp. mays
  peptide (1)..(331): Ceres Seq. ID no. 12409355
MGSSNDVTAIPLIDVAPLVKKIDDPDMANDKDLLRVVLTLDYACKEVGFFYVKGHGICEMLMREVRDVSHKFFQLPHEEKMKIKMTRQSGYRGYQKLGENVTKEKRDMHEAVNCLTPIAPGKYGDLGKTLEGDNLWPEYPSNLKVVLENYISLVKDLSRKIMRGIALALGGPADAFERGIAGDPYWALRLVSYPVSSSDEKRTDDTGMMGSHTDYGLVTLVNQDDDICALEVQNRSGVWIRANPIPETFLCNIGDMLQVWSNGIYQPTVHRVINSSHQRRVSAVFFYETDFDAAVEPVELCVEKTGGVAKYDKVVYGERLVRKAFCCFGHL

SEQ ID NO: 5710 - protein, 305 aa, Zea mays subsp. mays
  peptide (1)..(305): Ceres Seq. ID no. 12409356
MANDKDLLRVVLTLDYACKEVGFFYVKGHGICEMLMREVRDVSHKFFQLPHEEKMKIKMTRQSGYRGYQKLGENVTKEKRDMHEAVNCLTPIAPGKYGDLGKTLEGDNLWPEYPSNLKVVLENYISLVKDLSRKIMRGIALALGGPADAFERGIAGDPYWALRLVSYPVSSSDEKRTDDTGMMGSHTDYGLVTLVNQDDDICALEVQNRSGVWIRANPIPETFLCNIGDMLQVWSNGIYQPTVHRVINSSHQRRVSAVFFYETDFDAAVEPVELCVEKTGGVAKYDKVVYGERLVRKAFCCFGHL

SEQ ID NO: 5711 - protein, 272 aa, Zea mays subsp. mays
  peptide (1)..(272): Ceres Seq. ID no. 12409357
MLMREVRDVSHKFFQLPHEEKMKIKMTRQSGYRGYQKLGENVTKEKRDMHEAVNCLTPIAPGKYGDLGKTLEGDNLWPEYPSNLKVVLENYISLVKDLSRKIMRGIALALGGPADAFERGIAGDPYWALRLVSYPVSSSDEKRTDDTGMMGSHTDYGLVTLVNQDDDICALEVQNRSGVWIRANPIPETFLCNIGDMLQVWSNGIYQPTVHRVINSSHQRRVSAVFFYETDFDAAVEPVELCVEKTGGVAKYDKVVYGERLVRKAFCCFGHL

SEQ ID NO: 5712 - DNA, 1569 bp, Zea mays subsp. mays
  misc_feature (1)..(1569): Ceres Seq. ID no. 12365538
  misc_feature (1)..(1569): Ortholog of  Ceres SEQ ID NO 14303205 as cited in SEQ ID NO 67255
agggctctagcatccccaatcccatcggtcagcctcatccatccgcagggcgccggcggcgggagtcttgccggccacatcgtcgccgatttcaccgatccgagctccggcctcttagccatggaatctccacgaactctggaagccctcaccaacgacctcgtggtggagatattcctccggatcggctcccctgccgacctcgttcgcgcctccgccgcctgcgtcgccctctgccgtctcatcgccaacccctccttcttgcgccggtaccgctccgtccacccgccgctacttctcggcctcctcgacccttatggcgatatcgaacccaccgagacaccccatccctccgctgctctcgctggcgccgtcgctcgcgccgctgacctccgcttcggcgagtattttcctagcagcaagttatccggctattgtgtctctgacgtccgagacggtcatgtcctcctcaccatcacgccctaccttgaggacgacgaggatgagaagttggtgccagacctcgcggtgtgcgaccccctggcccgtgtatgcctgcgactgccccccataccagacgaccttctcgcctccgtccaggttcagcagcaagatctcgtacattatagttgcgatacattccttgtcccttcaggagatgaagaagatgtcacttcttttagagtgatcgtcatgatgagatctacacagatgctagtcgcttttatcttctcttcaaccactggtgattggagtgctggttcacctttcagcctgggttctctgagaataccatacgacaacattccgagttatgcttatggctgcttctactggaaagtcgagtctgagaacaggttgctcacgctcaacatgagcagtatggagttctcagtcgttgacctcccacctgggcccgataggagtttcgtcatcatggtggaggcaggcgaaagcaggcttgggatgtttagtctaattaaccatggtaccactctctgttatgccattaggcaaattgggagcgagaagtccaatcagttggagatggacagtgtgatccctttacctgagggttatatttactttcgcattcacggttcatatgaaggacacattctcatatttggatacgcgtttagtgaagacgcatgcttcgcacttgagatcaagactatgaagattgagagagtctgtcggaagtggcgtggtttctgtccttattttgtgttcctgccatccatgtcacaaaggaggatataatgtggactgaattcacatccaggtttggggcttcttccaatccattctgctggtgtggagttgagctaggtgatggcacaggccctcatgtagatgtagcacatctgcaacactgtcccatgttatcctcctagtctgtcgtattgtctagcttacattagtagctactgaaactttagttatatctatatttttaagttctcccgactgtaatttaagatgtgacaaaggcgtctttagtgtatcaagagccaacttttataagccggctctgtgtgctgcgaaatcacgtgtttgctagtctag

SEQ ID NO: 5713 - protein, 420 aa, Zea mays subsp. mays
  peptide (1)..(420): Ceres Seq. ID no. 12365539
RALASPIPSVSLIHPQGAGGGSLAGHIVADFTDPSSGLLAMESPRTLEALTNDLVVEIFLRIGSPADLVRASAACVALCRLIANPSFLRRYRSVHPPLLLGLLDPYGDIEPTETPHPSAALAGAVARAADLRFGEYFPSSKLSGYCVSDVRDGHVLLTITPYLEDDEDEKLVPDLAVCDPLARVCLRLPPIPDDLLASVQVQQQDLVHYSCDTFLVPSGDEEDVTSFRVIVMMRSTQMLVAFIFSSTTGDWSAGSPFSLGSLRIPYDNIPSYAYGCFYWKVESENRLLTLNMSSMEFSVVDLPPGPDRSFVIMVEAGESRLGMFSLINHGTTLCYAIRQIGSEKSNQLEMDSVIPLPEGYIYFRIHGSYEGHILIFGYAFSEDACFALEIKTMKIERVCRKWRGFCPYFVFLPSMSQRRI

SEQ ID NO: 5714 - protein, 380 aa, Zea mays subsp. mays
  peptide (1)..(380): Ceres Seq. ID no. 12365540
MESPRTLEALTNDLVVEIFLRIGSPADLVRASAACVALCRLIANPSFLRRYRSVHPPLLLGLLDPYGDIEPTETPHPSAALAGAVARAADLRFGEYFPSSKLSGYCVSDVRDGHVLLTITPYLEDDEDEKLVPDLAVCDPLARVCLRLPPIPDDLLASVQVQQQDLVHYSCDTFLVPSGDEEDVTSFRVIVMMRSTQMLVAFIFSSTTGDWSAGSPFSLGSLRIPYDNIPSYAYGCFYWKVESENRLLTLNMSSMEFSVVDLPPGPDRSFVIMVEAGESRLGMFSLINHGTTLCYAIRQIGSEKSNQLEMDSVIPLPEGYIYFRIHGSYEGHILIFGYAFSEDACFALEIKTMKIERVCRKWRGFCPYFVFLPSMSQRRI

SEQ ID NO: 5715 - DNA, 1328 bp, Zea mays subsp. mays
  misc_feature (1)..(1328): Ceres Seq. ID no. 12409352
  misc_feature (1)..(1328): Ortholog of  Ceres SEQ ID NO 13585491 as cited in SEQ ID NO 60719
aaaacccatctcgcccccactcgtatccgcagagtactaaacatcaccagggaaggaggttgcgagttgcgaccgggggccggccgacccagccaaagtacgctaccactcttgctgcaccgaccgcgagggtgcaacaacgacttacatatatataaatatccgcgccgcagctagctagctagctagcagagcagcccggccgaagccgtgtagcctagcctcctcacatatagcagcagcaggacgagatcgtcgatcgatcgatggtgtctctgcagccctcatcagcggcgccgctcctgccggaggccgccaccgcgaacaagctcccgccgtggctctccctcgtcggcagcgtcgtcgcctcctccaccggtaccgcggccaccagcaagaagcggaagcgggacggcagcggcggcggcggcgacgaggacgaccgtggcgaggtcgtggacgggatcgagctcaatttcgacgccgcgccgctgccccccgagtggcaacgctgcctcgacatcaagtcggggcagatccactactacaacacgaggacgcagaagcggacgtgcaaggaccccagggggcacgacgggcagccggactaccgcgccgaagaaggccaggaggaggaggaggactccgcgaattattgcgcgccgccagggctggacctggagctgaacctcacgttcgagccgcgccgcgtgctcgccgcccacgggaagacgacgaagagggccaagcagcagcccgcggaggaggaggaggaggccgaggacgacgacgacagcgacagcagcagtagcagtagggagatggtggctggcgtgtgcgtgcggtgccacatgctggtgatgatgtgccgcgccagcccggcgtgccccaactgcaagttcctgcacccacccagccgcgccacgccgcctccgccgccgctcaagctcggcctccagctgctctgctgcagggactagctagagaccaaagcgtcccaacgacccatggatgggctggctccccagcaggcatgcgtgcaccagtagaacgcgcgcacgtgtgtcgcacgcatgtgcaaggaagacacagcgtaatattcaatcagaggcaggatggtgtggtagctagctagaggagttgatcagtagtggcggcgcctatgcccgtggccgaccgatcggctgtgcgtgcgtacgtacgtacggttcgccaaggggtatatcgtgtcataatgttattactcatgtggcgatggatggatggtggtggtgtagatatcataaagtgcatgcatagcataaatgtagctcggaactttcggcgtt

SEQ ID NO: 5716 - protein, 237 aa, Zea mays subsp. mays
  peptide (1)..(237): Ceres Seq. ID no. 12409353
MVSLQPSSAAPLLPEAATANKLPPWLSLVGSVVASSTGTAATSKKRKRDGSGGGGDEDDRGEVVDGIELNFDAAPLPPEWQRCLDIKSGQIHYYNTRTQKRTCKDPRGHDGQPDYRAEEGQEEEEDSANYCAPPGLDLELNLTFEPRRVLAAHGKTTKRAKQQPAEEEEEAEDDDDSDSSSSSREMVAGVCVRCHMLVMMCRASPACPNCKFLHPPSRATPPPPPLKLGLQLLCCRD

SEQ ID NO: 5717 - DNA, 1627 bp, Zea mays subsp. mays
  misc_feature (1)..(1627): Ceres Seq. ID no. 12412663
  misc_feature (1)..(1627): Ortholog of  Ceres SEQ ID NO 13597865 as cited in SEQ ID NO 64954
cttcgtccattccgatcactcgctgctcccctctctcgccggagcgagccccgggccggatggcggcggcagcagcagctcctcccgcctccgcgatcgcgtgatggacgccgacgccgacgccgccgcgatccgccgatggacgacgccggaagggcaccaccacccgcgccagcggcggtgaccgtctccgccaccgccgcacccgcgcctaccccgccctccgccacggccgccgccgacaagtcctccctcgaccccgacgcgctttatgaagaggggatgtggcaacagatggccatgaacagcggtgccacaatgcaacctgggtcatatcctgagcgaccaggtgaaccggactgcacttactacctcaggactggattgtgtcgatttggcatgagctgcaggttcaatcatcctccggataggaatctggctattgcctctgccagaatgaagggagaatatcctgagagagtgggacagccagagtgtcagtattatctgaagaccggaacatgcaagtttggtcctacatgcaaatttcaccatcccagggaaaaggccggaattgcagggagggtgcagctaaacacattaggatatccacttctcccgaatgaaaaggagtgtgcgtattatttaaaaacaggacaatgtaaatatgcaaatacttgtaaattccaccacccagaacttttcaatgtggtgccttcgtcacgtggttcacctatttatacttctgtacattcctctgcaagcgctggtccacagtcatatactggaactatgtcaagctggacttttccacgagcttcttttataccaagccctaggtggcaaagtccttcaaattatgcaccaatggttgtacctcatggccttgtccaagtgccgagctggaattcatatcctggtcagctgcagtcacctggggctcaacaaacttatggaagttcacaacaaggcgaagctagtgcaggaaatcagggaatgctatcaccctatagatccagttcatttcctgtgcctcaatatgcgttgcagagagataatgtatttcctgagagacccgatgaaccagaatgccaatattacatgaagacaggagattgtaaatttggtgcagtgtgcaagttccatcatccccgtgtgagatcacagccccctccggattgtgtcttaagtccaatgggtcttccaatacgtccaggtgaagaactttgcaaattctattctcgttatggcatctgcaagttcggcgccaactgtaaatttgatcatcctacaatggctgctccaatgggagtttatgcatatggtttctctgggtctgcttctgtcgcacccgcttcaactaatgcacctatgacgcgacatcttcttggatctccatcaggttctggatatatgtcttaggtgtcttttttttcagttgacctactttgatgtataaaatccacggcatcgcctcaggcgctgtgaatgtttctcctaacttcccgccgggatgaagttctgtaaattgagttgctgctggagatgtacagcccccccccccccccccccctccccaattaatccagaactttgggaataactgttggaacctaataaacttcag

SEQ ID NO: 5718 - protein, 473 aa, Zea mays subsp. mays
  peptide (1)..(473): Ceres Seq. ID no. 12412664
LRPFRSLAAPLSRRSEPRAGWRRQQQLLPPPRSRDGRRRRRRRDPPMDDAGRAPPPAPAAVTVSATAAPAPTPPSATAAADKSSLDPDALYEEGMWQQMAMNSGATMQPGSYPERPGEPDCTYYLRTGLCRFGMSCRFNHPPDRNLAIASARMKGEYPERVGQPECQYYLKTGTCKFGPTCKFHHPREKAGIAGRVQLNTLGYPLLPNEKECAYYLKTGQCKYANTCKFHHPELFNVVPSSRGSPIYTSVHSSASAGPQSYTGTMSSWTFPRASFIPSPRWQSPSNYAPMVVPHGLVQVPSWNSYPGQLQSPGAQQTYGSSQQGEASAGNQGMLSPYRSSSFPVPQYALQRDNVFPERPDEPECQYYMKTGDCKFGAVCKFHHPRVRSQPPPDCVLSPMGLPIRPGEELCKFYSRYGICKFGANCKFDHPTMAAPMGVYAYGFSGSASVAPASTNAPMTRHLLGSPSGSGYMS

SEQ ID NO: 5719 - protein, 427 aa, Zea mays subsp. mays
  peptide (1)..(427): Ceres Seq. ID no. 12412665
MDDAGRAPPPAPAAVTVSATAAPAPTPPSATAAADKSSLDPDALYEEGMWQQMAMNSGATMQPGSYPERPGEPDCTYYLRTGLCRFGMSCRFNHPPDRNLAIASARMKGEYPERVGQPECQYYLKTGTCKFGPTCKFHHPREKAGIAGRVQLNTLGYPLLPNEKECAYYLKTGQCKYANTCKFHHPELFNVVPSSRGSPIYTSVHSSASAGPQSYTGTMSSWTFPRASFIPSPRWQSPSNYAPMVVPHGLVQVPSWNSYPGQLQSPGAQQTYGSSQQGEASAGNQGMLSPYRSSSFPVPQYALQRDNVFPERPDEPECQYYMKTGDCKFGAVCKFHHPRVRSQPPPDCVLSPMGLPIRPGEELCKFYSRYGICKFGANCKFDHPTMAAPMGVYAYGFSGSASVAPASTNAPMTRHLLGSPSGSGYMS

SEQ ID NO: 5720 - protein, 379 aa, Zea mays subsp. mays
  peptide (1)..(379): Ceres Seq. ID no. 12412666
MWQQMAMNSGATMQPGSYPERPGEPDCTYYLRTGLCRFGMSCRFNHPPDRNLAIASARMKGEYPERVGQPECQYYLKTGTCKFGPTCKFHHPREKAGIAGRVQLNTLGYPLLPNEKECAYYLKTGQCKYANTCKFHHPELFNVVPSSRGSPIYTSVHSSASAGPQSYTGTMSSWTFPRASFIPSPRWQSPSNYAPMVVPHGLVQVPSWNSYPGQLQSPGAQQTYGSSQQGEASAGNQGMLSPYRSSSFPVPQYALQRDNVFPERPDEPECQYYMKTGDCKFGAVCKFHHPRVRSQPPPDCVLSPMGLPIRPGEELCKFYSRYGICKFGANCKFDHPTMAAPMGVYAYGFSGSASVAPASTNAPMTRHLLGSPSGSGYMS

SEQ ID NO: 5721 - DNA, 1628 bp, Zea mays subsp. mays
  misc_feature (1)..(1628): Ceres Seq. ID no. 13636255
  misc_feature (1)..(1628): Ortholog of  Ceres SEQ ID NO 15224680 as cited in SEQ ID NO 59829
  misc_feature (1)..(1628): Ortholog of  Ceres SEQ ID NO 12627215 as cited in SEQ ID NO 60976
  misc_feature (1)..(1628): Ortholog of  Ceres SEQ ID NO 15178542 as cited in SEQ ID NO 65410
  misc_feature (1)..(1628): Ortholog of  Ceres SEQ ID NO 12635657 as cited in SEQ ID NO 0
  misc_feature (1)..(1628): Ortholog of  Ceres SEQ ID NO 12635879 as cited in SEQ ID NO 0
  misc_feature (1)..(1628): Ortholog of  Ceres SEQ ID NO 13599649 as cited in SEQ ID NO 0
actagctgctctggctcccccgaggcaatcgagtaatcgacgaaggccaccaccacctccacaccactttgcctcgagaaggttccaccaagcctctcggctagggtttggggactttgggggcgatcgcaatggagggacgcggcgcggaacaagcacccgaggcggcggcggaggtgaaaaatccgaggtgcttcatggacgtcaccatcggcggcgagatggaggggaggatcgttgtagagctctacgcttccgtggtaccgcggacggcggagaacttccgcgcgctctgcacaggggagaaaggcatcggcgccgccagcgggcaagccgcttcactttaagggctcatgcttccaccgtgttattaaagggtttatgattcaagggggagacacaactgctggagacggaactgggggatagtcaatttatgggtccaaatttgaggacgagaattttgttttaaagcatgagaggaaaggaatgctttcaatggctaattctggtcccaacacaaatggttctcagtttttcatcactactacacggacacctcatttagacgggaaacatgttgtttttggtagagtgatgaaaggaatgggggtagttcgctctattgagcatgtttctgtcggagaagctgactgccccactcttgaagttaaaattgttgattgtggggagcttcctgaaggtgctgatgatggagttgtaaactttttcaaagatggtgatacgtacccagattggcccaatgatcttgaagagaagcctgctgaggtttcatggtggatggatgctgtggagtctgctaaagcttatgggaatgacaatttcaagaaacaggactacaaggcagctctcagaaagtacaggaaagctctgcgctacttggatctttgctgggagaaagaagagatagatgaagataagagcacagcactgcggaagaccaagtcaataatactcactaatagctccgcatgcaaattaaagttaggagattcaagtggggctttattagacgcagattttgcactgcgtgaaagggagggaaatgctaaagcttttttccgacaaggacaggcacacattgcacttaatgacattgatgcagccgtggagagctttaaacaggcattggagttggagccaaatgatgctggaatcaaaagagagctggctgctgcaaagaagaagattgctgacagaagagatcaggagcggaaggcatttgctaggattttccaatcttctggaaagtctgacaagagcaacgaagagaataattgatctacagttcctttcccccgtctgaaactttgcttagcttaaatctggggcacattggaacaggagtctcatgggagtctgctctgcaaaaaaacgcagattactgatctttagatagaaggaaacatagtggggggaaaggaagcttttgttttcttgtactacagaagtagcaattcgtgcttttgtcccggtcttagtttattcaggaaacggacattgaatttaaatgtgcaatttttagacccaacctgacgattcacatcttttgtgggtagttcgcccgtttcactttcgtggtgttttcttgtagccttttgtctgct

SEQ ID NO: 5722 - protein, 270 aa, Zea mays subsp. mays
  peptide (1)..(270): Ceres Seq. ID no. 13636256
MLSMANSGPNTNGSQFFITTTRTPHLDGKHVVFGRVMKGMGVVRSIEHVSVGEADCPTLEVKIVDCGELPEGADDGVVNFFKDGDTYPDWPNDLEEKPAEVSWWMDAVESAKAYGNDNFKKQDYKAALRKYRKALRYLDLCWEKEEIDEDKSTALRKTKSIILTNSSACKLKLGDSSGALLDADFALREREGNAKAFFRQGQAHIALNDIDAAVESFKQALELEPNDAGIKRELAAAKKKIADRRDQERKAFARIFQSSGKSDKSNEENN

SEQ ID NO: 5723 - protein, 267 aa, Zea mays subsp. mays
  peptide (1)..(267): Ceres Seq. ID no. 13636257
MANSGPNTNGSQFFITTTRTPHLDGKHVVFGRVMKGMGVVRSIEHVSVGEADCPTLEVKIVDCGELPEGADDGVVNFFKDGDTYPDWPNDLEEKPAEVSWWMDAVESAKAYGNDNFKKQDYKAALRKYRKALRYLDLCWEKEEIDEDKSTALRKTKSIILTNSSACKLKLGDSSGALLDADFALREREGNAKAFFRQGQAHIALNDIDAAVESFKQALELEPNDAGIKRELAAAKKKIADRRDQERKAFARIFQSSGKSDKSNEENN

SEQ ID NO: 5724 - protein, 234 aa, Zea mays subsp. mays
  peptide (1)..(234): Ceres Seq. ID no. 13636258
MKGMGVVRSIEHVSVGEADCPTLEVKIVDCGELPEGADDGVVNFFKDGDTYPDWPNDLEEKPAEVSWWMDAVESAKAYGNDNFKKQDYKAALRKYRKALRYLDLCWEKEEIDEDKSTALRKTKSIILTNSSACKLKLGDSSGALLDADFALREREGNAKAFFRQGQAHIALNDIDAAVESFKQALELEPNDAGIKRELAAAKKKIADRRDQERKAFARIFQSSGKSDKSNEENN

SEQ ID NO: 5725 - DNA, 1301 bp, Zea mays subsp. mays
  misc_feature (1)..(1301): Ceres Seq. ID no. 12382069
  misc_feature (1)..(1301): Ortholog of  Ceres SEQ ID NO 13639663 as cited in SEQ ID NO 57850
  misc_feature (1)..(1301): Ortholog of  Ceres SEQ ID NO 15224330 as cited in SEQ ID NO 58808
cagcttctggaaccttcctttcgctatacgacctgagttcgcttcaggcagccgccgctctctctctctcccgcgtccgtcccaccttcgcaagccagccacctccctgagaggcctgaccgtgatttcggcgtggcatccaaaggcggtcaagattcgagaggccggaggaaccaagcgtagggcctccgaccccacgtcgtcgtccgcgcgcgccgcccgccgccgcagggagatgggggccgattactacaaggtcctcggcgtcgaccgcggcgccagcgacgacgacctcaagaaggcctatcggaagctcgccatgcgatggcaccccgacaagaactccaccaataagaaggaggcagaaaccaagttcaaggagatctctgtggcatacgaggtccttagcgatcccaagaaacgtgcaatctatgatcagctaggggaagaagggctcaaggggcagccgcccccaggagcaggaggtcctggcacatctcccttcttccctggcggggctcattccaccgctcaccattttaacccgaggagcgcggacgatatatttaaagagttctttggatcccctggcatgggtggcatgagaacggaaccaggatttcaaaggtcaatgtttggcaacgatatcttctcttcgcgcttccgcgctgagggttccaccagtatgcagcagccattgcgcaaggcagctgcaattgagaatccacttccagtcggccttgcagatctctacaagggtgtgacaaaaaagatgaaaatctcaagagagactattgatgccagcgggagaatctcaaacacagaggatattctgacaatacaagtaaaggctggttggaagaagggaacaaggattacatttcctgacaagggaaatgaagctccaaatatgaaacctgctgatattgttttcatcattgatgagaagccccatgatgttttcactcgggagggaaatgatcttgtcgtgactgagaagatctcactggtggaagcactgactggctataccgcacgtgtcactacgcttgacgggcggagcctatcattgcacatcaactcaataatccatccaaagtacgaagaggtgatgcctggagagggcatgccagtgcccaaggaccccacaaagaagggaaatctgcggattaagttcaacataatgttcccctctaggctgacttctgatcagaaggccgggatcaagaggctattgggttcttaggccgccacctcaaatgacatcttctttatgatgaaagttgtttgtgaatattgcc

SEQ ID NO: 5726 - protein, 414 aa, Zea mays subsp. mays
  peptide (1)..(414): Ceres Seq. ID no. 12382070
SFWNLPFAIRPEFASGSRRSLSLPRPSHLRKPATSLRGLTVISAWHPKAVKIREAGGTKRRASDPTSSSARAARRRREMGADYYKVLGVDRGASDDDLKKAYRKLAMRWHPDKNSTNKKEAETKFKEISVAYEVLSDPKKRAIYDQLGEEGLKGQPPPGAGGPGTSPFFPGGAHSTAHHFNPRSADDIFKEFFGSPGMGGMRTEPGFQRSMFGNDIFSSRFRAEGSTSMQQPLRKAAAIENPLPVGLADLYKGVTKKMKISRETIDASGRISNTEDILTIQVKAGWKKGTRITFPDKGNEAPNMKPADIVFIIDEKPHDVFTREGNDLVVTEKISLVEALTGYTARVTTLDGRSLSLHINSIIHPKYEEVMPGEGMPVPKDPTKKGNLRIKFNIMFPSRLTSDQKAGIKRLLGS

SEQ ID NO: 5727 - protein, 336 aa, Zea mays subsp. mays
  peptide (1)..(336): Ceres Seq. ID no. 12382071
MGADYYKVLGVDRGASDDDLKKAYRKLAMRWHPDKNSTNKKEAETKFKEISVAYEVLSDPKKRAIYDQLGEEGLKGQPPPGAGGPGTSPFFPGGAHSTAHHFNPRSADDIFKEFFGSPGMGGMRTEPGFQRSMFGNDIFSSRFRAEGSTSMQQPLRKAAAIENPLPVGLADLYKGVTKKMKISRETIDASGRISNTEDILTIQVKAGWKKGTRITFPDKGNEAPNMKPADIVFIIDEKPHDVFTREGNDLVVTEKISLVEALTGYTARVTTLDGRSLSLHINSIIHPKYEEVMPGEGMPVPKDPTKKGNLRIKFNIMFPSRLTSDQKAGIKRLLGS

SEQ ID NO: 5728 - protein, 308 aa, Zea mays subsp. mays
  peptide (1)..(308): Ceres Seq. ID no. 12382072
MRWHPDKNSTNKKEAETKFKEISVAYEVLSDPKKRAIYDQLGEEGLKGQPPPGAGGPGTSPFFPGGAHSTAHHFNPRSADDIFKEFFGSPGMGGMRTEPGFQRSMFGNDIFSSRFRAEGSTSMQQPLRKAAAIENPLPVGLADLYKGVTKKMKISRETIDASGRISNTEDILTIQVKAGWKKGTRITFPDKGNEAPNMKPADIVFIIDEKPHDVFTREGNDLVVTEKISLVEALTGYTARVTTLDGRSLSLHINSIIHPKYEEVMPGEGMPVPKDPTKKGNLRIKFNIMFPSRLTSDQKAGIKRLLGS

SEQ ID NO: 5729 - DNA, 1516 bp, Zea mays subsp. mays
  misc_feature (1)..(1516): Ceres Seq. ID no. 13498727
  misc_feature (1)..(1516): Ortholog of  Ceres SEQ ID NO 15170595 as cited in SEQ ID NO 57510
  misc_feature (1)..(1516): Ortholog of  Ceres SEQ ID NO 13655218 as cited in SEQ ID NO 68872
aaacgccgcctactccgcgctcctccaaaccaaactgaaccctatcctagcacgagtgcacgacggtggcagcaggagatggtggggacggcggaaggcggcgcggagagggcggtgcggcggtgggtggacgccgccggcngggcgcctgcgtcctggacggcgggctggccacggagctcgaggccaacggcgccgacctcaacgacccgctctggagcgccaagtgcctcctctcctccccgcacctcatccgcaaggtccatatggactacctagaagccggggcgaacattataatcacagcatcgtatcaggctactatccaagggtttgaatcaaagggcttttcaaaagaacaaagtgaaaacttgttaacaaagagtgttcagattgcactggaagcccgtgagatgttcttgaaggaacatttggagaaatccactcctatacagcatcctattctggttgcagcagctctagggagttatggggcttatcttgctgatggctctgagtacagtggggattatggtgaagctggtacgaaagagttcctgaaggactttcatcggcggaggcttcaggttcttgctgaagcaggcccggatttgattgcttttgaaacgatccccaacaaattggaagctcaggcatatgttgaactccttgaggaatgtaacattaatatcccttcatggctttccttcaactcaaaagatggagtgcatgttgtgagtggtgattcgttaattgaatgcgctactattgctgacaagtgtgcaaaggttggtgcagtcgggataaattgcacacctccaagatttattcatggactgatactctccattcgaaaggtcacagacaagcctattctgatatatcccaacagtggtgaaagatatgatggtgaaaaaaaggagtgggtggaatccactggtgtgtcagatggtgattttgtttcgtacgtaaatgaatggtgcaaagatggggctgcgcttatcgggggctgctgcaggacaactccaaacactatcagggccatacacagaactcttaaccaaggctgccacaagcatcagttacctgtaggctgtagcatagatctgtgctccactcctaatgctctcctcccagcagtaccttgagctgtatccccgagattccttaaccagcgcgaaccaatatactgttgcgtgttctcctgcaaatgagatgttctgcacctatgtttgtaatgttgtatttctgggtttttaagctatccaacttggagatacaaccggtgaggaagcagcaacaataggtagttctacttctgagtgaggaaaaacaacttgcggctgagttaatgaagcttagtagctaccaccgttgtatgacagttgctcagagatgttatcttcattaagtgcttatattaccgctagttccctgtgaaatttgttaaaccattatatgtaagttttgtttgacaagactgcatctcctgaaactaagatcttagtttcctgct

SEQ ID NO: 5730 - protein, 293 aa, Zea mays subsp. mays
  peptide (1)..(293): Ceres Seq. ID no. 13498728
MDYLEAGANIIITASYQATIQGFESKGFSKEQSENLLTKSVQIALEAREMFLKEHLEKSTPIQHPILVAAALGSYGAYLADGSEYSGDYGEAGTKEFLKDFHRRRLQVLAEAGPDLIAFETIPNKLEAQAYVELLEECNINIPSWLSFNSKDGVHVVSGDSLIECATIADKCAKVGAVGINCTPPRFIHGLILSIRKVTDKPILIYPNSGERYDGEKKEWVESTGVSDGDFVSYVNEWCKDGAALIGGCCRTTPNTIRAIHRTLNQGCHKHQLPVGCSIDLCSTPNALLPAVP

SEQ ID NO: 5731 - protein, 244 aa, Zea mays subsp. mays
  peptide (1)..(244): Ceres Seq. ID no. 13498729
MFLKEHLEKSTPIQHPILVAAALGSYGAYLADGSEYSGDYGEAGTKEFLKDFHRRRLQVLAEAGPDLIAFETIPNKLEAQAYVELLEECNINIPSWLSFNSKDGVHVVSGDSLIECATIADKCAKVGAVGINCTPPRFIHGLILSIRKVTDKPILIYPNSGERYDGEKKEWVESTGVSDGDFVSYVNEWCKDGAALIGGCCRTTPNTIRAIHRTLNQGCHKHQLPVGCSIDLCSTPNALLPAVP

SEQ ID NO: 5732 - DNA, 1047 bp, Zea mays subsp. mays
  misc_feature (1)..(1047): Ceres Seq. ID no. 12565996
  misc_feature (1)..(1047): Ortholog of  Ceres SEQ ID NO 13587439 as cited in SEQ ID NO 0
agagttggcctccaccgtcaagtcaccaaccacccagagactcaccagtcaccaccccaggccagccgccacgtttagccgggctaaacaaacacgggcgcacaatcggaactcgctgcactgcttggaatccaacgagccaatcattcaaatcctccccggaaccgcgttgagcagggcacggtcgattggatctagggtgagggtccgtcgccgaagaaactcgcaggcggtcacgaggaggcggcgggggagggcgggggagatggcctcggaggagatgacggcgacggaggtggctgcgctgctggacttgaagccgcacccggagggcggcttctacaccgagaccttccgcgacggctccatcacgctcaccacgtcccagctcccgccccactacaaggtaaaccgtgctgttagcaccgcaatctatttcctacttcccgcagggagtgtttcccgtctccaccgcattccctgtgctgaaacctggcacttctacaagggagagcctgtcacggtcttcgagcttcacgacgacggtcacattgaccttactgtcattggcccacaccttgaggcaggccagcgcccccagtataccgtgccaccgaacgtgtggtttgggtcgttccccacactagacgtcgagtcgttcgcatctgatggcagcgttcttgtcaagtctcggaagagggaccctgagctgcattactcccttgttggctgcacctgtgcccctggcttccagtacgaggattttgaaatggccaaatttgaggacgtgagatccatcgctcccaaggctgaacctttcctcaagtttcttattccctctaccgattaactccagagcagcctcagatgattgtggatgggttctcagcgactttctatactgcatactgtacggatggtgtttctagtgtgattccatgagagttctgctttcacgacagtgtagacagtaaactgtacctttgtggtggcaccggttgaaacgtttggtgcattgaaacagaataacagctggtcttgatgttg

SEQ ID NO: 5733 - protein, 282 aa, Zea mays subsp. mays
  peptide (1)..(282): Ceres Seq. ID no. 12565997
ELASTVKSPTTQRLTSHHPRPAATFSRAKQTRAHNRNSLHCLESNEPIIQILPGTALSRARSIGSRVRVRRRRNSQAVTRRRRGRAGEMASEEMTATEVAALLDLKPHPEGGFYTETFRDGSITLTTSQLPPHYKVNRAVSTAIYFLLPAGSVSRLHRIPCAETWHFYKGEPVTVFELHDDGHIDLTVIGPHLEAGQRPQYTVPPNVWFGSFPTLDVESFASDGSVLVKSRKRDPELHYSLVGCTCAPGFQYEDFEMAKFEDVRSIAPKAEPFLKFLIPSTD

SEQ ID NO: 5734 - protein, 194 aa, Zea mays subsp. mays
  peptide (1)..(194): Ceres Seq. ID no. 12565998
MASEEMTATEVAALLDLKPHPEGGFYTETFRDGSITLTTSQLPPHYKVNRAVSTAIYFLLPAGSVSRLHRIPCAETWHFYKGEPVTVFELHDDGHIDLTVIGPHLEAGQRPQYTVPPNVWFGSFPTLDVESFASDGSVLVKSRKRDPELHYSLVGCTCAPGFQYEDFEMAKFEDVRSIAPKAEPFLKFLIPSTD

SEQ ID NO: 5735 - protein, 189 aa, Zea mays subsp. mays
  peptide (1)..(189): Ceres Seq. ID no. 12565999
MTATEVAALLDLKPHPEGGFYTETFRDGSITLTTSQLPPHYKVNRAVSTAIYFLLPAGSVSRLHRIPCAETWHFYKGEPVTVFELHDDGHIDLTVIGPHLEAGQRPQYTVPPNVWFGSFPTLDVESFASDGSVLVKSRKRDPELHYSLVGCTCAPGFQYEDFEMAKFEDVRSIAPKAEPFLKFLIPSTD

SEQ ID NO: 5736 - DNA, 1214 bp, Zea mays subsp. mays
  misc_feature (1)..(1214): Ceres Seq. ID no. 12387065
  misc_feature (1)..(1214): Ortholog of  Ceres SEQ ID NO 14311671 as cited in SEQ ID NO 51251
  misc_feature (1)..(1214): Ortholog of  Ceres SEQ ID NO 14304791 as cited in SEQ ID NO 53562
  misc_feature (1)..(1214): Ortholog of  Ceres SEQ ID NO 14307355 as cited in SEQ ID NO 54610
  misc_feature (1)..(1214): Ortholog of  Ceres SEQ ID NO 13594298 as cited in SEQ ID NO 57803
  misc_feature (1)..(1214): Ortholog of  Ceres SEQ ID NO 14301894 as cited in SEQ ID NO 61677
  misc_feature (1)..(1214): Ortholog of  Ceres SEQ ID NO 13503476 as cited in SEQ ID NO 61978
  misc_feature (1)..(1214): Ortholog of  Ceres SEQ ID NO 12578438 as cited in SEQ ID NO 62201
aaactgcatcagagcacgaccacactacccacccacctccactactgacgaccgattcccagaaagctcgatctagcgcgcgcggctgcagagtgcagacgacgacgtacaccatggcgcggcggtccctggccctgctgctcgcgtcgtcgctcgccctgatggcggccgccgtcgcatcggcggactcgtggctctacgacaagttcaacacggacggcaccgtccgcacccagtacgacgcgtcggggcaggaggtggcgatgctcagcctggaccgcagctccggcgccggcttcaactccaagaagcagtacctgtacggcgagttcagcgtccagatgaagctcatccccggcaactccgccggcaccgtctcgtgcttctacctctcgtcgggcgacggcgacgggcacgacgagatcgacatggagttcatgggcaacgcgagcgggcagccggtggtgctgaacacgaacgtgtgggccagcggcgacggcaagaaggagcaccagttcgacctctggttcgacccctccgccgactaccacacctacaccatcatctggaacccgaccaacatcctgttcaaggtggacggcgacgtgatccggtgcttcaagcgctacgccgacctgccgtacccgagcgcgaggcccatggcgctgcacgccacgctgtgggacggcagctactgggccaccgagaagggcaaggtgccggtggactggtccgccgcgcccttcgtcgtctcctaccggggctactcggccaacgcctgcgtcagcggcggggcctgcggcggcggcggcgacgacgggtggatgagcaagcagcccgacgacgccgagtggggcaccgtccggtgggccgagagcaactacatgcgctacaactactgcgacgacggctggcggttcccccagggcctcccgcccgagtgcagccgcagctaagctagctgattccgccggttttcgtacgctcggcggcgtccgctgacgacacacgccttgttggtttgttcttgctggacatcatacatctctatatgcatgattcttgttctgttattgttaaatcgtgattacaatacttgtaattgtaaagaagtgtgtgggcacgggagtatatcactgtagttttaatttgcttgtaaagaaaagaagggtttttttacttgtgacgcgggagctagcgactgcgtcctgttc

SEQ ID NO: 5737 - protein, 317 aa, Zea mays subsp. mays
  peptide (1)..(317): Ceres Seq. ID no. 12387066
TASEHDHTTHPPPLLTTDSQKARSSARGCRVQTTTYTMARRSLALLLASSLALMAAAVASADSWLYDKFNTDGTVRTQYDASGQEVAMLSLDRSSGAGFNSKKQYLYGEFSVQMKLIPGNSAGTVSCFYLSSGDGDGHDEIDMEFMGNASGQPVVLNTNVWASGDGKKEHQFDLWFDPSADYHTYTIIWNPTNILFKVDGDVIRCFKRYADLPYPSARPMALHATLWDGSYWATEKGKVPVDWSAAPFVVSYRGYSANACVSGGACGGGGDDGWMSKQPDDAEWGTVRWAESNYMRYNYCDDGWRFPQGLPPECSRS

SEQ ID NO: 5738 - protein, 280 aa, Zea mays subsp. mays
  peptide (1)..(280): Ceres Seq. ID no. 12387067
MARRSLALLLASSLALMAAAVASADSWLYDKFNTDGTVRTQYDASGQEVAMLSLDRSSGAGFNSKKQYLYGEFSVQMKLIPGNSAGTVSCFYLSSGDGDGHDEIDMEFMGNASGQPVVLNTNVWASGDGKKEHQFDLWFDPSADYHTYTIIWNPTNILFKVDGDVIRCFKRYADLPYPSARPMALHATLWDGSYWATEKGKVPVDWSAAPFVVSYRGYSANACVSGGACGGGGDDGWMSKQPDDAEWGTVRWAESNYMRYNYCDDGWRFPQGLPPECSRS

SEQ ID NO: 5739 - protein, 264 aa, Zea mays subsp. mays
  peptide (1)..(264): Ceres Seq. ID no. 12387068
MAAAVASADSWLYDKFNTDGTVRTQYDASGQEVAMLSLDRSSGAGFNSKKQYLYGEFSVQMKLIPGNSAGTVSCFYLSSGDGDGHDEIDMEFMGNASGQPVVLNTNVWASGDGKKEHQFDLWFDPSADYHTYTIIWNPTNILFKVDGDVIRCFKRYADLPYPSARPMALHATLWDGSYWATEKGKVPVDWSAAPFVVSYRGYSANACVSGGACGGGGDDGWMSKQPDDAEWGTVRWAESNYMRYNYCDDGWRFPQGLPPECSRS

SEQ ID NO: 5740 - DNA, 1186 bp, Zea mays subsp. mays
  misc_feature (1)..(1186): Ceres Seq. ID no. 12435025
  misc_feature (1)..(1186): Ortholog of  Ceres SEQ ID NO 12610930 as cited in SEQ ID NO 55892
aacaacgcgcactcgcgcagcagacactgcccatcaggatttcgcaaaagcaacaaaacccacgtcgagggtagaagaggcctgcaaatttccgaagagctcgcggaaatggcgacggtgctgccgcttgccgccgcctcggcctcgcccacgccgaggacttgcatctccggcggcccagttcccgcgcgattccttgggactcgcatgcgtctccgcatccacatcccaccgcggggcgttgcctgcgccctccgaaggagacccaccaagtacaagactaaaatccagagtgaggaggatgtggtggctgcagaagatgtcatggatgatgatgacgacgaggatggtgcactggaagcacttttcaagcagctggaagaagatcttgacaatgatgatttatctgtcgatgataatgatatatcagaagaagatatggcaaggtttgaaaaggagttggcagaagcaattgaagatgtcagtggtgttgatgactcagcgggggattcgttgctgagctctggcgactatggtattgatgagcancnagatggaagcgnacgggtagagctgaaaacctggcaactccggagattggctcgtgnnctgaaaataggccggcgtaaaactagtattaagaatcttgcaggggagctaggcctagataggggtttggttattgaaatgctccgcaatccaccaccgangcttctactcatgnctgattctttgcctgatgaagtcccttctaaatctgaagtgaaggaaatagaaacccctagtacgaccactgttgacgaggttgataccagtgaaatcaaaccacagttggagcttccagtgcacgtcatgagtncagaatggtctgcaagaaaaagactgaaaaaggtgcaacttgagaccttagaaagagtctacctgcgaagcaaacggcccacgaatacaatggtcagcagcatagttcaagtgacaaaccttccgcgaaagaccattgttaagtggtttgaggatagaagggagcaagatggagtccctgaccatcgtgctgcattcaagagatccctatctgagattggtgctagttcataacttcttcagtataagcatttgttacggtgtttacttggaaccattacaaacatgtaaatatgagctttgaaattatgacaagttttgcaagctc

SEQ ID NO: 5741 - protein, 363 aa, Zea mays subsp. mays
  peptide (1)..(363): Ceres Seq. ID no. 12435026
  misc_feature (183)..(183): Xaa is any aa, unknown or other
  misc_feature (184)..(184): Xaa is any aa, unknown or other
  misc_feature (188)..(188): Xaa is any aa, unknown or other
  misc_feature (203)..(203): Xaa is any aa, unknown or other
  misc_feature (237)..(237): Xaa is any aa, unknown or other
  misc_feature (242)..(242): Xaa is any aa, unknown or other
  misc_feature (287)..(287): Xaa is any aa, unknown or other
NNAHSRSRHCPSGFRKSNKTHVEGRRGLQISEELAEMATVLPLAAASASPTPRTCISGGPVPARFLGTRMRLRIHIPPRGVACALRRRPTKYKTKIQSEEDVVAAEDVMDDDDDEDGALEALFKQLEEDLDNDDLSVDDNDISEEDMARFEKELAEAIEDVSGVDDSAGDSLLSSGDYGIDEXXDGSXRVELKTWQLRRLARXLKIGRRKTSIKNLAGELGLDRGLVIEMLRNPPPXLLLMXDSLPDEVPSKSEVKEIETPSTTTVDEVDTSEIKPQLELPVHVMSXEWSARKRLKKVQLETLERVYLRSKRPTNTMVSSIVQVTNLPRKTIVKWFEDRREQDGVPDHRAAFKRSLSEIGASS

SEQ ID NO: 5742 - protein, 327 aa, Zea mays subsp. mays
  peptide (1)..(327): Ceres Seq. ID no. 12435027
  misc_feature (147)..(147): Xaa is any aa, unknown or other
  misc_feature (148)..(148): Xaa is any aa, unknown or other
  misc_feature (152)..(152): Xaa is any aa, unknown or other
  misc_feature (167)..(167): Xaa is any aa, unknown or other
  misc_feature (201)..(201): Xaa is any aa, unknown or other
  misc_feature (206)..(206): Xaa is any aa, unknown or other
  misc_feature (251)..(251): Xaa is any aa, unknown or other
MATVLPLAAASASPTPRTCISGGPVPARFLGTRMRLRIHIPPRGVACALRRRPTKYKTKIQSEEDVVAAEDVMDDDDDEDGALEALFKQLEEDLDNDDLSVDDNDISEEDMARFEKELAEAIEDVSGVDDSAGDSLLSSGDYGIDEXXDGSXRVELKTWQLRRLARXLKIGRRKTSIKNLAGELGLDRGLVIEMLRNPPPXLLLMXDSLPDEVPSKSEVKEIETPSTTTVDEVDTSEIKPQLELPVHVMSXEWSARKRLKKVQLETLERVYLRSKRPTNTMVSSIVQVTNLPRKTIVKWFEDRREQDGVPDHRAAFKRSLSEIGASS

SEQ ID NO: 5743 - protein, 294 aa, Zea mays subsp. mays
  peptide (1)..(294): Ceres Seq. ID no. 12435028
  misc_feature (114)..(114): Xaa is any aa, unknown or other
  misc_feature (115)..(115): Xaa is any aa, unknown or other
  misc_feature (119)..(119): Xaa is any aa, unknown or other
  misc_feature (134)..(134): Xaa is any aa, unknown or other
  misc_feature (168)..(168): Xaa is any aa, unknown or other
  misc_feature (173)..(173): Xaa is any aa, unknown or other
  misc_feature (218)..(218): Xaa is any aa, unknown or other
MRLRIHIPPRGVACALRRRPTKYKTKIQSEEDVVAAEDVMDDDDDEDGALEALFKQLEEDLDNDDLSVDDNDISEEDMARFEKELAEAIEDVSGVDDSAGDSLLSSGDYGIDEXXDGSXRVELKTWQLRRLARXLKIGRRKTSIKNLAGELGLDRGLVIEMLRNPPPXLLLMXDSLPDEVPSKSEVKEIETPSTTTVDEVDTSEIKPQLELPVHVMSXEWSARKRLKKVQLETLERVYLRSKRPTNTMVSSIVQVTNLPRKTIVKWFEDRREQDGVPDHRAAFKRSLSEIGASS

SEQ ID NO: 5744 - DNA, 1289 bp, Zea mays subsp. mays
  misc_feature (1)..(1289): Ceres Seq. ID no. 12344120
  misc_feature (1)..(1289): Ortholog of  Ceres SEQ ID NO 14302216 as cited in SEQ ID NO 66456
aagagagagaaaacgaaacgccgctccctcgcctcatcccttccctcctcctgcatcctacctccctggtacccgtcacgttcaccacgttcgcccgctcattcaccggcggcgtcgcccagctcggcctcccgccgcccacggaggccaggtccccgggccgcccgctcggtccgccacagaggcaaggcatggtggcgtctttagacaatgtgaggggcttgactttagccatgtcatctagtgcattcattggttctagctttgtgatcaagaaagttggattgaagaaggctggggataatggggtgcgtgcagcttctggaggcttctcatatctatatgagccgttatggtggttgggaatgataactatgattctaggcgaggtagccaattttgcagcatatgcatttgcccctgccgtacttgttactcctctaggagctctaagcatcatatttagtgcagtgctcgcacacttcattctgaaagaaaatttgcacatgtttggcgttgttggttgcatactatgtgttgttggttctgttggtatagttttgcatgccccaaaggagagaaaaattgattctatgaaggaaatatggcatcttgcaacacagccaggttttattgtttattcatgcgtggcagtggcctgcgttctttttttgatatttcgggttgttgagcgctctgggcacagattgatgcttgtttacatagcaatctgttcattaatgggatctcttacggttatcagtgtaaaagcagttgccattgctctaaagctatcatttggtggatcaaatcaattcatctacgtccagacatggttcttcatagtagtagtcactatttgctgcttggtgcaattaaactacttaaacaaggctctggactcgttcaacacggctgtggtttctcctgtatactacgtgatgttcaccattcttaccattgttgcaaatatgatcatgtacaaggactgggcctcgcagactgcaacgcagatcgcaacacagctatgtgggtttgtgaccattgtcgcggggacttttctgcttcacaagactagggatatgggaaatccaccaccaccaccacctgaccaaatgtgcctgcaagaagccggggaatgtgctccacggtcaatgaccagttctagctgaacacactaagatgtcaaaatctcacagcctctatggactgaattggaattttgagctatatggtgacctttgtagatatattaggaaggagtaaagattggagtgcccagcagttgg

SEQ ID NO: 5745 - protein, 389 aa, Zea mays subsp. mays
  peptide (1)..(389): Ceres Seq. ID no. 12344121
ERENETPLPRLIPSLLLHPTSLVPVTFTTFARSFTGGVAQLGLPPPTEARSPGRPLGPPQRQGMVASLDNVRGLTLAMSSSAFIGSSFVIKKVGLKKAGDNGVRAASGGFSYLYEPLWWLGMITMILGEVANFAAYAFAPAVLVTPLGALSIIFSAVLAHFILKENLHMFGVVGCILCVVGSVGIVLHAPKERKIDSMKEIWHLATQPGFIVYSCVAVACVLFLIFRVVERSGHRLMLVYIAICSLMGSLTVISVKAVAIALKLSFGGSNQFIYVQTWFFIVVVTICCLVQLNYLNKALDSFNTAVVSPVYYVMFTILTIVANMIMYKDWASQTATQIATQLCGFVTIVAGTFLLHKTRDMGNPPPPPPDQMCLQEAGECAPRSMTSSS

SEQ ID NO: 5746 - protein, 326 aa, Zea mays subsp. mays
  peptide (1)..(326): Ceres Seq. ID no. 12344122
MVASLDNVRGLTLAMSSSAFIGSSFVIKKVGLKKAGDNGVRAASGGFSYLYEPLWWLGMITMILGEVANFAAYAFAPAVLVTPLGALSIIFSAVLAHFILKENLHMFGVVGCILCVVGSVGIVLHAPKERKIDSMKEIWHLATQPGFIVYSCVAVACVLFLIFRVVERSGHRLMLVYIAICSLMGSLTVISVKAVAIALKLSFGGSNQFIYVQTWFFIVVVTICCLVQLNYLNKALDSFNTAVVSPVYYVMFTILTIVANMIMYKDWASQTATQIATQLCGFVTIVAGTFLLHKTRDMGNPPPPPPDQMCLQEAGECAPRSMTSSS

SEQ ID NO: 5747 - protein, 312 aa, Zea mays subsp. mays
  peptide (1)..(312): Ceres Seq. ID no. 12344123
MSSSAFIGSSFVIKKVGLKKAGDNGVRAASGGFSYLYEPLWWLGMITMILGEVANFAAYAFAPAVLVTPLGALSIIFSAVLAHFILKENLHMFGVVGCILCVVGSVGIVLHAPKERKIDSMKEIWHLATQPGFIVYSCVAVACVLFLIFRVVERSGHRLMLVYIAICSLMGSLTVISVKAVAIALKLSFGGSNQFIYVQTWFFIVVVTICCLVQLNYLNKALDSFNTAVVSPVYYVMFTILTIVANMIMYKDWASQTATQIATQLCGFVTIVAGTFLLHKTRDMGNPPPPPPDQMCLQEAGECAPRSMTSSS

SEQ ID NO: 5748 - DNA, 932 bp, Zea mays subsp. mays
  misc_feature (1)..(932): Ceres Seq. ID no. 12405069
  misc_feature (1)..(932): Ortholog of  Ceres SEQ ID NO 14306957 as cited in SEQ ID NO 54111
  misc_feature (1)..(932): Ortholog of  Ceres SEQ ID NO 14314088 as cited in SEQ ID NO 62652
gatcggcacagccacaacctccttctccaatactctctccctcgccgccggccacctccgcctcctcccacgcgccacctccgcctcctcccacgcgccacctccgcctcctcccacgcgccacctccgcgacaaaccactgaaggagggagaggactcgctcatatcgtccgatggaggaggactcgatcaaggggatgatctccgcgatatcctgggtgcccaggggcgccgccaagagcgtgcccgtcgttgccgacccgcccactcaggaggagatcgccgaggccatgaagaccttcgacctgggcagagactccgggagcgacgctgacgaggatgatgatgctgccaccatggaactcgacggtgcggcggaaacggtggaggaggttgatgaggctgcccgagccaaggccgtagccaaggcgctctgcaagggctctagcaaggcggacgacgtcgctgatgagctccgcgaactcaacatggacgcgtacgatgatgaagatgaagaggtcgatattttcggctctgggctgggggacttgtactatccgagcaacgcaatggacccatatctgaagaagaacaatgaggatgatgaggaggacgacgatgatgatgaggaaatcgaagataagatgatcatgcctactgattttgttattgtctgcacatagtgaggacgatatcttctctcttcaggtcaacattcttgaagaaacaaatgatggtgaacaaaatatctttgtgcatcatgacgttcctctcgctgattttccgctatgcacagcttggatggattttaatctgaaaggtggtgaaaaagggaattttgtagccgttggaaccatggatcctgccatagaaatatgggacttagatatggttgatgaagtgcaaccgcacatggtgctaggaggacttcc

SEQ ID NO: 5749 - protein, 169 aa, Zea mays subsp. mays
  peptide (1)..(169): Ceres Seq. ID no. 12405070
MEEDSIKGMISAISWVPRGAAKSVPVVADPPTQEEIAEAMKTFDLGRDSGSDADEDDDAATMELDGAAETVEEVDEAARAKAVAKALCKGSSKADDVADELRELNMDAYDDEDEEVDIFGSGLGDLYYPSNAMDPYLKKNNEDDEEDDDDDEEIEDKMIMPTDFVIVCT

SEQ ID NO: 5750 - protein, 161 aa, Zea mays subsp. mays
  peptide (1)..(161): Ceres Seq. ID no. 12405071
MISAISWVPRGAAKSVPVVADPPTQEEIAEAMKTFDLGRDSGSDADEDDDAATMELDGAAETVEEVDEAARAKAVAKALCKGSSKADDVADELRELNMDAYDDEDEEVDIFGSGLGDLYYPSNAMDPYLKKNNEDDEEDDDDDEEIEDKMIMPTDFVIVCT

SEQ ID NO: 5751 - protein, 130 aa, Zea mays subsp. mays
  peptide (1)..(130): Ceres Seq. ID no. 12405072
MKTFDLGRDSGSDADEDDDAATMELDGAAETVEEVDEAARAKAVAKALCKGSSKADDVADELRELNMDAYDDEDEEVDIFGSGLGDLYYPSNAMDPYLKKNNEDDEEDDDDDEEIEDKMIMPTDFVIVCT

SEQ ID NO: 5752 - DNA, 1399 bp, Zea mays subsp. mays
  misc_feature (1)..(1399): Ceres Seq. ID no. 12369116
  misc_feature (1)..(1399): Ortholog of  Ceres SEQ ID NO 14311755 as cited in SEQ ID NO 57271
  misc_feature (1)..(1399): Ortholog of  Ceres SEQ ID NO 15171156 as cited in SEQ ID NO 58259
  misc_feature (1)..(1399): Ortholog of  Ceres SEQ ID NO 14302212 as cited in SEQ ID NO 66507
  misc_feature (1)..(1399): Ortholog of  Ceres SEQ ID NO 13653980 as cited in SEQ ID NO 69253
aatcccttggagccagcaactccactcctgagtcctcacctcgtgctgcccgcgccatttccacctcccactgtcctttcgtccagtccccagccctgcagcccaaccgtggaggttctggaaggcggtgtatcccttctagaaccttctcgagatgcagagcgccgcggctttccggccgtgccccactcggctgctggtgagcagcccttgtcgccccctcctctcggcccgcccgcttcgtgtctccgccgctggcgccgtcgctaccagaagcagcgccgtgggccctcgcggtctggggctcgggctgctgccagcctcgcccgatcgggatggcaagtgccgccagcgacaggtgtcatgcagcgcggccggggatgctgtggcggccccgaaggcggaagaaggaggcgggctcatgaagacgctgtggctcggctcgctcttcggcctctggtacctgttcaacatctacttcaacatctataacaagcaggtactcaaggttttcccataccctataaacatcacagaagttcaatttgctgtcggaactgtagcagctctgttcatgtggatcactggtattattaagaggccaaagatttctggagcacagcttgtagccatcctacctctggctattgttcatactatgggcaatctcttcaccaacatgagccttgggaaagttgcagtgtcatttacgcacaccatcaaggctatggagcctttcttttctgttattctttctgcaattttccttggcgagttacctactatttgggtagtatcatctcttcttccaattgttggtggtgttgcattggcatctcttactgaggcatcctttaactgggctggcttttggagtgcaatggcttcaaatgttacctttcaatcccgaaatgtattgagcaagaagctcatggttaagaaagaggaatccttggacaaccttaatctcttctctatcattacagtgatgtcatttttccttttggcccctgttaccttctttacagaaggtgtcaaaattactcctacatttttgcaatctgctggtctgaatgtaaaccaagtccttacaaggtgtcttttcgctggactgtgtttccatgcataccaacaggtgtcttacatgattttggcgatggtgtctcctgtcactcattctgtgggcaactgtgttaaacgtgttgtggtcattgtaacatcagtgctgttcttcaggacacctgtttctcctatcaactctctcggtactgcgattgcacttgccggagttttcctgtactcacagctcaagcgacttaagcccaagccgaagacggcttaaatagggattgtattttccatctctttgtgttaatggagttaaacacttctatgttgc

SEQ ID NO: 5753 - protein, 395 aa, Zea mays subsp. mays
  peptide (1)..(395): Ceres Seq. ID no. 12369117
MQSAAAFRPCPTRLLVSSPCRPLLSARPLRVSAAGAVATRSSAVGPRGLGLGLLPASPDRDGKCRQRQVSCSAAGDAVAAPKAEEGGGLMKTLWLGSLFGLWYLFNIYFNIYNKQVLKVFPYPINITEVQFAVGTVAALFMWITGIIKRPKISGAQLVAILPLAIVHTMGNLFTNMSLGKVAVSFTHTIKAMEPFFSVILSAIFLGELPTIWVVSSLLPIVGGVALASLTEASFNWAGFWSAMASNVTFQSRNVLSKKLMVKKEESLDNLNLFSIITVMSFFLLAPVTFFTEGVKITPTFLQSAGLNVNQVLTRCLFAGLCFHAYQQVSYMILAMVSPVTHSVGNCVKRVVVIVTSVLFFRTPVSPINSLGTAIALAGVFLYSQLKRLKPKPKTA

SEQ ID NO: 5754 - protein, 306 aa, Zea mays subsp. mays
  peptide (1)..(306): Ceres Seq. ID no. 12369118
MKTLWLGSLFGLWYLFNIYFNIYNKQVLKVFPYPINITEVQFAVGTVAALFMWITGIIKRPKISGAQLVAILPLAIVHTMGNLFTNMSLGKVAVSFTHTIKAMEPFFSVILSAIFLGELPTIWVVSSLLPIVGGVALASLTEASFNWAGFWSAMASNVTFQSRNVLSKKLMVKKEESLDNLNLFSIITVMSFFLLAPVTFFTEGVKITPTFLQSAGLNVNQVLTRCLFAGLCFHAYQQVSYMILAMVSPVTHSVGNCVKRVVVIVTSVLFFRTPVSPINSLGTAIALAGVFLYSQLKRLKPKPKTA

SEQ ID NO: 5755 - protein, 255 aa, Zea mays subsp. mays
  peptide (1)..(255): Ceres Seq. ID no. 12369119
MWITGIIKRPKISGAQLVAILPLAIVHTMGNLFTNMSLGKVAVSFTHTIKAMEPFFSVILSAIFLGELPTIWVVSSLLPIVGGVALASLTEASFNWAGFWSAMASNVTFQSRNVLSKKLMVKKEESLDNLNLFSIITVMSFFLLAPVTFFTEGVKITPTFLQSAGLNVNQVLTRCLFAGLCFHAYQQVSYMILAMVSPVTHSVGNCVKRVVVIVTSVLFFRTPVSPINSLGTAIALAGVFLYSQLKRLKPKPKTA

SEQ ID NO: 5756 - DNA, 934 bp, Zea mays subsp. mays
  misc_feature (1)..(934): Ceres Seq. ID no. 12408029
  misc_feature (1)..(934): Ortholog of  Ceres SEQ ID NO 14304561 as cited in SEQ ID NO 53886
  misc_feature (1)..(934): Ortholog of  Ceres SEQ ID NO 14307186 as cited in SEQ ID NO 54806
  misc_feature (1)..(934): Ortholog of  Ceres SEQ ID NO 15179828 as cited in SEQ ID NO 66338
ctcgcggtcgcagctagcgaaccctaatggagatcgctgaggccctgcaggcctacacgggcctcacacccgcggccgccgccaccatcctcgccctcatggtggccacctacctcctcgtctcctccctcttcgtcgcccccgcccccgcccccgccccactttccaagccgccccagcagcagcgcgagggggagaaggcacaggaggaggaggaggaagaaccgatgcctttcgtgtatccggaccccgtggaggtgggcgagctcacgctcgagcagctcagtgcgtatgacggcaaggacccagccaagcagatcctcattgccatccggggccaggtctacgacgtctcccgcgggaggctcttttatggccctcagggaccatattccttgtttgccgggagggatgcaacccgggccctggcattgatgtcatttgacccaaacgacctcaccggggatctggacggcctaagcgccgatgagctggaggtgttgcaagattgggaggaaaaattcaagtagaggtatccgagggtgggccaccttgcctgtcaagacgcgacagacagtggtcagaccaccgctgggcttcatcacgaggaaggggacgcctaaaactccactggtttgcctcgtcgtcctctcctctgtttttttttttttacttgctggatttcaccctgtagatctgatgtgcgcacttgtgggtgacgcagctgtcgtcgtcgtttgctgtatatgtatgtacgtgtgcggtgtgcctactgactaatgcacgcacctgctgtcccatttcttttggatctgtagcggctataaggaaattttgagcctaaaaaaaactggaggctttaggaacagcccatgttcgactcttggttgtatacgcgtgatttgtgtcatgatttgtggctttgttgttcatc

SEQ ID NO: 5757 - protein, 167 aa, Zea mays subsp. mays
  peptide (1)..(167): Ceres Seq. ID no. 12408030
MEIAEALQAYTGLTPAAAATILALMVATYLLVSSLFVAPAPAPAPLSKPPQQQREGEKAQEEEEEEPMPFVYPDPVEVGELTLEQLSAYDGKDPAKQILIAIRGQVYDVSRGRLFYGPQGPYSLFAGRDATRALALMSFDPNDLTGDLDGLSADELEVLQDWEEKFK

SEQ ID NO: 5758 - protein, 143 aa, Zea mays subsp. mays
  peptide (1)..(143): Ceres Seq. ID no. 12408031
MVATYLLVSSLFVAPAPAPAPLSKPPQQQREGEKAQEEEEEEPMPFVYPDPVEVGELTLEQLSAYDGKDPAKQILIAIRGQVYDVSRGRLFYGPQGPYSLFAGRDATRALALMSFDPNDLTGDLDGLSADELEVLQDWEEKFK

SEQ ID NO: 5759 - protein, 100 aa, Zea mays subsp. mays
  peptide (1)..(100): Ceres Seq. ID no. 12408032
MPFVYPDPVEVGELTLEQLSAYDGKDPAKQILIAIRGQVYDVSRGRLFYGPQGPYSLFAGRDATRALALMSFDPNDLTGDLDGLSADELEVLQDWEEKFK

SEQ ID NO: 5760 - DNA, 1338 bp, Zea mays subsp. mays
  misc_feature (1)..(1338): Ceres Seq. ID no. 12344124
  misc_feature (1)..(1338): Ortholog of  Ceres SEQ ID NO 15173696 as cited in SEQ ID NO 59972
  misc_feature (1)..(1338): Ortholog of  Ceres SEQ ID NO 15226351 as cited in SEQ ID NO 61706
gtccccgccccactgctgcccattcctctcatcccagcgaacgaccctccagcacgccatccgcttagccgccccggagcattgccatcgtcgccgccaccttctatcccagtgtggagcgggagagaacccgtctgcactcagaagctggtttaatccggtgggagcacaagtcgtgtctaaaatattcagattgctaagatgttgggtcatggtctagtaactgatccctcaagaaccttacgatgtccagttaattcaagggtatcaagtgcacccttggggcttgtttcttcgttgaatttcaacaggggatgcaagggaaagaacaaaatattcaatgtggatagacacaccaagtatagtacttctttctgttatgcgccaagaaatgccagaatcacaccactagcaactgcatcatttggggatatggctgattcttcaactcctatctttccccgaatccatgtaaaagatccatatcagcgtctcggaatcagcagggaagcatcagaagaagaaattcgagctgctaggaactatctgataagcaagtatgcaggccacaagccaagtgttgatgcaattgagtctgcccatgacaggattatcatgcagagtttctttgataggaaaaaaccaaaaatgaatctcaagaaaaaatttagggaacttagtcagtcacgtgcagtgaaggctattcaaggcagatttcaaacaccacgtagcaaagtcatttggcagacagctattgcttttgtcttgcttggagtgcttacccttgctttccctaccgaagaagggccaaccctccaggtggccatctcttgtgcagcaaatatctatttcatttatcagagggtcaaaagtggatggcgagcattcttttatgggtttggttctttctttgcttcctggttccttggcaccttcttgatggtatctgtaattccccctatactccccggtccaagaaacttggaagtgagcaccgcgtgtgttacttatgtgctccttttcatatcgtcgaccttcttgaagtaagagatctttgtgtttccatgttagcgcaaagtcttgcaggagttataaacatggtatcatgcttcaaatagcttgtacaatccatcggctttttctttgcttgtttcacgtttatggagttggaaatgctagttccttagtgagttgatagtagttttcaggttgcaatgtgagatgtagaacgttttttttttgctttggcccgtgatatcttgagcagggtctaacacctcaagtaggtattttcggttgatgtattaaatacagttgtgttcgaatagatcatatgag

SEQ ID NO: 5761 - protein, 281 aa, Zea mays subsp. mays
  peptide (1)..(281): Ceres Seq. ID no. 12344125
MLGHGLVTDPSRTLRCPVNSRVSSAPLGLVSSLNFNRGCKGKNKIFNVDRHTKYSTSFCYAPRNARITPLATASFGDMADSSTPIFPRIHVKDPYQRLGISREASEEEIRAARNYLISKYAGHKPSVDAIESAHDRIIMQSFFDRKKPKMNLKKKFRELSQSRAVKAIQGRFQTPRSKVIWQTAIAFVLLGVLTLAFPTEEGPTLQVAISCAANIYFIYQRVKSGWRAFFYGFGSFFASWFLGTFLMVSVIPPILPGPRNLEVSTACVTYVLLFISSTFLK

SEQ ID NO: 5762 - protein, 204 aa, Zea mays subsp. mays
  peptide (1)..(204): Ceres Seq. ID no. 12344126
MADSSTPIFPRIHVKDPYQRLGISREASEEEIRAARNYLISKYAGHKPSVDAIESAHDRIIMQSFFDRKKPKMNLKKKFRELSQSRAVKAIQGRFQTPRSKVIWQTAIAFVLLGVLTLAFPTEEGPTLQVAISCAANIYFIYQRVKSGWRAFFYGFGSFFASWFLGTFLMVSVIPPILPGPRNLEVSTACVTYVLLFISSTFLK

SEQ ID NO: 5763 - protein, 143 aa, Zea mays subsp. mays
  peptide (1)..(143): Ceres Seq. ID no. 12344127
MQSFFDRKKPKMNLKKKFRELSQSRAVKAIQGRFQTPRSKVIWQTAIAFVLLGVLTLAFPTEEGPTLQVAISCAANIYFIYQRVKSGWRAFFYGFGSFFASWFLGTFLMVSVIPPILPGPRNLEVSTACVTYVLLFISSTFLK

SEQ ID NO: 5764 - DNA, 1517 bp, Zea mays subsp. mays
  misc_feature (1)..(1517): Ceres Seq. ID no. 12365543
  misc_feature (1)..(1517): Ortholog of  Ceres SEQ ID NO 14313264 as cited in SEQ ID NO 67300
  misc_feature (1)..(1517): Ortholog of  Ceres SEQ ID NO 14302824 as cited in SEQ ID NO 67794
aagcatcaccatcgacggggcgagggtacacggaacaccagccgtccgatccatatcgacggccaggtaaatcggaggaagcccggaagaagtctccttccagcaccacccttctctcctccgcatccccccggccggttcctccttgccgccgccgtcgctgtgccaagccttgcgaataaccgttgtccgggctgtggggggcagacatggcgctccggaggctgctgcaggggagtgtcctgccgcgggtaaccggcagggtttcggcaccggccgtggcgccgttttcaacggagtccggagagaccatccgtgccacgctctttccgggcgacggcatcgggccagagattgccgagtctgtcaagcaggtattcaatgttgcaggggtaccaattgaatgggaagaacactatgttggtacagaagttgatcccagaacagagagttttttgacttgggaaagcctggagtcagtgcgtagaaacaaagttggcttgaaaggtcctatggctacacctattggaaagggtcatcgatctttgaatcttacattaaggaaagaacttgggctctatgccaatgtcaggccttgcaacagcctcccaggctacaagaccagatacgatgatgttaaccttgtgacaattcgtgaaaatactgaaggagaatatagtggtcttgagcatcaggttgtgagaggtgttgtagaaagtttgaaaattattacccgccaagcaagtttgagagtggcagaatatgcttttcattatgccaaggccaatggccgggaaagggtctctgcgattcacaaggccaatattatgaggaagacagatggtcttttcctcaagtgttgccgtgaagtggctgagacgtaccctgaaattcaatacgaggaggtcatcattgacaattgttgtatgacgcttgtgaagaatcctggtctttttgatgtattagtgatgccaaacctctatggtgacatcattagcgatctatgtgctggtttgattgggggcttgggcctaacacccagttgcaatattggtgaaggtggcatttgtctagcagaagctgttcatggttctgctcctgatattgctggcaagaaccttgcgaacccgactgctcttatgctgagtgctgtcatgatgttgcgccacttgcaattcaacgacaaagcagaccggatccacaacgccatcctccagactattgctggggggaagtacaggactgctgatcttggtggaaaggcatcgacatccgagtttacaaatgcagtctgtgatcacatctgagaatcggatgtggttctttccttctgattgttctgtcttcctaatatctttttgtcgcatatggggaggagctttagctttaagaggttaactggcagcacctcgaacttctttgggtggttaacacggtttgagaccgtcaaatatttttgtcacatatcttgctgtccagaaattttttcaacttcagaatcgagtaaataattctgc

SEQ ID NO: 5765 - protein, 365 aa, Zea mays subsp. mays
  peptide (1)..(365): Ceres Seq. ID no. 12365544
MALRRLLQGSVLPRVTGRVSAPAVAPFSTESGETIRATLFPGDGIGPEIAESVKQVFNVAGVPIEWEEHYVGTEVDPRTESFLTWESLESVRRNKVGLKGPMATPIGKGHRSLNLTLRKELGLYANVRPCNSLPGYKTRYDDVNLVTIRENTEGEYSGLEHQVVRGVVESLKIITRQASLRVAEYAFHYAKANGRERVSAIHKANIMRKTDGLFLKCCREVAETYPEIQYEEVIIDNCCMTLVKNPGLFDVLVMPNLYGDIISDLCAGLIGGLGLTPSCNIGEGGICLAEAVHGSAPDIAGKNLANPTALMLSAVMMLRHLQFNDKADRIHNAILQTIAGGKYRTADLGGKASTSEFTNAVCDHI

SEQ ID NO: 5766 - protein, 264 aa, Zea mays subsp. mays
  peptide (1)..(264): Ceres Seq. ID no. 12365545
MATPIGKGHRSLNLTLRKELGLYANVRPCNSLPGYKTRYDDVNLVTIRENTEGEYSGLEHQVVRGVVESLKIITRQASLRVAEYAFHYAKANGRERVSAIHKANIMRKTDGLFLKCCREVAETYPEIQYEEVIIDNCCMTLVKNPGLFDVLVMPNLYGDIISDLCAGLIGGLGLTPSCNIGEGGICLAEAVHGSAPDIAGKNLANPTALMLSAVMMLRHLQFNDKADRIHNAILQTIAGGKYRTADLGGKASTSEFTNAVCDHI

SEQ ID NO: 5767 - DNA, 1622 bp, Zea mays subsp. mays
  misc_feature (1)..(1622): Ceres Seq. ID no. 12344128
  misc_feature (1)..(1622): Ortholog of  Ceres SEQ ID NO 13600673 as cited in SEQ ID NO 0
aaaaaaaaaacaccaacccacccaccagcctattatactcaacgcgacgaactcatctcaccaccgcgccctccgccggatggagcggccagacgtgacggtcaagcaggaggaagacgaagtggtggtggtgttggacgccgacggcgatgcttgcgggcactggccgggagcccgcgcggcgccggagccttggcagacgccggtgggatccgcggttccgccgttccttgcgaagacgttcgagcttgtggaggacccggcgacggacgccgtgatatcgtggggcgccgcgcggaacagcttcgtggtgtgggatccacacgccttcgcggcggggcaccttccgcgccgcttcaagcacggcaacttctccaccttcctccggcagctgaacacctacgtccgtaatcacatatctcaattcgtaattaacaaacattgcaatggattccgcaaggtgagcccggacaggtgggagttcgcgcacgccgacttcctcgcggggcagcggcacctcctcgtgaacatccggcggcgccgcgggggcgtcgcgggacccacagcatctccgtcttcggcgggagccggcggcgaccgtgatagcgagctcgagaggctgcggcgggaccgggaggcgctggcgagggagctgacgcggctgcggcgcgagcaggaggaggcccgcgcgcagctgctggacatggagcggcgcgtgcggggcacggagcggcggcaggagcagtgcaccgccttcctggcgcgcgccatccggaacccgaccttcctggacggcctgctggcgcgccgctgtggcgcgcacgtagaggccggcaggaagcggcggctgctcgatgccgctgcggccggccctgacccagcggacgtcctcgacatcgaggagctggcgatggttgcgggcgccgaggtcggtgtggcttccatcccagccgttgcagcggcgcagatttccaacacagccaacgccacggacatgatatggtacgagcttctcggggaggagcaggtggagatcgacgccgaggtgcacgacctcgtcgtggccgccgcggctgccactgatgagttggcgcagccgtgggcggagatggacgagaaagaggttgcggagcttgtgcggcagatagactgccttgcctcgccgagtccctgatcagtgatcaccacgaggtggagaccgtgcagctagttgcacctgtaatatggtgctccctacggagagcaactacctaccactagtccactattagccatgcattgcctgtgtcactggcaatgccattggcatatgacggctgctgaagtacaatggtggcgctggtactgtggtacggtactgcagtgcgccacgctctggattggaccctaatggtcatttggtgtgtagtgtcgttagccttgctgtttgattgtggttattggattattaggtctgcgatatgctaatttggattctgcatctgttttgtgggatccgacagtggcggtatgctgcacacaaaccggccgtggtgatggatgcagcagcctgatccagttagttgatgtattcttaagaatttgaccaaagagcaactctaaccaagccttaaatttttgcc

SEQ ID NO: 5768 - protein, 390 aa, Zea mays subsp. mays
  peptide (1)..(390): Ceres Seq. ID no. 12344129
KKKHQPTHQPIILNATNSSHHRALRRMERPDVTVKQEEDEVVVVLDADGDACGHWPGARAAPEPWQTPVGSAVPPFLAKTFELVEDPATDAVISWGAARNSFVVWDPHAFAAGHLPRRFKHGNFSTFLRQLNTYVRNHISQFVINKHCNGFRKVSPDRWEFAHADFLAGQRHLLVNIRRRRGGVAGPTASPSSAGAGGDRDSELERLRRDREALARELTRLRREQEEARAQLLDMERRVRGTERRQEQCTAFLARAIRNPTFLDGLLARRCGAHVEAGRKRRLLDAAAAGPDPADVLDIEELAMVAGAEVGVASIPAVAAAQISNTANATDMIWYELLGEEQVEIDAEVHDLVVAAAAATDELAQPWAEMDEKEVAELVRQIDCLASPSP

SEQ ID NO: 5769 - protein, 364 aa, Zea mays subsp. mays
  peptide (1)..(364): Ceres Seq. ID no. 12344130
MERPDVTVKQEEDEVVVVLDADGDACGHWPGARAAPEPWQTPVGSAVPPFLAKTFELVEDPATDAVISWGAARNSFVVWDPHAFAAGHLPRRFKHGNFSTFLRQLNTYVRNHISQFVINKHCNGFRKVSPDRWEFAHADFLAGQRHLLVNIRRRRGGVAGPTASPSSAGAGGDRDSELERLRRDREALARELTRLRREQEEARAQLLDMERRVRGTERRQEQCTAFLARAIRNPTFLDGLLARRCGAHVEAGRKRRLLDAAAAGPDPADVLDIEELAMVAGAEVGVASIPAVAAAQISNTANATDMIWYELLGEEQVEIDAEVHDLVVAAAAATDELAQPWAEMDEKEVAELVRQIDCLASPSP

SEQ ID NO: 5770 - DNA, 1187 bp, Zea mays subsp. mays
  misc_feature (1)..(1187): Ceres Seq. ID no. 12409333
  misc_feature (1)..(1187): Ortholog of  Ceres SEQ ID NO 12608276 as cited in SEQ ID NO 57871
  misc_feature (1)..(1187): Ortholog of  Ceres SEQ ID NO 13598492 as cited in SEQ ID NO 63882
  misc_feature (1)..(1187): Ortholog of  Ceres SEQ ID NO 13657914 as cited in SEQ ID NO 66230
  misc_feature (1)..(1187): Ortholog of  Ceres SEQ ID NO 13595877 as cited in SEQ ID NO 67702
  misc_feature (1)..(1187): Ortholog of  Ceres SEQ ID NO 13622667 as cited in SEQ ID NO 0
ccaacagcccgcatcgctcactccgtcactcactcggcgcggcgcccatccccgcggttctcacgagcgcgcgcgcctgcgtccggcgccgtccgccatggcgtcgtccaagcctttattccccttccccgtccccgcccccgacccgtccgacgaggtcgtgcgcgagttcggcccgctgctccgggtctacaagagcggccgcatcgagcggcccctggtggctccgcccgtggagcctggccacgacgccgccacgggggtccaatccaaggacgtccacctcggctcctactcggcccgcctctacctgccccccgtggccgacgccggtgccaagctgcccgtcgtcgtgttcgtgcacggcggcggcttcgtggccgagtccgccgcctcgcccaactaccacctcttcctcaacaggctcgccgccgcctgccccgcgctcgcggtctccgtcgactaccgcctggcgcccgagcacccgctcccggcggggtacgacgactgcctcgccgcgctcaagtgggtgctttccgccgccgacccctgggtcgccgcccacggggatctcgcgcgcgtcttcgtcgccggggacagcgccggcggcaacgtctgccactacctcgccatccacccggacgtcgtccaggcgcagcagcagggctgcccgccgccgctcaagggcgccgtgctcatccacccctggttctggggctccgaggccgtgggcgaggagcccagggaccccgccgtgcgcaccatgggcgccggactctggttcttcgcgtgccccgatgctaatagcatggaagacccgcggatgaaccccatggcgcccgccgcaccgggactccacacgctggcgtgtgagcgcgtcatggtgtgtaccgcggagggcgacttcctcaggtggcgcggccgcgcgtacgccgaggcggtggccgcggcgaggggaggccgcctggggcaggccgccggcgtcgagctgctggagaccatgggagagggccatgtcttcttcctcttcaaacccgactgcgacaaggccaaggagatgctggacaagatggcggctttcatcaatgcgccgtgaacgtgaacgtgatccgtgacgcgtgcgcccttgttcctttgtgtttgcgtgacaatgtggaaaataaaataatatatttcagctgttttgg

SEQ ID NO: 5771 - protein, 364 aa, Zea mays subsp. mays
  peptide (1)..(364): Ceres Seq. ID no. 12409334
QQPASLTPSLTRRGAHPRGSHERARLRPAPSAMASSKPLFPFPVPAPDPSDEVVREFGPLLRVYKSGRIERPLVAPPVEPGHDAATGVQSKDVHLGSYSARLYLPPVADAGAKLPVVVFVHGGGFVAESAASPNYHLFLNRLAAACPALAVSVDYRLAPEHPLPAGYDDCLAALKWVLSAADPWVAAHGDLARVFVAGDSAGGNVCHYLAIHPDVVQAQQQGCPPPLKGAVLIHPWFWGSEAVGEEPRDPAVRTMGAGLWFFACPDANSMEDPRMNPMAPAAPGLHTLACERVMVCTAEGDFLRWRGRAYAEAVAAARGGRLGQAAGVELLETMGEGHVFFLFKPDCDKAKEMLDKMAAFINAP

SEQ ID NO: 5772 - protein, 332 aa, Zea mays subsp. mays
  peptide (1)..(332): Ceres Seq. ID no. 12409335
MASSKPLFPFPVPAPDPSDEVVREFGPLLRVYKSGRIERPLVAPPVEPGHDAATGVQSKDVHLGSYSARLYLPPVADAGAKLPVVVFVHGGGFVAESAASPNYHLFLNRLAAACPALAVSVDYRLAPEHPLPAGYDDCLAALKWVLSAADPWVAAHGDLARVFVAGDSAGGNVCHYLAIHPDVVQAQQQGCPPPLKGAVLIHPWFWGSEAVGEEPRDPAVRTMGAGLWFFACPDANSMEDPRMNPMAPAAPGLHTLACERVMVCTAEGDFLRWRGRAYAEAVAAARGGRLGQAAGVELLETMGEGHVFFLFKPDCDKAKEMLDKMAAFINAP

SEQ ID NO: 5773 - protein, 274 aa, Zea mays subsp. mays
  peptide (1)..(274): Ceres Seq. ID no. 12409336
NSPHRSLRHSLGAAPIPAVLTSARACVRRRPPWRRPSLYSPSPSPPPTRPTRSCASSARCSGSTRAAASSGPWWLRPWSLATTPPRGSNPRTSTSAPTRPASTCPPWPTPVPSCPSSCSCTAAASWPSPPPRPTTTSSSTGSPPPAPRSRSPSTTAWRPSTRSRRGTTTASPRSSGCFPPPTPGSPPTGISRASSSPGTAPAATSATTSPSTRTSSRRSSRAARRRSRAPCSSTPGSGAPRPWARSPGTPPCAPWAPDSGSSRAPMLIAWKTRG

SEQ ID NO: 5774 - DNA, 1399 bp, Zea mays subsp. mays
  misc_feature (1)..(1399): Ceres Seq. ID no. 12349156
  misc_feature (1)..(1399): Ortholog of  Ceres SEQ ID NO 13598976 as cited in SEQ ID NO 460
acccgattcaaacggtttcaaaagcgcgaccccaccgcagcccgcagggtccacggctctcgtttccgcccgcgccacccgccatgtcgtccccgccgcgggggcagcccgccaccgccgccgtgccggcggtcgcggccgccacgtccccgcagttgcctgcggcgtcccacacgctcccccgcgcgttcctcgccacatcctctccccgtgccatagtggcagcaccggcgcccccgctattcaccggtcggccgctgaaccctaacccaccggcccacggctcctccgtgccccacggcatcctctaccccgtcctgaaatccgcctccacgtccaactccgcggccgcggccgtgacagcgcagctccgccgcgttcctcccatggccgtggggtaccctcggacccacgccgtcgccatccctattgcacagcagcagcagcccctggtgcacgcgcaaccccggtccttcgcggccgtgcctcgggcccttgtgactggcgtgtcgacggggtccgaacagcctccccgaggagttcctataggctcgcagcccaaggttaatccagtaccacctgttggcccatccaatgagcagagtaacccaaaagacagggaaaagagcagagaagaacctacagttgtggtgattaatgaccgcaaagttaacctgctggatagtgagtcgggatccttttatgctctctgtcgatcttgggttcgtaatggtgttccacatgaaagtcagccaagctttggaaatggtgaaccacttcttccaagacctttgcctgcttcagttgtagattctagaatatcagacaaggacgataatgatgttgcaggtgaagattcagatgaagagccacagaagaatgccaacggtgaatacaatacaagtgatttattgaagcagcatgtaaagcgtgcgaaaaggatacgtgctgggttgcaaaaggatcggcttcgtcggattgaaagatacaagcaacgccttgcacttcttttgtagaatcggcctgtgactgtataaagctgaaaccataggtgtttgtcttgcaggttttaacttccgtattggaatttgttaagatgttttattgactagcattgtatgttaggaccatctggatgttttattgccaacgttatctaataaaatgtgaaaaagcctttagctaagttggttggatgatctgagtagcactattaaagttttgagtatggtgccactgtgcatgggtgagacaaaggttcgaagttcgaaggttttctcgagctgcatgagaagatcttaaatgtaatgtaggtcttcttaaaggtaatgccgttgaggtggtcttaccatatatgtggattttttttatctagtgaaatgaaactgaaatcatagtc

SEQ ID NO: 5775 - protein, 337 aa, Zea mays subsp. mays
  peptide (1)..(337): Ceres Seq. ID no. 12349157
PIQTVSKARPHRSPQGPRLSFPPAPPAMSSPPRGQPATAAVPAVAAATSPQLPAASHTLPRAFLATSSPRAIVAAPAPPLFTGRPLNPNPPAHGSSVPHGILYPVLKSASTSNSAAAAVTAQLRRVPPMAVGYPRTHAVAIPIAQQQQPLVHAQPRSFAAVPRALVTGVSTGSEQPPRGVPIGSQPKVNPVPPVGPSNEQSNPKDREKSREEPTVVVINDRKVNLLDSESGSFYALCRSWVRNGVPHESQPSFGNGEPLLPRPLPASVVDSRISDKDDNDVAGEDSDEEPQKNANGEYNTSDLLKQHVKRAKRIRAGLQKDRLRRIERYKQRLALLL

SEQ ID NO: 5776 - protein, 310 aa, Zea mays subsp. mays
  peptide (1)..(310): Ceres Seq. ID no. 12349158
MSSPPRGQPATAAVPAVAAATSPQLPAASHTLPRAFLATSSPRAIVAAPAPPLFTGRPLNPNPPAHGSSVPHGILYPVLKSASTSNSAAAAVTAQLRRVPPMAVGYPRTHAVAIPIAQQQQPLVHAQPRSFAAVPRALVTGVSTGSEQPPRGVPIGSQPKVNPVPPVGPSNEQSNPKDREKSREEPTVVVINDRKVNLLDSESGSFYALCRSWVRNGVPHESQPSFGNGEPLLPRPLPASVVDSRISDKDDNDVAGEDSDEEPQKNANGEYNTSDLLKQHVKRAKRIRAGLQKDRLRRIERYKQRLALLL

SEQ ID NO: 5777 - protein, 209 aa, Zea mays subsp. mays
  peptide (1)..(209): Ceres Seq. ID no. 12349159
MAVGYPRTHAVAIPIAQQQQPLVHAQPRSFAAVPRALVTGVSTGSEQPPRGVPIGSQPKVNPVPPVGPSNEQSNPKDREKSREEPTVVVINDRKVNLLDSESGSFYALCRSWVRNGVPHESQPSFGNGEPLLPRPLPASVVDSRISDKDDNDVAGEDSDEEPQKNANGEYNTSDLLKQHVKRAKRIRAGLQKDRLRRIERYKQRLALLL

SEQ ID NO: 5778 - DNA, 1177 bp, Zea mays subsp. mays
  misc_feature (1)..(1177): Ceres Seq. ID no. 12406908
  misc_feature (1)..(1177): Ortholog of  Ceres SEQ ID NO 13595093 as cited in SEQ ID NO 56132
  misc_feature (1)..(1177): Ortholog of  Ceres SEQ ID NO 13661727 as cited in SEQ ID NO 61376
gcaacagacccccgcccacgaccacacgcaggcagcaagcagcagccgcgcgctcgcctaggactaccgactacgagtagtgctcagctagcctccatcctcagcgcgcgagtggctgctgcgcattcctctctttatccgtctctgtgcttgtttaatttgtgttcgttcgtgagtaggcggcccggcacatatggcagcgcagtccatgctcatgtcgaccagcgtcaacggcggccgcgcgctgccgtctcttcaggccgtccggccgggctccatacccgcggctaccgctgccgtcgtcgtcatcctcgtcaggctacaggcactccaagtccgtctccgtgaagacgctcgccctgttcggcaaatccaaggtcaagaccgcgccggcgaagaaggctgctgcgcccaagcccaagccgaaggttgaggatggtatcttcggcacgtccggcgggatcggtttcaccaaggagaacgagctgttcgtcggccgcgttgccatgcttggctttgccgcatcgctacttggagaggccattaccgggaagggcatccttgcccagctgaacctcgagacgggcatccccatctacgaggcggagcctctcctcctgttcttcatcctcttcaccctccttggcgccatcggcgctctcggggaccgcggccgcttcgtcgacgaggaggtcaccggcctcgacaaggccgtcatccaacctggcaagggcttccgcggcgccctcggcctcagcgagggagggccgctgttcgggttcaccaagtcgaacgagctgttcgtggggcggatggcgcagctgggcgtggccttctccatcatcggcgagatcatcacggggaagggcgcgctggcgcagctcaacatcgagacgggggtgcccatcaacgagatagagccgctcgtcatcttcaacgtcctcttcttcttcatcgccgccatcaaccccggcaatggcaggttcatcatcggcgaggaagaggaataggctgctggcctcggacatgagtcgtgtgcgtttacctttacctgtgactgtgagtgatcgatcgattgctgtgtatcaattactcgtgatgagacctcgaaggtagggtgtcgcgttgggttgtctgcttgtagaaacaagagcttatatataaattactactagct

SEQ ID NO: 5779 - protein, 167 aa, Zea mays subsp. mays
  peptide (1)..(167): Ceres Seq. ID no. 12406909
MLGFAASLLGEAITGKGILAQLNLETGIPIYEAEPLLLFFILFTLLGAIGALGDRGRFVDEEVTGLDKAVIQPGKGFRGALGLSEGGPLFGFTKSNELFVGRMAQLGVAFSIIGEIITGKGALAQLNIETGVPINEIEPLVIFNVLFFFIAAINPGNGRFIIGEEEE

SEQ ID NO: 5780 - protein, 115 aa, Zea mays subsp. mays
  peptide (1)..(115): Ceres Seq. ID no. 12406910
ATDPRPRPHAGSKQQPRARLGLPTTSSAQLASILSARVAAAHSSLYPSLCLFNLCSFVSRRPGTYGSAVHAHVDQRQRRPRAAVSSGRPAGLHTRGYRCRRRHPRQATGTPSPSP

SEQ ID NO: 5781 - DNA, 1764 bp, Zea mays subsp. mays
  misc_feature (1)..(1764): Ceres Seq. ID no. 12349967
  misc_feature (1)..(1764): Ortholog of  Ceres SEQ ID NO 14315241 as cited in SEQ ID NO 52516
  misc_feature (1)..(1764): Ortholog of  Ceres SEQ ID NO 15176457 as cited in SEQ ID NO 55547
  misc_feature (1)..(1764): Ortholog of  Ceres SEQ ID NO 13594349 as cited in SEQ ID NO 58161
  misc_feature (1)..(1764): Ortholog of  Ceres SEQ ID NO 13663419 as cited in SEQ ID NO 66561
accgcccagctgcaccctgcagcgctcactcgctcactgactcactcccctcccctggcctcctcctctctctctctctctccactctctcccacagccgaaccaacatgcaggggcgcagcagggacgccgccaccgtcgctgcagcggtggtgtgcgcagctgcgctgctcctcggcgacgcctggaccgtctcggcgcaggcggcggcggaggaggacaagataagcgccctgccggggcagccgccggtgggcttcgcacagtactccggttacatcccggtggacgccgcggggaagcgctccctcttctactacttcgccgaggcggaggcggatccggcggccaagccgctcgtgctctggctcaatggagggcctgggtgctcatccgtgggagtgggggcgttctcagagaatgggccgttcaggcctagcggcaatgcgctgacgaggaacgagtacagctggaacaaagaggccaatatgctgtatctggagagccctgcaggggttggcttttcatactccactgatcctgccttctacgagggtgttggtgacagcatgacagccagagacaacttgaagttcttgcaaggctggttcgccaggttccctcagtacaagggcagggacctgtatatcacaggagagagctacgctggccactacgttccacagttagcccagcgcatggttgagttcaacaagaaggagaagctattcaacctgaaaggcattgctcttggcaaccctgtgctggagttctcgaccgacttcaactcgcgggcggagttcttctggtcgcacggcctgatatcggactccacctacaacatcttcacgacggtgtgcaactactcgcggtacgtgagcgagtactaccgcggctccctgagcacggcctgcgacagggtgatgagccaggtggcgagggagacgagccggttcgtcgacaagtacgacgtcaccctggacgtctgcatctcgtcggtgctcatgcagtcccaggtcctcgtccctcagcaagggagcagggagctggacgtgtgcgtggaggacgagacgatgcggtacctgaaccggaaggacgtgcagcaggccatgcacgcgcgcctcgacggcgtgcagaggtggacggtctgcagcagcgttctggagtacaagcagctggacctccagatcccgaccgtgaacaccgtgggcgcgctcgtgaaggcgggcatccccgcgctggtgtacagcggcgaccaggactcggtgatcccgctgacgggcagcaggacgctggtggggcggctggcggccaggctccggctcaactccacggcgccgtaccgtgcctggttccaggggaagcaggtgggcgggtggacgcaggtgttcggcggcggcgcgctgtccttcgccacggtgcgcggcgcgtcccacgaggcgcccttctcgcagcccgagcgctcgctcggcctcttcagggcgttcctcgccggacagcagctgccggaatcgttccagtgacgacggaacgtgcctcttccacgtctagtgtatgttcattgtaagcgtatgtacgtgcagctgaccgtctgtcgtcatcatccggccgctcgacactggcaaaacaacccaaatgggttcttctccaagtgtaatcaggacgaaaataatatcattggaacttggaagggatgagactgtgtgtcgtcggctttccatgttgtaggcttgtagtacaagtgtaatatgcatatgctggttc

SEQ ID NO: 5782 - protein, 506 aa, Zea mays subsp. mays
  peptide (1)..(506): Ceres Seq. ID no. 12349968
RPAAPCSAHSLTDSLPSPGLLLSLSLSTLSHSRTNMQGRSRDAATVAAAVVCAAALLLGDAWTVSAQAAAEEDKISALPGQPPVGFAQYSGYIPVDAAGKRSLFYYFAEAEADPAAKPLVLWLNGGPGCSSVGVGAFSENGPFRPSGNALTRNEYSWNKEANMLYLESPAGVGFSYSTDPAFYEGVGDSMTARDNLKFLQGWFARFPQYKGRDLYITGESYAGHYVPQLAQRMVEFNKKEKLFNLKGIALGNPVLEFSTDFNSRAEFFWSHGLISDSTYNIFTTVCNYSRYVSEYYRGSLSTACDRVMSQVARETSRFVDKYDVTLDVCISSVLMQSQVLVPQQGSRELDVCVEDETMRYLNRKDVQQAMHARLDGVQRWTVCSSVLEYKQLDLQIPTVNTVGALVKAGIPALVYSGDQDSVIPLTGSRTLVGRLAARLRLNSTAPYRAWFQGKQVGGWTQVFGGGALSFATVRGASHEAPFSQPERSLGLFRAFLAGQQLPESFQ

SEQ ID NO: 5783 - protein, 471 aa, Zea mays subsp. mays
  peptide (1)..(471): Ceres Seq. ID no. 12349969
MQGRSRDAATVAAAVVCAAALLLGDAWTVSAQAAAEEDKISALPGQPPVGFAQYSGYIPVDAAGKRSLFYYFAEAEADPAAKPLVLWLNGGPGCSSVGVGAFSENGPFRPSGNALTRNEYSWNKEANMLYLESPAGVGFSYSTDPAFYEGVGDSMTARDNLKFLQGWFARFPQYKGRDLYITGESYAGHYVPQLAQRMVEFNKKEKLFNLKGIALGNPVLEFSTDFNSRAEFFWSHGLISDSTYNIFTTVCNYSRYVSEYYRGSLSTACDRVMSQVARETSRFVDKYDVTLDVCISSVLMQSQVLVPQQGSRELDVCVEDETMRYLNRKDVQQAMHARLDGVQRWTVCSSVLEYKQLDLQIPTVNTVGALVKAGIPALVYSGDQDSVIPLTGSRTLVGRLAARLRLNSTAPYRAWFQGKQVGGWTQVFGGGALSFATVRGASHEAPFSQPERSLGLFRAFLAGQQLPESFQ

SEQ ID NO: 5784 - protein, 344 aa, Zea mays subsp. mays
  peptide (1)..(344): Ceres Seq. ID no. 12349970
MLYLESPAGVGFSYSTDPAFYEGVGDSMTARDNLKFLQGWFARFPQYKGRDLYITGESYAGHYVPQLAQRMVEFNKKEKLFNLKGIALGNPVLEFSTDFNSRAEFFWSHGLISDSTYNIFTTVCNYSRYVSEYYRGSLSTACDRVMSQVARETSRFVDKYDVTLDVCISSVLMQSQVLVPQQGSRELDVCVEDETMRYLNRKDVQQAMHARLDGVQRWTVCSSVLEYKQLDLQIPTVNTVGALVKAGIPALVYSGDQDSVIPLTGSRTLVGRLAARLRLNSTAPYRAWFQGKQVGGWTQVFGGGALSFATVRGASHEAPFSQPERSLGLFRAFLAGQQLPESFQ

SEQ ID NO: 5785 - DNA, 1562 bp, Zea mays subsp. mays
  misc_feature (1)..(1562): Ceres Seq. ID no. 12405591
  misc_feature (1)..(1562): Ortholog of  Ceres SEQ ID NO 14311014 as cited in SEQ ID NO 53606
gaatattatcaaaagaaaaaaaagatcgcagccgaaaggaaggggaaaaaaggaccaaataaacaatccactgtctcctacctccgcggaagcatcaaacaaatcaccctgccgatcgccatggacgaacagcaggcggaggagggcgaaagcgcgcgcgtcaagaggacgccggaggaggggtcgtcgccgctgtccgctctggcggatgacgtgctgctacagatcctgggacggctcgaggcggacccgcgggactgggcgcgggcctcctgcgcgtccccgcgcctcgccgctctgctccgggcggcctgcctcccgccgcgactgtcgcgggcgctccccgccgagctcctccccgcgccgtcaccggacggggcgcccgcggcctgggcggcgctccacaagctctccgtctgttgcccggggctcctccgcgccggggtgctcctcgagcccaccgacgatttcgggctcgatctcgacatcgggcctgacgtccccatctacgcccgcaccgacgcctcctccgccgaggggttcgaggccacggccacctcccgccacagcggaaccatcgtcgcggccgggagcgcgccccgcgccggcgaatctgccaacgtcgccgcgtggtcgctctacgacgacctgtacctggacgcggcatacgactgctcgtccgagctgcagatcccgcctgccgctgcggctgtggaacccgccccgcccgcgcccgtggcggcgatccgcgacgtggaggaagcaacgaccacaaatgctgtctcatgcggcgtcgcccggcgcggcgtggtggccgggagccgactgcatccgcggcggtggctgggcaccgtcggcgcgcacctggcatcggggtcctggacgctgagccgtgagcaggggaacaagctccttgccagccgcttccgcggcgaccggctatacctctgcgactggcccgggtgcgtgcacaaggaggagcgacgcaagtacatggtcttccgcggcgtgttccacaacttcgcccggtctcaggtccggcgcgcgctcagggacacgcgccgccccaccgtcgccatcgagtgcgccttctgcggctgcaaagagacctgggacctctactcggctttctgcctccgcagtttctacggctaccacgacgacggcgagcctgtggtgcgcgcctacgtctgcgagaacggccacgtcgcgggcgcctggaccgaccgcccactctactcctgatcttggagtggacactccgactgacatggtattgcatcaaagactgcaccctgccattgccagatgctcgctcctaccacttgagctgtttctagacataattatgcgtgcctgcatatagcaatccggattttcgtcatgttctgatacacgtgggatgtgtattctttatttctttcttcttgctgttgctgttgtttgtgagaatggttgagtagaataaggatgccggttgatttgcagcataggatataaagagatttgcttaaaattgtaaacctgatgctacgagaaattggaaccgctgttttattgcc

SEQ ID NO: 5786 - protein, 414 aa, Zea mays subsp. mays
  peptide (1)..(414): Ceres Seq. ID no. 12405592
EYYQKKKKIAAERKGKKGPNKQSTVSYLRGSIKQITLPIAMDEQQAEEGESARVKRTPEEGSSPLSALADDVLLQILGRLEADPRDWARASCASPRLAALLRAACLPPRLSRALPAELLPAPSPDGAPAAWAALHKLSVCCPGLLRAGVLLEPTDDFGLDLDIGPDVPIYARTDASSAEGFEATATSRHSGTIVAAGSAPRAGESANVAAWSLYDDLYLDAAYDCSSELQIPPAAAAVEPAPPAPVAAIRDVEEATTTNAVSCGVARRGVVAGSRLHPRRWLGTVGAHLASGSWTLSREQGNKLLASRFRGDRLYLCDWPGCVHKEERRKYMVFRGVFHNFARSQVRRALRDTRRPTVAIECAFCGCKETWDLYSAFCLRSFYGYHDDGEPVVRAYVCENGHVAGAWTDRPLYS

SEQ ID NO: 5787 - protein, 374 aa, Zea mays subsp. mays
  peptide (1)..(374): Ceres Seq. ID no. 12405593
MDEQQAEEGESARVKRTPEEGSSPLSALADDVLLQILGRLEADPRDWARASCASPRLAALLRAACLPPRLSRALPAELLPAPSPDGAPAAWAALHKLSVCCPGLLRAGVLLEPTDDFGLDLDIGPDVPIYARTDASSAEGFEATATSRHSGTIVAAGSAPRAGESANVAAWSLYDDLYLDAAYDCSSELQIPPAAAAVEPAPPAPVAAIRDVEEATTTNAVSCGVARRGVVAGSRLHPRRWLGTVGAHLASGSWTLSREQGNKLLASRFRGDRLYLCDWPGCVHKEERRKYMVFRGVFHNFARSQVRRALRDTRRPTVAIECAFCGCKETWDLYSAFCLRSFYGYHDDGEPVVRAYVCENGHVAGAWTDRPLYS

SEQ ID NO: 5788 - protein, 295 aa, Zea mays subsp. mays
  peptide (1)..(295): Ceres Seq. ID no. 12405594
NIIKRKKRSQPKGRGKKDQINNPLSPTSAEASNKSPCRSPWTNSRRRRAKARASRGRRRRGRRRCPLWRMTCCYRSWDGSRRTRGTGRGPPARPRASPLCSGRPASRRDCRGRSPPSSSPRRHRTGRPRPGRRSTSSPSVARGSSAPGCSSSPPTISGSISTSGLTSPSTPAPTPPPPRGSRPRPPPATAEPSSRPGARPAPANLPTSPRGRSTTTCTWTRHTTARPSCRSRLPLRLWNPPRPRPWRRSATWRKQRPQMLSHAASPGAAWWPGADCIRGGGWAPSARTWHRGPGR

SEQ ID NO: 5789 - DNA, 1268 bp, Zea mays subsp. mays
  misc_feature (1)..(1268): Ceres Seq. ID no. 12409325
  misc_feature (1)..(1268): Ortholog of  Ceres SEQ ID NO 15176407 as cited in SEQ ID NO 59620
  misc_feature (1)..(1268): Ortholog of  Ceres SEQ ID NO 13596876 as cited in SEQ ID NO 62696
  misc_feature (1)..(1268): Ortholog of  Ceres SEQ ID NO 13655442 as cited in SEQ ID NO 64359
  misc_feature (1)..(1268): Ortholog of  Ceres SEQ ID NO 14303652 as cited in SEQ ID NO 67569
ctgggcccaccgtaactgactgggtgttctttacagacacgtgacgtcgcgcaccgggcccgtctatcgagtattcggtcccattcgtcagtgctcggacacctgactaataacaaaagaactcgctccattcagagattcagagaagacccgcctctcccgtgaggccgtgacgcgacgccggatcgtcctcgtctcctagctcgtggaatgaagggaggtggcgtcatcagggccgccggcggaggtgccggcggtgcgggtctgttgcgaacgcgactgcggcttcccgtggtgctcctctcctgctccctcttcttcctcgccggcttcttcggctcgctcctcttcacccaggatccggaggaggcggatatgccggtgccgagagagcggctgttggatgcggcgtggccggagatgccttacggcgagtccggcgaggctgcgccgtccttgatcccataccagattttgagctggcagcctcgtgctttgtactttccacaatttgcgacatcagaacagtgtgaaaatatagtaaaaacggcaaaggagagacttaagccatcaacattagccctgaggaaaggagaaaccgcagagagtacaaaaggaatcaggacaagttcgggaacattccttagtgctaatgaagacccaactgaaacccttgcggaaatcgagaagaagattgcaagggctaccatgttacccagaaatcatggggagccatttaatgtcctgcggtataatattggacaaaggtatgcttcacattatgacgcatttgacccagctcagtatggtccacaaaaaaatcaaagggtggcatctttcttgctttatctcacggatgtcgaagaagggggagaaactatgttcccatacgagaacagtgagaatatggatataggctatgactatgagaagtgcattggcctaaaggtaaaaccaaggaagggtgacggactcttgttttactcccttatggtaaatgggaccattgaccggacttcacttcatggtagctgccccgtcatcaaaggcgagaaatgggtcgccaccaaatggatcagagacaatatagtgtagaaatcgaaaggctcaggtgtcatgtgccctccaaaaaaatagatcatgcgcacatatactgaccatatacttcagtgtttgttcaattgccatggacagttggaccaacggaaggaaagtgtaaccaatctatttgcatcgtgtcaatatatagcctacaacttacatgtggc

SEQ ID NO: 5790 - protein, 294 aa, Zea mays subsp. mays
  peptide (1)..(294): Ceres Seq. ID no. 12409326
MKGGGVIRAAGGGAGGAGLLRTRLRLPVVLLSCSLFFLAGFFGSLLFTQDPEEADMPVPRERLLDAAWPEMPYGESGEAAPSLIPYQILSWQPRALYFPQFATSEQCENIVKTAKERLKPSTLALRKGETAESTKGIRTSSGTFLSANEDPTETLAEIEKKIARATMLPRNHGEPFNVLRYNIGQRYASHYDAFDPAQYGPQKNQRVASFLLYLTDVEEGGETMFPYENSENMDIGYDYEKCIGLKVKPRKGDGLLFYSLMVNGTIDRTSLHGSCPVIKGEKWVATKWIRDNIV

SEQ ID NO: 5791 - protein, 239 aa, Zea mays subsp. mays
  peptide (1)..(239): Ceres Seq. ID no. 12409327
MPVPRERLLDAAWPEMPYGESGEAAPSLIPYQILSWQPRALYFPQFATSEQCENIVKTAKERLKPSTLALRKGETAESTKGIRTSSGTFLSANEDPTETLAEIEKKIARATMLPRNHGEPFNVLRYNIGQRYASHYDAFDPAQYGPQKNQRVASFLLYLTDVEEGGETMFPYENSENMDIGYDYEKCIGLKVKPRKGDGLLFYSLMVNGTIDRTSLHGSCPVIKGEKWVATKWIRDNIV

SEQ ID NO: 5792 - protein, 224 aa, Zea mays subsp. mays
  peptide (1)..(224): Ceres Seq. ID no. 12409328
MPYGESGEAAPSLIPYQILSWQPRALYFPQFATSEQCENIVKTAKERLKPSTLALRKGETAESTKGIRTSSGTFLSANEDPTETLAEIEKKIARATMLPRNHGEPFNVLRYNIGQRYASHYDAFDPAQYGPQKNQRVASFLLYLTDVEEGGETMFPYENSENMDIGYDYEKCIGLKVKPRKGDGLLFYSLMVNGTIDRTSLHGSCPVIKGEKWVATKWIRDNIV

SEQ ID NO: 5793 - DNA, 1100 bp, Zea mays subsp. mays
  misc_feature (1)..(1100): Ceres Seq. ID no. 12381112
  misc_feature (1)..(1100): Ortholog of  Ceres SEQ ID NO 15172903 as cited in SEQ ID NO 51839
  misc_feature (1)..(1100): Ortholog of  Ceres SEQ ID NO 15177108 as cited in SEQ ID NO 52015
  misc_feature (1)..(1100): Ortholog of  Ceres SEQ ID NO 13638595 as cited in SEQ ID NO 52050
  misc_feature (1)..(1100): Ortholog of  Ceres SEQ ID NO 13594748 as cited in SEQ ID NO 52114
  misc_feature (1)..(1100): Ortholog of  Ceres SEQ ID NO 15170313 as cited in SEQ ID NO 59293
  misc_feature (1)..(1100): Ortholog of  Ceres SEQ ID NO 12623490 as cited in SEQ ID NO 61136
  misc_feature (1)..(1100): Ortholog of  Ceres SEQ ID NO 14301870 as cited in SEQ ID NO 61501
  misc_feature (1)..(1100): Ortholog of  Ceres SEQ ID NO 15173596 as cited in SEQ ID NO 63267
  misc_feature (1)..(1100): Ortholog of  Ceres SEQ ID NO 12583993 as cited in SEQ ID NO 68098
  misc_feature (1)..(1100): Ortholog of  Ceres SEQ ID NO 13654535 as cited in SEQ ID NO 68227
atcttaacagccaggaagctggcgtcttgcttgtccttgttcttttcccacccggctacccccgtcgtcgccgccgctttccccgtggtttcagagctcgagtcggctagctaggccgcctggctaatctccctgccttctataagtacaggttcattgtgtgctgtgctcccagctccatcactgacacaagagagcacgctactactcatcactcgccaacgtgcagagatcagggaggcggcacactccatccactgaccgctcatggcgaaggtccacctctacgtcgccgcggcctgcgccgtcgtcctcgcgctcgccgccccggccctcgccggcgaccccgacatgctgcaggacgtctgcccggctgactacgcctccccggtgaagctgaacgggttcgcgtgcaaggcgaacttttcggcggacgacttcttcttcgacgggctgaggaaccccggcaacaccaacaacccggcgggctccgtggtgacggcggccaacgtggagaagttcccgggcgtgaacacgctgggcgtctccatggcgcgcatcgactacgcgccgggcggccagaacccgccgcacacgcacccgcgcgccaccgagatcatcttcgtcctcgagggcacgctcgaggtcggcttcatcaccaccgccaacgcgctcttcaccaagaccgtcaccaagggcgacgtcttcgtcttcccgcgcggcctcgtccacttccagcagaacaggggccacggccccgccgccgtcgtcgccgccttcaacagccagctccagggcacgcaggccatcgccatgacgctcttcggcgccgtgccgcccgtgccctccgacatcctcgccaaggccttccgcatcagcagcggcgaggtggaccacatcaaggccaacttcgcgcccaagtagagatccaatgtctgcattcccttgattttctcaataataaatccccgcggtgtgcagttcgatttgttcgtcttcggttggtttggttcgagacattgctgaccacgcttgttactgctaatttgtgcggagcggagttgcttgnnctccgataaataatcaattctatcgtcgtc

SEQ ID NO: 5794 - protein, 218 aa, Zea mays subsp. mays
  peptide (1)..(218): Ceres Seq. ID no. 12381113
MAKVHLYVAAACAVVLALAAPALAGDPDMLQDVCPADYASPVKLNGFACKANFSADDFFFDGLRNPGNTNNPAGSVVTAANVEKFPGVNTLGVSMARIDYAPGGQNPPHTHPRATEIIFVLEGTLEVGFITTANALFTKTVTKGDVFVFPRGLVHFQQNRGHGPAAVVAAFNSQLQGTQAIAMTLFGAVPPVPSDILAKAFRISSGEVDHIKANFAPK

SEQ ID NO: 5795 - protein, 190 aa, Zea mays subsp. mays
  peptide (1)..(190): Ceres Seq. ID no. 12381114
MLQDVCPADYASPVKLNGFACKANFSADDFFFDGLRNPGNTNNPAGSVVTAANVEKFPGVNTLGVSMARIDYAPGGQNPPHTHPRATEIIFVLEGTLEVGFITTANALFTKTVTKGDVFVFPRGLVHFQQNRGHGPAAVVAAFNSQLQGTQAIAMTLFGAVPPVPSDILAKAFRISSGEVDHIKANFAPK

SEQ ID NO: 5796 - protein, 124 aa, Zea mays subsp. mays
  peptide (1)..(124): Ceres Seq. ID no. 12381115
MARIDYAPGGQNPPHTHPRATEIIFVLEGTLEVGFITTANALFTKTVTKGDVFVFPRGLVHFQQNRGHGPAAVVAAFNSQLQGTQAIAMTLFGAVPPVPSDILAKAFRISSGEVDHIKANFAPK

SEQ ID NO: 5797 - DNA, 787 bp, Zea mays subsp. mays
  misc_feature (1)..(787): Ceres Seq. ID no. 12340788
  misc_feature (1)..(787): Ortholog of  Ceres SEQ ID NO 14306299 as cited in SEQ ID NO 56895
gaccgaccaagaaccagcatgaagccactggtggcgcgcctgctcctctgctactccctgctctggctggcgcccgcggcagccccgctacgcctgcagcacgatcatgtccggggccacggccacggccacggccacgcccacccgcctccgtacgcgcgtaacgcgacggcgtacggcgtctcggcggcgctgtgcccgggctgcggcgcgtgggcggacgcgctggagttcctctactaccacaacctggtgcggctggcgtcgctggagccgccgctggcgtggtccccgcgcctggcgtcgtacgcgggctggtgggcggcgcagcgccgcggggactgcgcgctgcgccactccttccccgacggccagttcgcgctcggggagaacgtcttctggggcgggcccggcggcgcgtggcggccccgggacgccgtcgcggactgggccgccgagggcgccgactactcgtacgccgaccaacncgtgcgcgccaggccgggagtgcgcgcactacacccagatcgtgtggcgacgcaccaccgccgntcgtgcgcccgggtggcgtgcgacggcggcggggtgttcatcacctgcaactactacccgcccggcaacgtcgtcggcgagaggccgtactaactagctagcttagcagctcagtaccctcggcctcggggatttattacgtgacgtggcgaacggcctcgtgtagccgtgtcgtgtgtaaataatattcagcggtcgttccggtgaacatgatggtaattcactcgaggttttc

SEQ ID NO: 5798 - protein, 214 aa, Zea mays subsp. mays
  peptide (1)..(214): Ceres Seq. ID no. 12340789
  misc_feature (163)..(163): Xaa is any aa, unknown or other
  misc_feature (184)..(184): Xaa is any aa, unknown or other
DRPRTSMKPLVARLLLCYSLLWLAPAAAPLRLQHDHVRGHGHGHGHAHPPPYARNATAYGVSAALCPGCGAWADALEFLYYHNLVRLASLEPPLAWSPRLASYAGWWAAQRRGDCALRHSFPDGQFALGENVFWGGPGGAWRPRDAVADWAAEGADYSYADQXVRARPGVRALHPDRVATHHRXSCARVACDGGGVFITCNYYPPGNVVGERPY

SEQ ID NO: 5799 - protein, 208 aa, Zea mays subsp. mays
  peptide (1)..(208): Ceres Seq. ID no. 12340790
  misc_feature (157)..(157): Xaa is any aa, unknown or other
  misc_feature (178)..(178): Xaa is any aa, unknown or other
MKPLVARLLLCYSLLWLAPAAAPLRLQHDHVRGHGHGHGHAHPPPYARNATAYGVSAALCPGCGAWADALEFLYYHNLVRLASLEPPLAWSPRLASYAGWWAAQRRGDCALRHSFPDGQFALGENVFWGGPGGAWRPRDAVADWAAEGADYSYADQXVRARPGVRALHPDRVATHHRXSCARVACDGGGVFITCNYYPPGNVVGERPY

SEQ ID NO: 5800 - protein, 180 aa, Zea mays subsp. mays
  peptide (1)..(180): Ceres Seq. ID no. 12340791
  misc_feature (128)..(128): Xaa is any aa, unknown or other
  misc_feature (149)..(149): Xaa is any aa, unknown or other
MSGATATATATPTRLRTRVTRRRTASRRRCARAAARGRTRWSSSTTTTWCGWRRWSRRWRGPRAWRRTRAGGRRSAAGTARCATPSPTASSRSGRTSSGAGPAARGGPGTPSRTGPPRAPTTRTPTNXCAPGRECAHYTQIVWRRTTAXRAPGWRATAAGCSSPATTTRPATSSARGRTN

SEQ ID NO: 5801 - DNA, 1835 bp, Zea mays subsp. mays
  misc_feature (1)..(1835): Ceres Seq. ID no. 12409321
  misc_feature (1)..(1835): Ortholog of  Ceres SEQ ID NO 15178460 as cited in SEQ ID NO 66107
gcacgagaccattacctagaacatcctaatcgaaaaaacccacccgcacggcaccaccaccaatccatccatccttacgcattagctacactccccggcgtcgagcccccgggaaccctagaccgccgccctcgcatctccgctcgtcgccgcggggtactccctccacccgtctggtgggagtcgcggcgggacgtccccgatccgagctctctccgccttagggtttttggggccggccatggactccatggagcagccggagcccaaaaccgcgggccactactacgcccttcaggttggctccgttttcctgacgggctactacaacgtcctgacgaaccagccgcacctggcgaaccagttctacacggacaacagcagtgttgttagactggactgcgagacgggtcggtggtcgtttggagagacggtggaggttatcaatgatatgatgatgtccatgaaactaagcaaggttgaggttaaaacagcgaatttcttagagtcatgggctggggcgattacgctgttggttactggcctagtgaaattgaagcactaccctgttcgcaagcgatttgctcagaatattgttcttgctccaaaggaagatagatattttatattcagtgacatctttaagctcatttgtgatgagtatgatgatcagtacccttttgctgattacaattgtgctgacaacatgccccaagtggaagcgtcttacacaatggctgaaatagggtctgattatttggatggagaacctgaggcacaggagactgttgatcctgctgaaaatcatgtgcagcaccaagattatttggaatataaggctggcaatgtgattgatgatgaaactcatttggaagagcatattcccccattccccagttcaacggatgttaaaagggattcacctcttgctcttccccaccctccatcacctaccctcgaagaacctgtggaagaagcacccaagacatatgcttcagtgttgcgaacgaaatcaaaggcaacgctggcgattacagagtcacagcaggctcaacagctggcccagcagccacagtctgcctcagtgcatgaaaagtctaacctggacaaccaccgggatgttagcgtccctgaggatgaagaagagtttctttcggtttatgttgggaatctttcgccatctacttcggtctttgatcttgagaaagtgttccaggcttttggaagaattaaacctgatggagttgctatccgaagccgcaaggaggctggagtattctttggctttgttgagttcgaagacatgtctggtattcagaatgctttaagtgcatctccagtagagttaaatggccgttttgttcatgttgaagagaggaggcctaactgcggattccctcgtggaagaagaggccgtggaagagctgatttctcaagggaccaagctggtgggagatacgacggggagtatgctactcgatcgaaaggaattgggcaccagaaaaaaactggacgccagtatgactactagttatgtacccgctctgctggtaaatggccgtgtaccattggtattctctacttggtgctgttctggccataattttgctaaaagtcacaatgatgtcgggactagtatttctgctttgttgacattcggcggagtcttttttgggggatgggcatctgttaccattttgttgcgtcacagtagtttttggttctcagttaccgtgaccacttacaaatggatcatgctaccgtcggtgtcaaactttttaagcaatacctaggttgtacttgtaccgatgttaatagttggtattcttagattg

SEQ ID NO: 5802 - protein, 429 aa, Zea mays subsp. mays
  peptide (1)..(429): Ceres Seq. ID no. 12409322
MDSMEQPEPKTAGHYYALQVGSVFLTGYYNVLTNQPHLANQFYTDNSSVVRLDCETGRWSFGETVEVINDMMMSMKLSKVEVKTANFLESWAGAITLLVTGLVKLKHYPVRKRFAQNIVLAPKEDRYFIFSDIFKLICDEYDDQYPFADYNCADNMPQVEASYTMAEIGSDYLDGEPEAQETVDPAENHVQHQDYLEYKAGNVIDDETHLEEHIPPFPSSTDVKRDSPLALPHPPSPTLEEPVEEAPKTYASVLRTKSKATLAITESQQAQQLAQQPQSASVHEKSNLDNHRDVSVPEDEEEFLSVYVGNLSPSTSVFDLEKVFQAFGRIKPDGVAIRSRKEAGVFFGFVEFEDMSGIQNALSASPVELNGRFVHVEERRPNCGFPRGRRGRGRADFSRDQAGGRYDGEYATRSKGIGHQKKTGRQYDY

SEQ ID NO: 5803 - protein, 426 aa, Zea mays subsp. mays
  peptide (1)..(426): Ceres Seq. ID no. 12409323
MEQPEPKTAGHYYALQVGSVFLTGYYNVLTNQPHLANQFYTDNSSVVRLDCETGRWSFGETVEVINDMMMSMKLSKVEVKTANFLESWAGAITLLVTGLVKLKHYPVRKRFAQNIVLAPKEDRYFIFSDIFKLICDEYDDQYPFADYNCADNMPQVEASYTMAEIGSDYLDGEPEAQETVDPAENHVQHQDYLEYKAGNVIDDETHLEEHIPPFPSSTDVKRDSPLALPHPPSPTLEEPVEEAPKTYASVLRTKSKATLAITESQQAQQLAQQPQSASVHEKSNLDNHRDVSVPEDEEEFLSVYVGNLSPSTSVFDLEKVFQAFGRIKPDGVAIRSRKEAGVFFGFVEFEDMSGIQNALSASPVELNGRFVHVEERRPNCGFPRGRRGRGRADFSRDQAGGRYDGEYATRSKGIGHQKKTGRQYDY

SEQ ID NO: 5804 - protein, 359 aa, Zea mays subsp. mays
  peptide (1)..(359): Ceres Seq. ID no. 12409324
MMMSMKLSKVEVKTANFLESWAGAITLLVTGLVKLKHYPVRKRFAQNIVLAPKEDRYFIFSDIFKLICDEYDDQYPFADYNCADNMPQVEASYTMAEIGSDYLDGEPEAQETVDPAENHVQHQDYLEYKAGNVIDDETHLEEHIPPFPSSTDVKRDSPLALPHPPSPTLEEPVEEAPKTYASVLRTKSKATLAITESQQAQQLAQQPQSASVHEKSNLDNHRDVSVPEDEEEFLSVYVGNLSPSTSVFDLEKVFQAFGRIKPDGVAIRSRKEAGVFFGFVEFEDMSGIQNALSASPVELNGRFVHVEERRPNCGFPRGRRGRGRADFSRDQAGGRYDGEYATRSKGIGHQKKTGRQYDY

SEQ ID NO: 5805 - DNA, 1519 bp, Zea mays subsp. mays; identical to SEQ ID NO: 3353
  misc_feature (1)..(1519): Ceres Seq. ID no. 13577756
  misc_feature (1)..(1519): Ortholog of  Ceres SEQ ID NO 14314925 as cited in SEQ ID NO 57985
  misc_feature (1)..(1519): Ortholog of  Ceres SEQ ID NO 13591365 as cited in SEQ ID NO 62720

SEQ ID NO: 5806 - protein, 273 aa, Zea mays subsp. mays; identical to SEQ ID NO: 3354
  peptide (1)..(273): Ceres Seq. ID no. 13577757

SEQ ID NO: 5807 - protein, 214 aa, Zea mays subsp. mays; identical to SEQ ID NO: 3355
  peptide (1)..(214): Ceres Seq. ID no. 13577758

SEQ ID NO: 5808 - protein, 192 aa, Zea mays subsp. mays; identical to SEQ ID NO: 3356
  peptide (1)..(192): Ceres Seq. ID no. 13577759

SEQ ID NO: 5809 - DNA, 1418 bp, Zea mays subsp. mays
  misc_feature (1)..(1418): Ceres Seq. ID no. 13564606
  misc_feature (1)..(1418): Ortholog of  Ceres SEQ ID NO 13594117 as cited in SEQ ID NO 57050
gcacgagaccattacctagaacatcytaatcgaaaaacaagagtagggagtggtgcgagaaatcaatccgccccatgcccacatccgtcgccacccacgcaaccctcctcatcaaagccgcagccgccaagcccttcttctcsccccgcccggcggcccggatccccgccccttctcctcaccctcctcccccgcccgccggccgccgcctgccgaacacggcggccgctctcgccgccgcagcccgtcggttccggtggccgtcggcggccgcgtcggcgcgggggctgtgcgcgccgccgcattccggcggcgaggggatgggatctgatgcgggggcgggggccaggaagaggcgggacccggccgtgaacgggctcgccaaggacgtgccgccagtgaacgggatgatgatgcccaaggaggagccggcgaccgcgccgcccaggttgctcacgctgcccaccgtgctcaccattggccgcgtcgctgctgtgccgcttctgatcagcactttctacatggagggtccatgggcagctacggccacaacaggcatctttcttgctgctgcagtcactgattggctagatggttatatcgctagaaagatgcagctaggaacaccttttggtgcatttcttgatcctgtggctgacaagcttatggtagccgcaacattagttttactatgcaccaaacctttggaaacatcactgctcaatgatgggccatggcttctaacagtcccttccattgctatcattgggagagagattacaatgtcagctgtgagagaatgggccgcatctcagaatagtgaagctcttgaggctgttgcagttaacaacttagggaagtggaagacagcaacgcagatgacagcattgactctgcttctcgccagcagagacccaagtgtacctgcgcaaggtgctctagttgcccccggtgttgctctactttacatttccgctggactcgccatatggtccctagtggtgtacatgagaaagatatggcggatacttctaaaatagtattagcacaatatatatagtgtagtagaagaaacagaagcaaggcgaggttctattcgtgatcgtacgatttttggaaggctgcttagttgattggtggactgggacctagagctgcttgtgatcctcattcctcagtaacttgtgcgtcatctatttttgccgccaaatttgctgaagtatgccaggattctagacatgatgtgaccctgcgtgcttaaggagacataagtctgcaatgcagaagattgtaacccaatacaaacacaaaacccggaggtttgtgcatgtggagttctatcattgtaatctgcacataatatcatatgccaggagcatgcaattattcttttcagtggggacgatatccctgtctcc

SEQ ID NO: 5810 - protein, 321 aa, Zea mays subsp. mays
  peptide (1)..(321): Ceres Seq. ID no. 15222577
  misc_feature (23)..(23): Xaa is any aa, unknown or other
MPTSVATHATLLIKAAAAKPFFXPRPAARIPAPSPHPPPPPAGRRLPNTAAALAAAARRFRWPSAAASARGLCAPPHSGGEGMGSDAGAGARKRRDPAVNGLAKDVPPVNGMMMPKEEPATAPPRLLTLPTVLTIGRVAAVPLLISTFYMEGPWAATATTGIFLAAAVTDWLDGYIARKMQLGTPFGAFLDPVADKLMVAATLVLLCTKPLETSLLNDGPWLLTVPSIAIIGREITMSAVREWAASQNSEALEAVAVNNLGKWKTATQMTALTLLLASRDPSVPAQGALVAPGVALLYISAGLAIWSLVVYMRKIWRILLK

SEQ ID NO: 5811 - protein, 239 aa, Zea mays subsp. mays
  peptide (1)..(239): Ceres Seq. ID no. 15222578
MGSDAGAGARKRRDPAVNGLAKDVPPVNGMMMPKEEPATAPPRLLTLPTVLTIGRVAAVPLLISTFYMEGPWAATATTGIFLAAAVTDWLDGYIARKMQLGTPFGAFLDPVADKLMVAATLVLLCTKPLETSLLNDGPWLLTVPSIAIIGREITMSAVREWAASQNSEALEAVAVNNLGKWKTATQMTALTLLLASRDPSVPAQGALVAPGVALLYISAGLAIWSLVVYMRKIWRILLK

SEQ ID NO: 5812 - protein, 210 aa, Zea mays subsp. mays
  peptide (1)..(210): Ceres Seq. ID no. 15222579
MMMPKEEPATAPPRLLTLPTVLTIGRVAAVPLLISTFYMEGPWAATATTGIFLAAAVTDWLDGYIARKMQLGTPFGAFLDPVADKLMVAATLVLLCTKPLETSLLNDGPWLLTVPSIAIIGREITMSAVREWAASQNSEALEAVAVNNLGKWKTATQMTALTLLLASRDPSVPAQGALVAPGVALLYISAGLAIWSLVVYMRKIWRILLK

SEQ ID NO: 5813 - DNA, 1140 bp, Zea mays subsp. mays
  misc_feature (1)..(1140): Ceres Seq. ID no. 12409319
  misc_feature (1)..(1140): Ortholog of  Ceres SEQ ID NO 14301475 as cited in SEQ ID NO 62936
  misc_feature (1)..(1140): Ortholog of  Ceres SEQ ID NO 12619999 as cited in SEQ ID NO 66123
  misc_feature (1)..(1140): Ortholog of  Ceres SEQ ID NO 13656436 as cited in SEQ ID NO 69154
agtcccagacgaaacaagcctggtggtagtgggtaccttgccgttgcccggcctggccggctggccctcgtgtgcgttcctcgctcgatctccctccttcggtcaaaagccaacatgacaacacacgagtctgggtagctgtcccccgcgcggctcgccccctcgctcctcggcgccgctgccggcccgcgcctgcgcctgcggctcgcgccctctatacctccgcccgcccgtccccctcgtgccgctctgcctgccccccgcattccgcgccgcctcgccaccgaactgggaggaatctgcggggaagggggatatggggtcgccgggtgcggggagcagcggcggccacgagtgctccttcaagttcctcctcatcggggactcgggcgtcggcaagagcagcctcctcgtcagcttcgtcgccgcctcctacctcgacggcgacatcgcccccaccatcggtgtggattttaaaatcaagttccttacagttggtggaaagaaactaaagttgacaatatgggatactgctggccaggagaggtttaggacaattactagttcttactacagaggtgctcagggaattattctagtatatgatgtcacaaagagagaaagtttctcaaatttggctgatgtttggactaaggaaatagaagcaaactcaacaaacaaagactgcataaaaatgcttgttggaaacaaagttgacaaggatgatgaaagaatggtcacaaaagaggaaggtcttgcttttgctgaagaatatggatgtctgtttcttgagagcagtgcaaaaacacgagaaaacgttgagaaatgttttgaggaacttgcattgaagattcttgaggtgcctagtctcctagaggaagggtcttcttcggttgtcaagaggaacatcctgaaacagaagcaggaaagtgatgcaaagaacggtagtggatgctgtcaatagatgtatgtgctgatccacaccacacggttggctttcttcgtgtgagctgccctgattgtctgctgtacatgttcttgtgagtaagaagggcgagcataattgatttgtacaaaggacatgtcagtttggtgtcatagttttcctcatctccagtttagtatagcaattttgttgtc

SEQ ID NO: 5814 - protein, 215 aa, Zea mays subsp. mays
  peptide (1)..(215): Ceres Seq. ID no. 12409320
MGSPGAGSSGGHECSFKFLLIGDSGVGKSSLLVSFVAASYLDGDIAPTIGVDFKIKFLTVGGKKLKLTIWDTAGQERFRTITSSYYRGAQGIILVYDVTKRESFSNLADVWTKEIEANSTNKDCIKMLVGNKVDKDDERMVTKEEGLAFAEEYGCLFLESSAKTRENVEKCFEELALKILEVPSLLEEGSSSVVKRNILKQKQESDAKNGSGCCQ

SEQ ID NO: 5815 - DNA, 1968 bp, Zea mays subsp. mays
  misc_feature (1)..(1968): Ceres Seq. ID no. 12362596
  misc_feature (1)..(1968): Ortholog of  Ceres SEQ ID NO 15179094 as cited in SEQ ID NO 0
gcacgagaccattacctagaacatcctaatcaaaacccgactccctcggctgcctcccgcagccgcccgctgctccggtccttccgaacgctggcctgttcttccctgcctttggcccattcgtcaggcggcccctccgcaggcgacgcaggcgcggtcacgacggcgcgtggccccgactacgtagacagctaaccggtctccgcctccggcccttctcctgtcgcccgattgagtcgctgctgcaactgccaacttcacccccggcgagctcaccacagtcttccggaaaggtgctatcaatttggaagatggcagatgaggagcaggccccaagctctaggaaaagggttgcaggtactcaaatcaacaaggataatccggaacctgatgatgaaggaacagaacaagagatgggtacatttaagaaagctactgaagaagttatggcaacacggaggattgtaaaggttcggcgccagcagacgtcatcagcttcttctaaccctttctctgcaatcagatttgcccccactgattctagtgctcaaacaagtgctcctgtcccagaggtccaaccttcagatgtcaaagttgacgagggaagcaatggtagcgggaaagatactttgtctctgcccgacaagactgctggctctggggtaaatacggactctagtgcctcaactgaagcaccacctcagcctgttgaaaccagtgacaaggcagaagacacaaaggacgaatctagtggagacaaagtggtagttggagaacccaatgaaggcagttgcatgccatctgaagttgagggcaaaacaaaagagggagatgctgaagaaaaggaaaggacagatgaagctggaaatatcgataaaattagcaaggatgacactgggaagaaagatggagatgacactgagaagaaagatggaggtgatgatactggaggtgaatcagagcagaaagggcaaacaccatcagcaacaccccttttctcgtttaagaatctgtcaagtggtcaaaatgctttcacaggtctgaccggaactggattttcaagcacatcattctcgtttggctcagcctctaaagatggctcaagtgctggtcccctatttgggctgaaagctgatggttcttcgttcccttcttttaatcttggtgctgccaccaatgggggttctgccacagctcttgctacttcagcagaggcacccaagatgtttgctatgacagagggccctgtcgaaaccggtgaagaaaatgagaaggctgtattcagcgctgattctgctttgtacgagtacttagatgggggctggaaagaaagaggaaaaggtgaactgaagctgaacgtccccgtatctgggggcgagcgagcccggcctcgtcatgaggacaaaaggcaactaccggctggtcctgaatgcaagcctctacaacgacatgtcgctcaaggacatggacaagaagggcgtgacatttgcctgtatgaacagcattggggagtcgccgagcagcctcgctacatttgctctgaagttcaaggacacggccaccagggaggaattcaaggatgcggtggagtctcacaagacaagcaaggcacaggaactgccgctgaagacgcccgagaactctccgaaggcagcagaagtctgaagccgcacccgagtcacgcttgctcgtgtcttttgtacgtgtccaggaaggaaggaactgagagagtttctgttgttgcggagtttttaagaatgtcgcgtcatgacatatgatgtcctgagttgtattttgcgtacgggttccctggtgctgtttttgggaacttaccattactacaggcgcataatcttgggatcctggacaagggactcgttttatctatttgctcgtcttgtgctccgttatgttctatcggttaagttgcgcgtgacgctattatgtcatgaataaatgtatgcaatt

SEQ ID NO: 5816 - protein, 488 aa, Zea mays subsp. mays
  peptide (1)..(488): Ceres Seq. ID no. 12362597
MADEEQAPSSRKRVAGTQINKDNPEPDDEGTEQEMGTFKKATEEVMATRRIVKVRRQQTSSASSNPFSAIRFAPTDSSAQTSAPVPEVQPSDVKVDEGSNGSGKDTLSLPDKTAGSGVNTDSSASTEAPPQPVETSDKAEDTKDESSGDKVVVGEPNEGSCMPSEVEGKTKEGDAEEKERTDEAGNIDKISKDDTGKKDGDDTEKKDGGDDTGGESEQKGQTPSATPLFSFKNLSSGQNAFTGLTGTGFSSTSFSFGSASKDGSSAGPLFGLKADGSSFPSFNLGAATNGGSATALATSAEAPKMFAMTEGPVETGEENEKAVFSADSALYEYLDGGWKERGKGELKLNVPVSGGERARPRHEDKRQLPAGPECKPLQRHVAQGHGQEGRDICLYEQHWGVAEQPRYICSEVQGHGHQGGIQGCGGVSQDKQGTGTAAEDARELSEGSRSLKPHPSHACSCLLYVSRKEGTERVSVVAEFLRMSRHDI

SEQ ID NO: 5817 - protein, 454 aa, Zea mays subsp. mays
  peptide (1)..(454): Ceres Seq. ID no. 12362598
MGTFKKATEEVMATRRIVKVRRQQTSSASSNPFSAIRFAPTDSSAQTSAPVPEVQPSDVKVDEGSNGSGKDTLSLPDKTAGSGVNTDSSASTEAPPQPVETSDKAEDTKDESSGDKVVVGEPNEGSCMPSEVEGKTKEGDAEEKERTDEAGNIDKISKDDTGKKDGDDTEKKDGGDDTGGESEQKGQTPSATPLFSFKNLSSGQNAFTGLTGTGFSSTSFSFGSASKDGSSAGPLFGLKADGSSFPSFNLGAATNGGSATALATSAEAPKMFAMTEGPVETGEENEKAVFSADSALYEYLDGGWKERGKGELKLNVPVSGGERARPRHEDKRQLPAGPECKPLQRHVAQGHGQEGRDICLYEQHWGVAEQPRYICSEVQGHGHQGGIQGCGGVSQDKQGTGTAAEDARELSEGSRSLKPHPSHACSCLLYVSRKEGTERVSVVAEFLRMSRHDI

SEQ ID NO: 5818 - protein, 443 aa, Zea mays subsp. mays
  peptide (1)..(443): Ceres Seq. ID no. 12362599
MATRRIVKVRRQQTSSASSNPFSAIRFAPTDSSAQTSAPVPEVQPSDVKVDEGSNGSGKDTLSLPDKTAGSGVNTDSSASTEAPPQPVETSDKAEDTKDESSGDKVVVGEPNEGSCMPSEVEGKTKEGDAEEKERTDEAGNIDKISKDDTGKKDGDDTEKKDGGDDTGGESEQKGQTPSATPLFSFKNLSSGQNAFTGLTGTGFSSTSFSFGSASKDGSSAGPLFGLKADGSSFPSFNLGAATNGGSATALATSAEAPKMFAMTEGPVETGEENEKAVFSADSALYEYLDGGWKERGKGELKLNVPVSGGERARPRHEDKRQLPAGPECKPLQRHVAQGHGQEGRDICLYEQHWGVAEQPRYICSEVQGHGHQGGIQGCGGVSQDKQGTGTAAEDARELSEGSRSLKPHPSHACSCLLYVSRKEGTERVSVVAEFLRMSRHDI

SEQ ID NO: 5819 - DNA, 1366 bp, Zea mays subsp. mays
  misc_feature (1)..(1366): Ceres Seq. ID no. 12435021
  misc_feature (1)..(1366): Ortholog of  Ceres SEQ ID NO 14308389 as cited in SEQ ID NO 55226
  misc_feature (1)..(1366): Ortholog of  Ceres SEQ ID NO 13597162 as cited in SEQ ID NO 63955
  misc_feature (1)..(1366): Ortholog of  Ceres SEQ ID NO 14308049 as cited in SEQ ID NO 66203
  misc_feature (1)..(1366): Ortholog of  Ceres SEQ ID NO 14313292 as cited in SEQ ID NO 67393
  misc_feature (1)..(1366): Ortholog of  Ceres SEQ ID NO 14313567 as cited in SEQ ID NO 68074
cttcttctcgccgggcgtcctcagtgctgccctgtccaaggcgctcgtccgcttctaccccctcgccggccggctcgcgcaggacggcgccggccgcccgcagatccactgcaccggagaaggcgcgctcctcgtcaccgcgcgcgccgacgctaccctccaggacacccccggcgggttcgccccgtcggatgagctgcggcagatgcttgtcccctcggctgccgacggcgaagaccgcgccggcatcttggccatgttccaggtgacgtccttcaagtgcggcggggtgtgcgtgggcgcggcgatccaccacacggcggcggacggcctagcggcgctcgacttcgtcaacacgtgggccgccatcgcgagcaagggcgtcgacgaggccgcgccggcgccgcgcccgtggctggaccgcacgctgctccgcgcgcgctcccctcccgacgtgcgcttcgaccacagcgagtactccccgcggggcggcggcggtccaaagacggcgagggtcccgttcgactccgccatcctacccatgtccaagacccaggtggacgcgctcagggccggcaagaaggtgtccacgttcaaggccgtggtcgcccacgtgtggcggtgcgcgtgcatagcgcgcgggctcgcgggagacgaggacacccgtctgtacatgaccgccgacgcgcgctcccgcgtccgcccgccgctcccggaaggctacctcggcaacgccatcttccgcgcgtcagcggtggccacggcgggcgacgtcgtctccgagcagctcgacgccgttgcgggtagggtgtccggcgccaccgcccggctggacgacgagtacgtccgatcgctggtggactacctggagcaggtggtgggcgatgtggcggggctccgcaagggggagtgggtgatgccggagaccgacctgtgggtgataagctggcaggggctgcccatctacgacgccgacttcggctggggacggccggcgttcatgggccgcgcgtgcctccagttcagcggcctcgtgtacctcgtcccgggcccggacggcgacggccgcctcgacgtcgtcgtggccatggagcccaagagcctggccagattcaaggagctgttgtacgagctcaaaggtgcaggtgttccgtgcacggcagactgagctgctgcattccgtgcaggttccttagcttgctaccggctggcaaaacgaaaacctgtttgccggattgttccttgcattgcgtatctacttcgacctttactgcagtactcctagttttctactcgttgcttttgatggcaatctggtgagtactgtactctatatgcatttacatggctatctatattcggagcg

SEQ ID NO: 5820 - protein, 388 aa, Zea mays subsp. mays
  peptide (1)..(388): Ceres Seq. ID no. 12435022
FFSPGVLSAALSKALVRFYPLAGRLAQDGAGRPQIHCTGEGALLVTARADATLQDTPGGFAPSDELRQMLVPSAADGEDRAGILAMFQVTSFKCGGVCVGAAIHHTAADGLAALDFVNTWAAIASKGVDEAAPAPRPWLDRTLLRARSPPDVRFDHSEYSPRGGGGPKTARVPFDSAILPMSKTQVDALRAGKKVSTFKAVVAHVWRCACIARGLAGDEDTRLYMTADARSRVRPPLPEGYLGNAIFRASAVATAGDVVSEQLDAVAGRVSGATARLDDEYVRSLVDYLEQVVGDVAGLRKGEWVMPETDLWVISWQGLPIYDADFGWGRPAFMGRACLQFSGLVYLVPGPDGDGRLDVVVAMEPKSLARFKELLYELKGAGVPCTAD

SEQ ID NO: 5821 - protein, 320 aa, Zea mays subsp. mays
  peptide (1)..(320): Ceres Seq. ID no. 12435023
MLVPSAADGEDRAGILAMFQVTSFKCGGVCVGAAIHHTAADGLAALDFVNTWAAIASKGVDEAAPAPRPWLDRTLLRARSPPDVRFDHSEYSPRGGGGPKTARVPFDSAILPMSKTQVDALRAGKKVSTFKAVVAHVWRCACIARGLAGDEDTRLYMTADARSRVRPPLPEGYLGNAIFRASAVATAGDVVSEQLDAVAGRVSGATARLDDEYVRSLVDYLEQVVGDVAGLRKGEWVMPETDLWVISWQGLPIYDADFGWGRPAFMGRACLQFSGLVYLVPGPDGDGRLDVVVAMEPKSLARFKELLYELKGAGVPCTAD

SEQ ID NO: 5822 - protein, 303 aa, Zea mays subsp. mays
  peptide (1)..(303): Ceres Seq. ID no. 12435024
MFQVTSFKCGGVCVGAAIHHTAADGLAALDFVNTWAAIASKGVDEAAPAPRPWLDRTLLRARSPPDVRFDHSEYSPRGGGGPKTARVPFDSAILPMSKTQVDALRAGKKVSTFKAVVAHVWRCACIARGLAGDEDTRLYMTADARSRVRPPLPEGYLGNAIFRASAVATAGDVVSEQLDAVAGRVSGATARLDDEYVRSLVDYLEQVVGDVAGLRKGEWVMPETDLWVISWQGLPIYDADFGWGRPAFMGRACLQFSGLVYLVPGPDGDGRLDVVVAMEPKSLARFKELLYELKGAGVPCTAD

SEQ ID NO: 5823 - DNA, 1034 bp, Zea mays subsp. mays
  misc_feature (1)..(1034): Ceres Seq. ID no. 12349099
  misc_feature (1)..(1034): Ortholog of  Ceres SEQ ID NO 13585222 as cited in SEQ ID NO 68696
tccttcccccttccccgcttcgacaagtctcgtcccccgcccccttattccattacgagcaactccgccgccgccgccgtaaagccatctcccccatccgccgccgccgccaccgctgctggtgggacgggccgtgcgcccgttccagcgaagaggatcagcgggtcggaggagccgccggcgaggtcgggccgcgggggatcgagatggtgctgtgggagctcacggccatcaccgcctacttcctcgggctgaggcgcacctaccgcctcgcgctccgcatccagcgccgcctcatcccgcccaaccaccccaggatccgggacttcgtctacaggcgcacacgggatgtcttcaacgtcgcagtgtcggtccacaagaacattcagcagagagacatagaggtcggccggaacctcggaaacgcgatccttcgctggcttgatcgcatgaagccatcagcggagatccgcccccgtcttccaggcccaccaaacggcagcacggccgagcagttcagacatgtatcgagcgcgagcaggggcgcgggggcacagaagacctcctcctcctccaaagcttcgccccacgactccagcgggaagatgctgttctcgcgcctcaacattgggcccaagcacttcccggttctgcccacgctagcacagcccaacaggatcagcgcgagcagccagtgcaggcgcttctcctactcctacgccccgttcccgtcggtcactgccaggaggaagggtgtcttccgcgaggacattgcacagctgatggtgtaaggatctaaaatacttgccagcgatctcgtgtactgtttttttgtttttggaacactggacttagtgatttgcccagatcagatgtctgatgtgtcttggtttaataataaagaagcgagcgagcgcaggggaaattgtcactgctgctgcggtttaggccattagatttgtaaccaaatgctcagatgaacagcatttcgtgtttggtaatgaacaccagaacatgtgcactcgtttatgtgc

SEQ ID NO: 5824 - protein, 262 aa, Zea mays subsp. mays
  peptide (1)..(262): Ceres Seq. ID no. 12349100
LPPSPLRQVSSPAPLFHYEQLRRRRRKAISPIRRRRHRCWWDGPCARSSEEDQRVGGAAGEVGPRGIEMVLWELTAITAYFLGLRRTYRLALRIQRRLIPPNHPRIRDFVYRRTRDVFNVAVSVHKNIQQRDIEVGRNLGNAILRWLDRMKPSAEIRPRLPGPPNGSTAEQFRHVSSASRGAGAQKTSSSSKASPHDSSGKMLFSRLNIGPKHFPVLPTLAQPNRISASSQCRRFSYSYAPFPSVTARRKGVFREDIAQLMV

SEQ ID NO: 5825 - protein, 194 aa, Zea mays subsp. mays
  peptide (1)..(194): Ceres Seq. ID no. 12349101
MVLWELTAITAYFLGLRRTYRLALRIQRRLIPPNHPRIRDFVYRRTRDVFNVAVSVHKNIQQRDIEVGRNLGNAILRWLDRMKPSAEIRPRLPGPPNGSTAEQFRHVSSASRGAGAQKTSSSSKASPHDSSGKMLFSRLNIGPKHFPVLPTLAQPNRISASSQCRRFSYSYAPFPSVTARRKGVFREDIAQLMV

SEQ ID NO: 5826 - DNA, 1462 bp, Zea mays subsp. mays
  misc_feature (1)..(1462): Ceres Seq. ID no. 12344135
  misc_feature (1)..(1462): Ortholog of  Ceres SEQ ID NO 13584646 as cited in SEQ ID NO 60715
tttttctcagccctctcagtctcacacaccacaccagagcagcgcagccgagcatgcactcatcacatcagctcctcgtctcctagctttcctattcctgccttgataattggccaattgttcgatctccttctttactaccccctttgctttcgttgctgctactactactgttccatctcctaggtttcgttgttgtccctgcaggccgccactgagtgatttgttagcagataagatttagatctcccagataaaaaaaagaggttgagaggagagctagcactaggcactagcaagcctgctgtgaggtgaatatggatccagtcgcagcatccatacacggtcatcatcttcctccaccgttcaacacccgggacttccatcaccatctccagcaacagcagcagcagctcaagaccgaggacgaccacggcagcggcgcgccaggactgttcggcagccgcggcaccaagggcgaccacgagaataatgaccagaacagtggaaacagcaacggaagtggcggaggaggaggcgacgagctggcgctggttccaccatccggcgccgggccagagggtggagagcccaccctacgccgcccgaaaggccggccggcggggtccaagaacaagccgaagccgcccatcatcatcacgagggacagcgccaacacgctccggacgcacgtcatggaggtggccagcggctgcgacatctccgagagcatcacggccttcgcgcgccgcaggcagcgcggggtctgcgtcctcagcggcgccggcaccgtgaccaacgtcaccctgcggcagccggcctcccagggcgcggtcgtcgccctccacggccttcgagatcctgtccctctccggctcctttctcccgccgcccgcgccgcccgaagccacggggctcaccgtctaccttgccggcggccaggggcaggtggtgggcggcagcgtcgtcggcgcgctgacagcagccggggccggtggtgataatggcggcatctttcgccaacgcggtgtacgagcggttgccgttggaggaggatgacatgctcgctgcgcaagcacaggccgacagtgcaggaattctcgcgggtgcgcagctcgccggcgctgtggatccaagcctcttccagggactgccaccgaacctgatgtgcaacgtgcagatgccgccagaagcagcctacggatggagcccgggcgccgccggtggccgtccggcgccgttctaataactgataagagcgcgcacgcggcttagatatggttaagtgatttagctttcttcttcgatcttttgcttgaatttttatcgtggagaatttccgtgggaattgcatatgatttcgcatgttaattagtaagctatcttaatactgtttcagaatatgtagctcgatttctgccatttcgtttcgctattccttgtgtcgtcgtaactcttgttc

SEQ ID NO: 5827 - protein, 227 aa, Zea mays subsp. mays
  peptide (1)..(227): Ceres Seq. ID no. 12344136
MDPVAASIHGHHLPPPFNTRDFHHHLQQQQQQLKTEDDHGSGAPGLFGSRGTKGDHENNDQNSGNSNGSGGGGGDELALVPPSGAGPEGGEPTLRRPKGRPAGSKNKPKPPIIITRDSANTLRTHVMEVASGCDISESITAFARRRQRGVCVLSGAGTVTNVTLRQPASQGAVVALHGLRDPVPLRLLSPAARAARSHGAHRLPCRRPGAGGGRQRRRRADSSRGRW

SEQ ID NO: 5828 - DNA, 1703 bp, Zea mays subsp. mays
  misc_feature (1)..(1703): Ceres Seq. ID no. 12405583
  misc_feature (1)..(1703): Ortholog of  Ceres SEQ ID NO 15171476 as cited in SEQ ID NO 55569
  misc_feature (1)..(1703): Ortholog of  Ceres SEQ ID NO 14312069 as cited in SEQ ID NO 59191
atcacaagcaatcgatcaagctagcatggcggtgaaggtgtgggtgttcgccgtggcactgatgatgtgcgctggtgtagggcttggagctgacgacgacggcggcagccgccttattagccgctgtcgtctgagctcgcccaactaccgcggcgccctggcaaaggccatcctcttcttcgaggggcagcggtcggggcggctgccggcaaaccagagagtcaggtggcgcggggactcggcgctcaccgagcggccaacccgaaaacgtgaacttgacgggtggctactacgacgccggagacaacgtcaagttcgggtttccccgatggcgttcagcgtcaccctcctgagctggagcgccgtcgagtaccgcgacgaggtggcggcggcgggtcagctccgccacctccggtccgccatccagtggggcgccgacttccttctccgtgcccacaccacgccgaccaccctctacactcaggttggcgacggcaacgccgaccaccaatgctgggagcggccagaggacatggacacgccgcggacgctgtacaagatcacccggagctcgcccgggtccgaggccgccggcgaggcggcggcagcgctcgccgccgcgtacctggtgttcagggacgaccgggacaagaccttagccacgcagctcctggccgcgtccagatccctcttcgacttcgcaaacgactacaggggatcctaccagttgtcctgcccattctactgctcctactcaggctaccaggacgagctccagtgggcgtcggcatggctctaccgggcaaccaaggacagcaagtacctcgacttcctgcagaacaaccagggcggcagcgccaccgagttcagctgggacaacaagtatcccggagctcagctgcttgcaacacaggagtacttggctggaaggacagcagctggaaggctacaagaggggcctggactcgttcgtctgcgccgtgatgcccaacagcggcaacacgcagatccgcaccacccctggagggcttctcttcacccgcgactccgttaacctgcagtacacaaccaccgccaccctgctgctgtcgatctacgcgaaggccctcctcgcttctgcagcaggagcagtccagtgcagcgccgcgaccttctctccggaccagatcagttcatttcgacgtcacaggtggactacatcctgggagacaaccccaggagcgcgtcctacatggtcggcttcagctccaagttcccgaggcgcatccaccaccgcggctcctccattccgtccatcaaggtcctcccccggaaggtcacctgcagcgagggcttctcgtcgtggttcccgacggccaaccccaaccccaacgtccacgtcggcgccatcgtcggcgggcccgacgggaacgaccagttcggcgacaacagggaggactccacgcactccgagccggcaacgtacatcaacgcggcatttgtgggcgcctgcgctgctgcactggggcgcagccagcaggtgcctgtggacgaaacagcctcagccccacagtgatgttatgtaactagctacaacggaggagtatgcaagggcgggcaaccaaaccatgatatcgctttgtgtaacatcccaaggcccctacccccactaccactcttgatcatcctgataagaagagataaataaataattaaatacaatg

SEQ ID NO: 5829 - protein, 350 aa, Zea mays subsp. mays
  peptide (1)..(350): Ceres Seq. ID no. 12405584
SQAIDQASMAVKVWVFAVALMMCAGVGLGADDDGGSRLISRCRLSSPNYRGALAKAILFFEGQRSGRLPANQRVRWRGDSALTERPTRKRELDGWLLRRRRQRQVRVSPMAFSVTLLSWSAVEYRDEVAAAGQLRHLRSAIQWGADFLLRAHTTPTTLYTQVGDGNADHQCWERPEDMDTPRTLYKITRSSPGSEAAGEAAAALAAAYLVFRDDRDKTLATQLLAASRSLFDFANDYRGSYQLSCPFYCSYSGYQDELQWASAWLYRATKDSKYLDFLQNNQGGSATEFSWDNKYPGAQLLATQEYLAGRTAAGRLQEGPGLVRLRRDAQQRQHADPHHPWRASLHPRLR

SEQ ID NO: 5830 - protein, 342 aa, Zea mays subsp. mays
  peptide (1)..(342): Ceres Seq. ID no. 12405585
MAVKVWVFAVALMMCAGVGLGADDDGGSRLISRCRLSSPNYRGALAKAILFFEGQRSGRLPANQRVRWRGDSALTERPTRKRELDGWLLRRRRQRQVRVSPMAFSVTLLSWSAVEYRDEVAAAGQLRHLRSAIQWGADFLLRAHTTPTTLYTQVGDGNADHQCWERPEDMDTPRTLYKITRSSPGSEAAGEAAAALAAAYLVFRDDRDKTLATQLLAASRSLFDFANDYRGSYQLSCPFYCSYSGYQDELQWASAWLYRATKDSKYLDFLQNNQGGSATEFSWDNKYPGAQLLATQEYLAGRTAAGRLQEGPGLVRLRRDAQQRQHADPHHPWRASLHPRLR

SEQ ID NO: 5831 - protein, 330 aa, Zea mays subsp. mays
  peptide (1)..(330): Ceres Seq. ID no. 12405586
MMCAGVGLGADDDGGSRLISRCRLSSPNYRGALAKAILFFEGQRSGRLPANQRVRWRGDSALTERPTRKRELDGWLLRRRRQRQVRVSPMAFSVTLLSWSAVEYRDEVAAAGQLRHLRSAIQWGADFLLRAHTTPTTLYTQVGDGNADHQCWERPEDMDTPRTLYKITRSSPGSEAAGEAAAALAAAYLVFRDDRDKTLATQLLAASRSLFDFANDYRGSYQLSCPFYCSYSGYQDELQWASAWLYRATKDSKYLDFLQNNQGGSATEFSWDNKYPGAQLLATQEYLAGRTAAGRLQEGPGLVRLRRDAQQRQHADPHHPWRASLHPRLR

SEQ ID NO: 5832 - DNA, 1109 bp, Zea mays subsp. mays
  misc_feature (1)..(1109): Ceres Seq. ID no. 13495270
  misc_feature (1)..(1109): Ortholog of  Ceres SEQ ID NO 13660094 as cited in SEQ ID NO 60820
  misc_feature (1)..(1109): Ortholog of  Ceres SEQ ID NO 13656436 as cited in SEQ ID NO 69154
aaaaatcccgacgcgaatcgcccagaacgcgaggcggaatttcccatcctcttggacccccccccccccccctctgttcttcctccttcccccgctcctcgtccacacgctccgctccgattccgcccgcgtccgcggacccagatccggcgcccgcgcccatggcgacgcgcaggcgaatgctcctcaaggtcatcatcctcggcgacagcggggtcggcaagacctcgctgatgaaccagtacgtcaacaacaggttcagcaaccagtacaaggccaccatcggcgcggatttcctcaccaaggaggtccagatcgacgaccgcctcttcacactgcagatatgggatacggcaggacaggagcggtttcaaagtcttggtgtggcattttataggggagctgactgctgtgttcttgtatatgatgtcaacgtatccaagtcatttgaaaagctcaacaactggcgtgaggaattcctaattcaagccagcccatcagacccagagaatttcccatttgttgtgcttggtaacaagatcgatgttgatggtggtaacagccggactgtttctgagaagaaggctaaagcatggtgtgcttcaaagggaaacatcccctactttgagacgtcggctaaagagggcttcaatgtagaggctgcatttgagtgtatagcgaggaatgctgtaaaaaatgagccagaagaagatatgtatcttcctgatacgattgatgttgggggcgctggaaggcaacagcgttcgtcaggttgtgaatgctagaagatatggagcactgcgaattgctcggttggttggtctgattctctagggcttgttgtttgggtggcctgtgtcatcatttcatatatgtatttagtttgcaaaactgctatttgtggacactggatagtttggaagtctgcatgcgggtgcttattgtcgactcccgtgtagatgcagagaactcatttgtaactgccgtttcggtgttgtatcgtatctgcgctagatgctagtgttataacgcttttgattgttgatggattgcatatatgtactgtatttgtacatgaacagaacgtagtgcccattttcatagtgttc

SEQ ID NO: 5833 - protein, 260 aa, Zea mays subsp. mays
  peptide (1)..(260): Ceres Seq. ID no. 13495271
KSRRESPRTRGGISHPLGPPPPPLCSSSFPRSSSTRSAPIPPASADPDPAPAPMATRRRMLLKVIILGDSGVGKTSLMNQYVNNRFSNQYKATIGADFLTKEVQIDDRLFTLQIWDTAGQERFQSLGVAFYRGADCCVLVYDVNVSKSFEKLNNWREEFLIQASPSDPENFPFVVLGNKIDVDGGNSRTVSEKKAKAWCASKGNIPYFETSAKEGFNVEAAFECIARNAVKNEPEEDMYLPDTIDVGGAGRQQRSSGCEC

SEQ ID NO: 5834 - protein, 207 aa, Zea mays subsp. mays
  peptide (1)..(207): Ceres Seq. ID no. 13495272
MATRRRMLLKVIILGDSGVGKTSLMNQYVNNRFSNQYKATIGADFLTKEVQIDDRLFTLQIWDTAGQERFQSLGVAFYRGADCCVLVYDVNVSKSFEKLNNWREEFLIQASPSDPENFPFVVLGNKIDVDGGNSRTVSEKKAKAWCASKGNIPYFETSAKEGFNVEAAFECIARNAVKNEPEEDMYLPDTIDVGGAGRQQRSSGCEC

SEQ ID NO: 5835 - protein, 201 aa, Zea mays subsp. mays
  peptide (1)..(201): Ceres Seq. ID no. 13495273
MLLKVIILGDSGVGKTSLMNQYVNNRFSNQYKATIGADFLTKEVQIDDRLFTLQIWDTAGQERFQSLGVAFYRGADCCVLVYDVNVSKSFEKLNNWREEFLIQASPSDPENFPFVVLGNKIDVDGGNSRTVSEKKAKAWCASKGNIPYFETSAKEGFNVEAAFECIARNAVKNEPEEDMYLPDTIDVGGAGRQQRSSGCEC

SEQ ID NO: 5836 - DNA, 1522 bp, Zea mays subsp. mays
  misc_feature (1)..(1522): Ceres Seq. ID no. 12369443
  misc_feature (1)..(1522): Ortholog of  Ceres SEQ ID NO 14304148 as cited in SEQ ID NO 57313
  misc_feature (1)..(1522): Ortholog of  Ceres SEQ ID NO 13598513 as cited in SEQ ID NO 64102
gtcgcatcgcacgccatcagcagctagcgcgctcctcgagcccagcagagaaaggccggcctacccactctctctctctctctctccagtctccaccggcagcgctaatcgtaatagccatgggctccaccgccggcgacgtggccgcggtggtggacgaggaggcgtgcatgtacgcgatgcagctggcgtcgtcgtccatcctgcccatgacgctgaagaacgccatcgagctgggcctgctggaggtgctgcagaaggaggccggcggcggcaaggcggcgctggcgcccgaggaggtggtggcgcggatgcccgcggcgcccggcgaccccgccgccgcggcggccatggtggaccgcatgctccgcctgctcgcctcctacgacgtcgtccggtgccagatggaggaccgggacggccggtacgagcgccgctactccgccgcgcccgtctgcaagtggctcacccccaacgaggacggcgtgtccatggccgccctcgcgctcatgaaccaggacaaggtcctcatggagagctggtactatctcaaggacgcggtgctggacggcggcatcccgttcaacaaggcgtacgggatgacggcgttcgagtaccacggcacggactcgcgcttcaaccgcgtgttcaacgagggcatgaagaaccactcggtgatcatcaccaagaagctgctggacttctacacgggcttcgagggcgtgtcgacgctggtggacgtgggcggcggcgtgggcgccacgctgcacgccatcacgtcccgccacccgcacatctccggggtcaacttcgacctgccgcacgtcatctccgaggcgccgccgttccccggcgtgcgccacgtgggcggggacatgttcgcgtccgtgcccgccggcgacgccatcctcatgaagtggatcctccacgactggagcgacgcgcactgcgccacgctgctcaagaactgctacgacgcgctgccggaaaatggcaaggtcatcgtcgtcgagtgcgtgctgccggtcaacacggaggccacccccaaggcgcagggcgtcttccacgtcgacatgatcatgctcgcgcacaaccccggcggcaaggagcggtacgagcgcgagttccgcgagctcgcaaagggcgccggcttctccgggttcaaggccacctgcatctacgccaacgcctgggccatcgagttcatcaagtgaaccaccgtcgccgcgatgagatggcatggctgccacatgctttgcttgcttggtcctcgtatcgtacgtcgccgtcgtcgtcttcttctggttattgcgctgctacctcgctgctctcgcgtatgcatgtacttttgcttaattttctttcttcatatcatgcactctggctggcctagactgcccccgatccatggtggccggtacgtcttgtcgagctcttgcatgtcgtggattctaaattcttcttctgcgtcgaattgtctctgccatgtgcgagtaataacaatcaaggttatacttacggt

SEQ ID NO: 5837 - protein, 463 aa, Zea mays subsp. mays
  peptide (1)..(463): Ceres Seq. ID no. 12369444
SHRTPSAASALLEPSRERPAYPLSLSLSPVSTGSANRNSHGLHRRRRGRGGGRGGVHVRDAAGVVVHPAHDAEERHRAGPAGGAAEGGRRRQGGAGARGGGGADARGARRPRRRGGHGGPHAPPARLLRRRPVPDGGPGRPVRAPLLRRARLQVAHPQRGRRVHGRPRAHEPGQGPHGELVLSQGRGAGRRHPVQQGVRDDGVRVPRHGLALQPRVQRGHEEPLGDHHQEAAGLLHGLRGRVDAGGRGRRRGRHAARHHVPPPAHLRGQLRPAARHLRGAAVPRRAPRGRGHVRVRARRRRHPHEVDPPRLERRALRHAAQELLRRAAGKWQGHRRRVRAAGQHGGHPQGAGRLPRRHDHARAQPRRQGAVRARVPRARKGRRLLRVQGHLHLRQRLGHRVHQVNHRRRDEMAWLPHALLAWSSYRTSPSSSSSGYCAATSLLSRMHVLLLNFLSSYHALWLA

SEQ ID NO: 5838 - protein, 403 aa, Zea mays subsp. mays
  peptide (1)..(403): Ceres Seq. ID no. 12369445
RIARHQQLARSSSPAEKGRPTHSLSLSLQSPPAALIVIAMGSTAGDVAAVVDEEACMYAMQLASSSILPMTLKNAIELGLLEVLQKEAGGGKAALAPEEVVARMPAAPGDPAAAAAMVDRMLRLLASYDVVRCQMEDRDGRYERRYSAAPVCKWLTPNEDGVSMAALALMNQDKVLMESWYYLKDAVLDGGIPFNKAYGMTAFEYHGTDSRFNRVFNEGMKNHSVIITKKLLDFYTGFEGVSTLVDVGGGVGATLHAITSRHPHISGVNFDLPHVISEAPPFPGVRHVGGDMFASVPAGDAILMKWILHDWSDAHCATLLKNCYDALPENGKVIVVECVLPVNTEATPKAQGVFHVDMIMLAHNPGGKERYEREFRELAKGAGFSGFKATCIYANAWAIEFIK

SEQ ID NO: 5839 - protein, 364 aa, Zea mays subsp. mays
  peptide (1)..(364): Ceres Seq. ID no. 12369446
MGSTAGDVAAVVDEEACMYAMQLASSSILPMTLKNAIELGLLEVLQKEAGGGKAALAPEEVVARMPAAPGDPAAAAAMVDRMLRLLASYDVVRCQMEDRDGRYERRYSAAPVCKWLTPNEDGVSMAALALMNQDKVLMESWYYLKDAVLDGGIPFNKAYGMTAFEYHGTDSRFNRVFNEGMKNHSVIITKKLLDFYTGFEGVSTLVDVGGGVGATLHAITSRHPHISGVNFDLPHVISEAPPFPGVRHVGGDMFASVPAGDAILMKWILHDWSDAHCATLLKNCYDALPENGKVIVVECVLPVNTEATPKAQGVFHVDMIMLAHNPGGKERYEREFRELAKGAGFSGFKATCIYANAWAIEFIK

SEQ ID NO: 5840 - DNA, 1425 bp, Zea mays subsp. mays
  misc_feature (1)..(1425): Ceres Seq. ID no. 12373632
  misc_feature (1)..(1425): Ortholog of  Ceres SEQ ID NO 14311572 as cited in SEQ ID NO 51713
  misc_feature (1)..(1425): Ortholog of  Ceres SEQ ID NO 14308664 as cited in SEQ ID NO 55450
  misc_feature (1)..(1425): Ortholog of  Ceres SEQ ID NO 15226673 as cited in SEQ ID NO 66997
  misc_feature (1)..(1425): Ortholog of  Ceres SEQ ID NO 14302998 as cited in SEQ ID NO 67440
ctctctccccaccatcagcagaccaccaccaatcacacacaccggccggccagctctctagctcttcctccaacacttgttgctccgctcccatcccctcaagcctctcttcactgaattttctggtcgccatgcacagctactacagagccatgcacccgtacgctcacccgtaccagcaccatgccgccgccgttgcccccaccaccaagcacggacactgccatgatgccgaggaggaggacgaccatcagtccatgctgctcctctccctgtggcctcccggccaccaccaccacagcgtcgccgccgccgcttcctcggcgtgctcgtctcctcccaccatatgcgccaccaccagcaccacctccatggccgcctccgccgcttcttcttacccttgttgcctcacccaccaaagccattacaatggcggcggatctgcagggagcagcagccacagtagctgcttcttgttccaccacgagcaccagcagcagcaggagcccgatgtgagcatatcgctgtccatagccccgccgcgcagcaacaacgacgcagcttcctgtggtggccgtggcttcgctgccccgtcgacggtgacgacgccggaggtgcccaccagccagtactggatcccctccgcctccgagatcctggtcggctccacgcagttctcctgcgccgtctgcaacaagaccttcaaccgcttcaacaacatgcagatgcacatgtggggccacggttcgcagtaccgcaagggctccgagtccctgctacgcggcgccattatcacggtgggcacggcggcggcggcgtcgtcgtcgctgacgcgcctgccgtgctactgctgcgcggaggggtgccggaacaacatcgagcacccgcgggcgcggccgctcaaggacttccgcacgctgcagacgcactaccggcgcaagcacggcgcccggccctacgcgtgccgccgctgcggcaagcgcttcgccgtgcgcggcgactggcgcacgcacgagaagaactgcggcaggctctggttctgcgcctgcggctccgacttcaagcacaagcggtcgctcaaggaccacgtccgatccttcggcggcggccacgcgccgcgcgtcgtcgagtccgtcgccgtcgaggacgaggaggaggaggaggacgtcgacgacgctgatgacgatggcgacctgcagactttcgacgacaacggcgccagcggagaacgacccagcgacatggtcgtcgtctagaggcttgcttcttcattaattagatcgatgtggtactatagtatgctagctactctactccaccgatggacataagtagttctaatgtgctgctcatgcatctcttagcccgatcgcgcggtcttattagctatatatatatatatatatagatttcatttcagtagtt

SEQ ID NO: 5841 - protein, 417 aa, Zea mays subsp. mays
  peptide (1)..(417): Ceres Seq. ID no. 12373633
LSPPSADHHQSHTPAGQLSSSSSNTCCSAPIPSSLSSLNFLVAMHSYYRAMHPYAHPYQHHAAAVAPTTKHGHCHDAEEEDDHQSMLLLSLWPPGHHHHSVAAAASSACSSPPTICATTSTTSMAASAASSYPCCLTHQSHYNGGGSAGSSSHSSCFLFHHEHQQQQEPDVSISLSIAPPRSNNDAASCGGRGFAAPSTVTTPEVPTSQYWIPSASEILVGSTQFSCAVCNKTFNRFNNMQMHMWGHGSQYRKGSESLLRGAIITVGTAAAASSSLTRLPCYCCAEGCRNNIEHPRARPLKDFRTLQTHYRRKHGARPYACRRCGKRFAVRGDWRTHEKNCGRLWFCACGSDFKHKRSLKDHVRSFGGGHAPRVVESVAVEDEEEEEDVDDADDDGDLQTFDDNGASGERPSDMVVV

SEQ ID NO: 5842 - protein, 374 aa, Zea mays subsp. mays
  peptide (1)..(374): Ceres Seq. ID no. 12373634
MHSYYRAMHPYAHPYQHHAAAVAPTTKHGHCHDAEEEDDHQSMLLLSLWPPGHHHHSVAAAASSACSSPPTICATTSTTSMAASAASSYPCCLTHQSHYNGGGSAGSSSHSSCFLFHHEHQQQQEPDVSISLSIAPPRSNNDAASCGGRGFAAPSTVTTPEVPTSQYWIPSASEILVGSTQFSCAVCNKTFNRFNNMQMHMWGHGSQYRKGSESLLRGAIITVGTAAAASSSLTRLPCYCCAEGCRNNIEHPRARPLKDFRTLQTHYRRKHGARPYACRRCGKRFAVRGDWRTHEKNCGRLWFCACGSDFKHKRSLKDHVRSFGGGHAPRVVESVAVEDEEEEEDVDDADDDGDLQTFDDNGASGERPSDMVVV

SEQ ID NO: 5843 - protein, 367 aa, Zea mays subsp. mays
  peptide (1)..(367): Ceres Seq. ID no. 12373635
MHPYAHPYQHHAAAVAPTTKHGHCHDAEEEDDHQSMLLLSLWPPGHHHHSVAAAASSACSSPPTICATTSTTSMAASAASSYPCCLTHQSHYNGGGSAGSSSHSSCFLFHHEHQQQQEPDVSISLSIAPPRSNNDAASCGGRGFAAPSTVTTPEVPTSQYWIPSASEILVGSTQFSCAVCNKTFNRFNNMQMHMWGHGSQYRKGSESLLRGAIITVGTAAAASSSLTRLPCYCCAEGCRNNIEHPRARPLKDFRTLQTHYRRKHGARPYACRRCGKRFAVRGDWRTHEKNCGRLWFCACGSDFKHKRSLKDHVRSFGGGHAPRVVESVAVEDEEEEEDVDDADDDGDLQTFDDNGASGERPSDMVVV

SEQ ID NO: 5844 - DNA, 1098 bp, Zea mays subsp. mays
  misc_feature (1)..(1098): Ceres Seq. ID no. 13499010
  misc_feature (1)..(1098): Ortholog of  Ceres SEQ ID NO 13582073 as cited in SEQ ID NO 56218
aagcaagtaagcaacccaaaccctccctcccctcccattcgattcttgcctcccacgccgccgccggatcccgcgatggccgaccctcggctgtaccccacggagtccgggtccgacgaccggcgcgatgccgcctatcccggctccgagcgccgcctctacaacccgtaccaggacctcaacctcccctatcggcagctctacgaccttcccacctccccggagttcctcttccaggaggaggccgtcgcgcagcgccggtcctggggcgagaacctcacctactacaccggcgtgggatacctcggcggcgccggggccggggccgcgctggggctccgcgacgccgcccgaggcgccgagcctggggagcccgccaagatccgggccaaccgcgtcctcaactcctgcggcagctccggacgccgcgtcggtaacacgctcggggtcatcggcctcatgtacgccgggatcgagagcgccatggtcgccgcccgcgaccgcgacgactggatcaacagcgtcgtggccgggctaggcaccggcgcgctcttccgcgccgctaacgggccgcgctcggcggtcgtcgccggggcccgttggtggggttcttgctggcgcctccgccgctgccaagcaggttgggaagagatacctccccgccctctaaatctgattgcggtacttgtctctgccctgccatgccgtgatcaagggaaatcatttcgtcgcgtggatgttatttcttcgttctcgttaattatttgggaagagtcatgttcttctcgacattcctatatattgttgacatccatatgctggtactatatatgtcaaagaacgatctgatctcaccagatcacgaaatttttggtccacattgcaatgtaacattagacgctagctggtatcgacacaataatactgctttttccattatgctggagaacccatgacattgtgaaatgtaatgctgagtgtagtgtagttttgctagattgtcgctgttttcctatatctctttaaagacgaaattcttcgcctgcccgatgtatgtaaaaaaagacatgccttgatctcagtgagatgttttatacg

SEQ ID NO: 5845 - protein, 282 aa, Zea mays subsp. mays
  peptide (1)..(282): Ceres Seq. ID no. 13499011
KQVSNPNPPSPPIRFLPPTPPPDPAMADPRLYPTESGSDDRRDAAYPGSERRLYNPYQDLNLPYRQLYDLPTSPEFLFQEEAVAQRRSWGENLTYYTGVGYLGGAGAGAALGLRDAARGAEPGEPAKIRANRVLNSCGSSGRRVGNTLGVIGLMYAGIESAMVAARDRDDWINSVVAGLGTGALFRAANGPRSAVVAGARWWGSCWRLRRCQAGWEEIPPRPLNLIAVLVSALPCRDQGKSFRRVDVISSFSLIIWEESCSSRHSYILLTSICWYYICQRTI

SEQ ID NO: 5846 - protein, 257 aa, Zea mays subsp. mays
  peptide (1)..(257): Ceres Seq. ID no. 13499012
MADPRLYPTESGSDDRRDAAYPGSERRLYNPYQDLNLPYRQLYDLPTSPEFLFQEEAVAQRRSWGENLTYYTGVGYLGGAGAGAALGLRDAARGAEPGEPAKIRANRVLNSCGSSGRRVGNTLGVIGLMYAGIESAMVAARDRDDWINSVVAGLGTGALFRAANGPRSAVVAGARWWGSCWRLRRCQAGWEEIPPRPLNLIAVLVSALPCRDQGKSFRRVDVISSFSLIIWEESCSSRHSYILLTSICWYYICQRTI

SEQ ID NO: 5847 - protein, 144 aa, Zea mays subsp. mays
  peptide (1)..(144): Ceres Seq. ID no. 13499013
ASKQPKPSLPSHSILASHAAAGSRDGRPSAVPHGVRVRRPARCRLSRLRAPPLQPVPGPQPPLSAALRPSHLPGVPLPGGGRRAAPVLGREPHLLHRRGIPRRRRGRGRAGAPRRRPRRRAWGARQDPGQPRPQLLRQLRTPRR

SEQ ID NO: 5848 - DNA, 1486 bp, Zea mays subsp. mays
  misc_feature (1)..(1486): Ceres Seq. ID no. 12407390
  misc_feature (1)..(1486): Ortholog of  Ceres SEQ ID NO 13595861 as cited in SEQ ID NO 58153
  misc_feature (1)..(1486): Ortholog of  Ceres SEQ ID NO 13584292 as cited in SEQ ID NO 63687
ccttttcttctcttctctctctctctctctctctctgatttcttctcttaactctcgcgtctcgcgtccttttcccttcctcccctccgttgcgtccgtcgtctgcgttgcgtccctccgtccgtccgtccgttggcccgtccgtcgtcaccagcctcctccctcgcgcccaccgccgggatccggccctcctcgtctgcgcccgcctcggtctagatttctgagaaaatggcgagaagtgcgggaactaggaggcgtgtggctcgccagctcaagtccacacatcccattccttcataccgatggaagtcaaagcccatgaaaaagccgatgaaaaaatccaaccgaaagcaagtgttgccaaccttgcaaaagatggactgggaagatgccaattgctctgtgtgcatggaatacccacataatgctgtgctcatcctttgttcatcccatgataagggttgtcgtccttatatgtgtggaactagctaccgccactctaattgcttggatcagttcaagaaagcttacaccaagggggcattgcttgaggaagttcctgcaaatagtgttggctctaatctggattcggcgccattgactgcagaaaaaactgactccattgaccttgcatgtcccttgtgtcgtggcaaggtgaaagggtggacggtggtggaaccagctcgaagctacctcaatggaaaacgaagaacatgcatgcaggatggttgctcatttgtggggacctacaaggagctccgcaagcatgtcaagttggaacaccctcttgcaaagccaagggaagttgatcctgtccttgagcaaaaatggagattgctcgagattgaaagagagcggcaagatgcgctcagtacgatcactgcaacaatgggcagagccgtcgtttttggtgattatgtgctagacttggaggatggaatggactcggaggatgttgacagtgatgctgataatgatggccgtgggacagaaaacactcgtaggatgctactatttattatgcgccaagttgctcaacatcaccaaaaccaaaggctccagaatgcgactggtgcatctgacaatgctgaggacaattatgtggtgagcagtggtgccaatggaaccacaccatactcttaccccttggagggggaggacgagaatggtatggttgtggccggaggcagaagcactgatgtgctgagaccagagaggaggcgccgtcgccgccgcaggaaccgtgggagattgtttttaggtgctaattgagaggacaggtgaccaggtagggtttagccgccagaggagtacatacagaaatgcttccctggtgcctggcattcatcaattcctgtctcaatttacttgatcatgatcatgtaccaagtagttatcttaacatcagctcattgtcataaatttatggtatctcacattcttcgttgaaaaaggaaaacaccgcatccatctcttgcggtttgtg

SEQ ID NO: 5849 - protein, 347 aa, Zea mays subsp. mays
  peptide (1)..(347): Ceres Seq. ID no. 12407391
MARSAGTRRRVARQLKSTHPIPSYRWKSKPMKKPMKKSNRKQVLPTLQKMDWEDANCSVCMEYPHNAVLILCSSHDKGCRPYMCGTSYRHSNCLDQFKKAYTKGALLEEVPANSVGSNLDSAPLTAEKTDSIDLACPLCRGKVKGWTVVEPARSYLNGKRRTCMQDGCSFVGTYKELRKHVKLEHPLAKPREVDPVLEQKWRLLEIERERQDALSTITATMGRAVVFGDYVLDLEDGMDSEDVDSDADNDGRGTENTRRMLLFIMRQVAQHHQNQRLQNATGASDNAEDNYVVSSGANGTTPYSYPLEGEDENGMVVAGGRSTDVLRPERRRRRRRRNRGRLFLGAN

SEQ ID NO: 5850 - protein, 317 aa, Zea mays subsp. mays
  peptide (1)..(317): Ceres Seq. ID no. 12407392
MKKPMKKSNRKQVLPTLQKMDWEDANCSVCMEYPHNAVLILCSSHDKGCRPYMCGTSYRHSNCLDQFKKAYTKGALLEEVPANSVGSNLDSAPLTAEKTDSIDLACPLCRGKVKGWTVVEPARSYLNGKRRTCMQDGCSFVGTYKELRKHVKLEHPLAKPREVDPVLEQKWRLLEIERERQDALSTITATMGRAVVFGDYVLDLEDGMDSEDVDSDADNDGRGTENTRRMLLFIMRQVAQHHQNQRLQNATGASDNAEDNYVVSSGANGTTPYSYPLEGEDENGMVVAGGRSTDVLRPERRRRRRRRNRGRLFLGAN

SEQ ID NO: 5851 - protein, 313 aa, Zea mays subsp. mays
  peptide (1)..(313): Ceres Seq. ID no. 12407393
MKKSNRKQVLPTLQKMDWEDANCSVCMEYPHNAVLILCSSHDKGCRPYMCGTSYRHSNCLDQFKKAYTKGALLEEVPANSVGSNLDSAPLTAEKTDSIDLACPLCRGKVKGWTVVEPARSYLNGKRRTCMQDGCSFVGTYKELRKHVKLEHPLAKPREVDPVLEQKWRLLEIERERQDALSTITATMGRAVVFGDYVLDLEDGMDSEDVDSDADNDGRGTENTRRMLLFIMRQVAQHHQNQRLQNATGASDNAEDNYVVSSGANGTTPYSYPLEGEDENGMVVAGGRSTDVLRPERRRRRRRRNRGRLFLGAN

SEQ ID NO: 5852 - DNA, 1356 bp, Zea mays subsp. mays
  misc_feature (1)..(1356): Ceres Seq. ID no. 12379426
  misc_feature (1)..(1356): Ortholog of  Ceres SEQ ID NO 15227099 as cited in SEQ ID NO 53558
  misc_feature (1)..(1356): Ortholog of  Ceres SEQ ID NO 14314563 as cited in SEQ ID NO 59349
  misc_feature (1)..(1356): Ortholog of  Ceres SEQ ID NO 12616360 as cited in SEQ ID NO 63543
attgataacagatgtcggcattctcctcgctcctgctgccatcgtttttcctttttcctggacagccactgcaactcctcccaaatcctcccacccggtttagccggctccgctgccaccgccgcgactccacctctgtcgccaccatggtcaagtccaaggccatcagggtccacgagctgggcggccccgaggtgctgcggtgggaggaggtggaggtcggggagcccggtgaaggggagatccgcatcaggaccaccgccgtcggcgtcaacttcatcgacatctactttcggaagggggtctacgccgcgcccaccatgcccttcaccccaggaatggaagccgttggcgtcgtcaccgctgttgggcctggcctcactggcaggaaggtgggcgatgttgttgcatatgccggcaaccccatgggctcctatgctcaggagcagatccttccagcggctgtcgctgttcctgttccaccttccgttgatcataagcaagcagcttctgtgatgctcaagggcatgaccgcccatgttctgcttcgccgggtattcaaggttgagagtggccatactatcctggtccatgctgctgctggtggtgtcggctcactcctttgtcaatgggcaaacgcccttggtgccactgtcatcgggactgtttccaatcaagaaaaagccgctcaggcagctcaggatggatgccaccatcccataatttacactagcgaggatgtcgtcgcaagagtcaaggatattacatcaggaaaaggtgtcaatgtcgtctatgattctgttggaaaggatacatacaaggcttccctggagtgcttggcgtcccgcggcttcctggtgtcgtttgggcagtcgtcaggcaaacctgacccaatcccaacgagcgacctggcttccaagtccttgttcctcactcgtcctagcctcatgcattacactgctacccgtgatgagctgctggagtcagccggcgaggtgtttgccaatgtcgctaaggccttgtttggataaagagggattgaagtggattgaagtgtattttagggattgaaagagaaattagttcatattacacttcaatacaccttataccacctcaatccactccaatccaagattatccaaacaaggcctaacggggtgctgcacgtccgggtaaaccacacgtatccattgtcggaagctgcccaggcccatgcagatctggagggcaggaagacatcagggtccatagtgctcatcccgggatagactcaagggcatgtgaatgaataaatggggtgatctggttatgggaacggcgtaataataattatatctatgctgtttatgcggg

SEQ ID NO: 5853 - protein, 339 aa, Zea mays subsp. mays
  peptide (1)..(339): Ceres Seq. ID no. 12379427
MSAFSSLLLPSFFLFPGQPLQLLPNPPTRFSRLRCHRRDSTSVATMVKSKAIRVHELGGPEVLRWEEVEVGEPGEGEIRIRTTAVGVNFIDIYFRKGVYAAPTMPFTPGMEAVGVVTAVGPGLTGRKVGDVVAYAGNPMGSYAQEQILPAAVAVPVPPSVDHKQAASVMLKGMTAHVLLRRVFKVESGHTILVHAAAGGVGSLLCQWANALGATVIGTVSNQEKAAQAAQDGCHHPIIYTSEDVVARVKDITSGKGVNVVYDSVGKDTYKASLECLASRGFLVSFGQSSGKPDPIPTSDLASKSLFLTRPSLMHYTATRDELLESAGEVFANVAKALFG

SEQ ID NO: 5854 - protein, 294 aa, Zea mays subsp. mays
  peptide (1)..(294): Ceres Seq. ID no. 12379428
MVKSKAIRVHELGGPEVLRWEEVEVGEPGEGEIRIRTTAVGVNFIDIYFRKGVYAAPTMPFTPGMEAVGVVTAVGPGLTGRKVGDVVAYAGNPMGSYAQEQILPAAVAVPVPPSVDHKQAASVMLKGMTAHVLLRRVFKVESGHTILVHAAAGGVGSLLCQWANALGATVIGTVSNQEKAAQAAQDGCHHPIIYTSEDVVARVKDITSGKGVNVVYDSVGKDTYKASLECLASRGFLVSFGQSSGKPDPIPTSDLASKSLFLTRPSLMHYTATRDELLESAGEVFANVAKALFG

SEQ ID NO: 5855 - protein, 236 aa, Zea mays subsp. mays
  peptide (1)..(236): Ceres Seq. ID no. 12379429
MPFTPGMEAVGVVTAVGPGLTGRKVGDVVAYAGNPMGSYAQEQILPAAVAVPVPPSVDHKQAASVMLKGMTAHVLLRRVFKVESGHTILVHAAAGGVGSLLCQWANALGATVIGTVSNQEKAAQAAQDGCHHPIIYTSEDVVARVKDITSGKGVNVVYDSVGKDTYKASLECLASRGFLVSFGQSSGKPDPIPTSDLASKSLFLTRPSLMHYTATRDELLESAGEVFANVAKALFG

SEQ ID NO: 5856 - DNA, 1318 bp, Zea mays subsp. mays
  misc_feature (1)..(1318): Ceres Seq. ID no. 13498544
  misc_feature (1)..(1318): Ortholog of  Ceres SEQ ID NO 13581327 as cited in SEQ ID NO 51165
  misc_feature (1)..(1318): Ortholog of  Ceres SEQ ID NO 12610002 as cited in SEQ ID NO 55823
  misc_feature (1)..(1318): Ortholog of  Ceres SEQ ID NO 14308310 as cited in SEQ ID NO 58573
  misc_feature (1)..(1318): Ortholog of  Ceres SEQ ID NO 14308795 as cited in SEQ ID NO 59140
  misc_feature (1)..(1318): Ortholog of  Ceres SEQ ID NO 14313354 as cited in SEQ ID NO 61520
  misc_feature (1)..(1318): Ortholog of  Ceres SEQ ID NO 13596744 as cited in SEQ ID NO 62765
gcacttggttggagctcctctaccttttccatcgctctgctctgctccgcgtctccgtccgccccggcaaaagcaaaacacagccatggaggggtacgaccgcgagttctggcagttcagcgaccagctgcgcctgcagacgaccgccttctccggcctctccctcggcgactccatctggtctccggccaccggcgccggcgggcggcgcaacaacaacaccgacctactcgcggcctccgcgtcggcagccgacgccggcaagcacaacggcgtgggcctcagcctgaatgatggagggcccggactcattggctccgggaagctcgccttcggcggcagcaaggccggccgctacaacaacctcccatccgagaaggccgcgcccgtctacaaccacagcggcgccacgatcaacggcggctacgccaggagcgacaacgccggcctggcggcgttcaacaagatggggagctacttccacaacagtaacggcaacggcggcggcggcggggaggtgaagagctacttcaacaagtccgccggacgggcggcgagcaacaacagccacgggcacgccggcggcggcaagaagggcggcggcggcgggaagcacggcaagaacgagggcaacggcggcgcggtggcggccacggacaagcggttcaagacgctgccggcgtcggaggcgctgccgcggggcgaggccatcggcggctacatcttcgtctgcaacaacgacaccatggacgagaacctcaggagggagctgttcgggctgccgtcgaggtacagggactcggtgcgggccatccgcccggggctgcccctcttcctctacaactactccacccaccagctgccggcatcttcaaggccgccagcttcggcgggaccaacatcgacccgacggcgtgggaggacaagaagtgccccggcgagtcgcgcttccctgcacaggtgcgagtggcaacgcggaagatctacgatccactggaggaggacgccttccgccccatccttcaccactacgacgggcccaagtttcggctcgagctctccgtcgccgagaccctcgccctcctcgacatcttcgctgacaaggatgacgcctgagccttccttgccgccccctcgcccgccagtgccaatccattaatgcacagacaataaaatggctggagggacagaccaaactatccacctttgtttgatatgataaagggctatgtatgaggcacgcgtcccattatttttgtttttattataagactagacctcgttccgtaagatacatgtatcaatattatataaaaac

SEQ ID NO: 5857 - protein, 385 aa, Zea mays subsp. mays
  peptide (1)..(385): Ceres Seq. ID no. 13498545
HLVGAPLPFPSLCSAPRLRPPRQKQNTAMEGYDREFWQFSDQLRLQTTAFSGLSLGDSIWSPATGAGGRRNNNTDLLAASASAADAGKHNGVGLSLNDGGPGLIGSGKLAFGGSKAGRYNNLPSEKAAPVYNHSGATINGGYARSDNAGLAAFNKMGSYFHNSNGNGGGGGEVKSYFNKSAGRAASNNSHGHAGGGKKGGGGGKHGKNEGNGGAVAATDKRFKTLPASEALPRGEAIGGYIFVCNNDTMDENLRRELFGLPSRYRDSVRAIRPGLPLFLYNYSTHQLPASSRPPASAGPTSTRRRGRTRSAPASRASLHRCEWQRGRSTIHWRRTPSAPSFTTTTGPSFGSSSPSPRPSPSSTSSLTRMTPEPSLPPPRPPVPIH

SEQ ID NO: 5858 - protein, 357 aa, Zea mays subsp. mays
  peptide (1)..(357): Ceres Seq. ID no. 13498546
MEGYDREFWQFSDQLRLQTTAFSGLSLGDSIWSPATGAGGRRNNNTDLLAASASAADAGKHNGVGLSLNDGGPGLIGSGKLAFGGSKAGRYNNLPSEKAAPVYNHSGATINGGYARSDNAGLAAFNKMGSYFHNSNGNGGGGGEVKSYFNKSAGRAASNNSHGHAGGGKKGGGGGKHGKNEGNGGAVAATDKRFKTLPASEALPRGEAIGGYIFVCNNDTMDENLRRELFGLPSRYRDSVRAIRPGLPLFLYNYSTHQLPASSRPPASAGPTSTRRRGRTRSAPASRASLHRCEWQRGRSTIHWRRTPSAPSFTTTTGPSFGSSSPSPRPSPSSTSSLTRMTPEPSLPPPRPPVPIH

SEQ ID NO: 5859 - protein, 230 aa, Zea mays subsp. mays
  peptide (1)..(230): Ceres Seq. ID no. 13498547
MGSYFHNSNGNGGGGGEVKSYFNKSAGRAASNNSHGHAGGGKKGGGGGKHGKNEGNGGAVAATDKRFKTLPASEALPRGEAIGGYIFVCNNDTMDENLRRELFGLPSRYRDSVRAIRPGLPLFLYNYSTHQLPASSRPPASAGPTSTRRRGRTRSAPASRASLHRCEWQRGRSTIHWRRTPSAPSFTTTTGPSFGSSSPSPRPSPSSTSSLTRMTPEPSLPPPRPPVPIH

SEQ ID NO: 5860 - DNA, 1309 bp, Zea mays subsp. mays
  misc_feature (1)..(1309): Ceres Seq. ID no. 12369060
  misc_feature (1)..(1309): Ortholog of  Ceres SEQ ID NO 14313807 as cited in SEQ ID NO 59564
aaactgctggaatatacttacaccgggaagaaggcgaaggccgtcgcgctctcggcggcggcggcggcggcggcagcggcgatgcttgcgttcgagcagcaggtgttggcggatctggtggaagatccgaacggaggtctggtggtgctctcctcgggtctccgctctcgcttccctagccgctaccctcctcctccatctccaccagacccccggcaacgcggctggaggaggatgtctcctcgtcctctccgccaccgataccctcaaggcccggatccggcgccgcctccaagacaagctgcaggttcacgacgtgccccctgacctcgccgcgcagcagcgcgccaccctttacgcctctggcgctgctctcttcctctctccccgcgccctcgccgccgacctcctcacctcccgcctcctcccctcccgcgtccaagccctactcctcctctccgcccaccgctccaccgatacctcctccgatgccttcatctgccgcctcctccgtcaacgcaatcttctccccgtttacgccttctccgattgcccccatgccatggtcgccggtttctccaaggccgagcgtaccatgaagagcctctacgtccgccgtctccacctctggccccgcttccacgttctcgccgcagccgacctggaacgcgccccgcctgacgtcgtagacgtgcgcgttcccatgacgccgcccatgaggggtatccaggctgctgtcctcgctaccatggacgcttgtctcaaggaacttaggcgcaccaacaaggtggatgttgaggacctcaccgtcgacaagggcctcttcaagtccttcgatgagatcgtccggaggcagctcgaccccatctggcacactcttgggaagaagacaaagcagcttgtggctgacctcaggacgctacgcaagctgcttgattacctcgtcaggatgaacctgatgagaaaaaagcaacaagagttggcgtgccatccgaggatggtatcgtggaggatgatgtgaggtctgaaaattacaacacatcagccattgagttcttaagaaggcttcctggggtgacggattctaactaccgagcaatcatggatggatgcaatagcttggccgagctggccctgcttccagtggaaaggttggcggagctaatgggtggtcagaaagctgcgcggacgctcaaggagtttctcgatgccaagtgcccaaccatgttgtagccagagtgacgctgtactgtttgtattgtgtcctgtgggatacaaatacttcagttgatgtgccttatatatatat

SEQ ID NO: 5861 - protein, 339 aa, Zea mays subsp. mays
  peptide (1)..(339): Ceres Seq. ID no. 12369061
NCWNILTPGRRRRPSRSRRRRRRRQRRCLRSSSRCWRIWWKIRTEVWWCSPRVSALASLAATLLLHLHQTPGNAAGGGCLLVLSATDTLKARIRRRLQDKLQVHDVPPDLAAQQRATLYASGAALFLSPRALAADLLTSRLLPSRVQALLLLSAHRSTDTSSDAFICRLLRQRNLLPVYAFSDCPHAMVAGFSKAERTMKSLYVRRLHLWPRFHVLAAADLERAPPDVVDVRVPMTPPMRGIQAAVLATMDACLKELRRTNKVDVEDLTVDKGLFKSFDEIVRRQLDPIWHTLGKKTKQLVADLRTLRKLLDYLVRMNLMRKKQQELACHPRMVSWRMM

SEQ ID NO: 5862 - DNA, 1174 bp, Zea mays subsp. mays
  misc_feature (1)..(1174): Ceres Seq. ID no. 12381799
  misc_feature (1)..(1174): Ortholog of  Ceres SEQ ID NO 13658282 as cited in SEQ ID NO 66701
acgcggtcgttctcacgttggcggctggccaccattccctgtctcgtgctcacggcgggcggcagaccgccaggcgccaccgcgccagaccagctgaccagcaggcggcagtgcaggccatcagccgtcacggctctccctcaggtcggcagtgcaggccatcagccgccaaccgatctagtagtgcagaccgccagaggccaggtgaccaggtcggcagtgcagccgtgcaggcggccagccctctccaggcgtccagctaccaccacacacacgaagagcaggcgatgaaaatgtccgcttccgttgcggccgcctcccccaccctccgcttctcctccgccactcatcctctccaccgaccgctccgccggcggctcccgtcggttcgatgctccctcgccgccgccgccggccccggtgtccgggcgccccctgagctcgtcgactccatcctctccaaggtgaagggaactgaccgaggagtgctgctgccaaaagatgggcaccaggaagtggctgaggtcgcgctgcagctggggaagtactgcatagacgaccccgtcaagtccccgcttatattcggagaatgggaggttgtgtactgctcggtgccaacctcgccgggagggctctaccggacgccccttggccgcctggtattcaaaaccgacgagatggtccaggcggtggaagcgcctgacgtggtcaggaacaaggtgtcgttctccgtctttggcctagagggcgcagtgtcattgaaaggtaagctgaatgtgctggacagtaaatggattcaggtcgtgttcgaagcaccagaactgaaggtcggctccttggggtttcagtacggtggcgagagcgaagtcaagctggagatcacctatgtcgatgagaagatcaggctagggagagggtccagaggctcgcttttcgtcttccttagacgatgatagaatggcatgcatgtgtgttgagacttcagacccacaagcaccgatgaggggtggcgctgacgcggtcgtttgtacaatactgtgttcaggacttctatacgtttatgtaaaaattctggcgtccagctgggtaattctggcgtttcagtacggtggcctgatgaatgttgttgtgtagtttgtagcatccattattagtgctgtaagatgatgttttg

SEQ ID NO: 5863 - protein, 316 aa, Zea mays subsp. mays
  peptide (1)..(316): Ceres Seq. ID no. 12381800
AVVLTLAAGHHSLSRAHGGRQTARRHRARPADQQAAVQAISRHGSPSGRQCRPSAANRSSSADRQRPGDQVGSAAVQAASPLQASSYHHTHEEQAMKMSASVAAASPTLRFSSATHPLHRPLRRRLPSVRCSLAAAAGPGVRAPPELVDSILSKVKGTDRGVLLPKDGHQEVAEVALQLGKYCIDDPVKSPLIFGEWEVVYCSVPTSPGGLYRTPLGRLVFKTDEMVQAVEAPDVVRNKVSFSVFGLEGAVSLKGKLNVLDSKWIQVVFEAPELKVGSLGFQYGGESEVKLEITYVDEKIRLGRGSRGSLFVFLRR

SEQ ID NO: 5864 - protein, 221 aa, Zea mays subsp. mays
  peptide (1)..(221): Ceres Seq. ID no. 12381801
MKMSASVAAASPTLRFSSATHPLHRPLRRRLPSVRCSLAAAAGPGVRAPPELVDSILSKVKGTDRGVLLPKDGHQEVAEVALQLGKYCIDDPVKSPLIFGEWEVVYCSVPTSPGGLYRTPLGRLVFKTDEMVQAVEAPDVVRNKVSFSVFGLEGAVSLKGKLNVLDSKWIQVVFEAPELKVGSLGFQYGGESEVKLEITYVDEKIRLGRGSRGSLFVFLRR

SEQ ID NO: 5865 - protein, 219 aa, Zea mays subsp. mays
  peptide (1)..(219): Ceres Seq. ID no. 12381802
MSASVAAASPTLRFSSATHPLHRPLRRRLPSVRCSLAAAAGPGVRAPPELVDSILSKVKGTDRGVLLPKDGHQEVAEVALQLGKYCIDDPVKSPLIFGEWEVVYCSVPTSPGGLYRTPLGRLVFKTDEMVQAVEAPDVVRNKVSFSVFGLEGAVSLKGKLNVLDSKWIQVVFEAPELKVGSLGFQYGGESEVKLEITYVDEKIRLGRGSRGSLFVFLRR

SEQ ID NO: 5866 - DNA, 1282 bp, Zea mays subsp. mays
  misc_feature (1)..(1282): Ceres Seq. ID no. 12409311
  misc_feature (1)..(1282): Ortholog of  Ceres SEQ ID NO 15177022 as cited in SEQ ID NO 57405
  misc_feature (1)..(1282): Ortholog of  Ceres SEQ ID NO 13597427 as cited in SEQ ID NO 64038
aaactctgctgcatcttcttccactctccagtctccactagcatcagtcgccgctgcctatcctcgagcaccatttccatcaacagcatccgcctctggcaagctagcgacanaactcatggcactccgcgcgctcgacaacacgatgcccgccgccgtcgaggagcggcccaagaaggtggctaaggtgggcgtccccgccgccgccgccaaggccgcngcctcccccgggagtggcggcaagaagaagaaggggaacgacgagaactcggcgccaagggccacggccgcggcggcggagcaggcngtggagtacatctcgtcggaggagctggaggcggcggccaaccctaaggccaagggccgcgggggctggtcgcgggccttgactccaaggactgggtcaggacctgcgaggcgctcaacgacgcgcgccgcctcgcgatccaccaccccgcgctgctgaacccgatcctggagaaggtggtgctggcggtcgtgaagacgatgaagagcccccgcagcgcggtgctcaagacgtccatcatggcctgcgccgacatcttcagctccttcggcaacctcctcgcctccgtctccgacgacgccttcgacaagctgctgctccagctcctgctgaaggcgtcccaggacaagcggttcgtgtgcgaggaggccgagaaggcgacgcgcgcgatggcggcgtcgatgccgccgctgccgctgctgaagaagctcaaggcgtacgtccaccacgccaacctcagggtcagggctaaggccgccgtcgccatctcccactgcgccgcccggatggacatcggcgcgatgaaggagttcgggatgtcggcgctgctgcagctggcggcggagctgctgaacgaccggctgccggaggcgagggaggccgcccgcggcgtggtggcgtcgacgcacgcggccttcgccaaggaggccgccgcgagcggccaggaggaggacgcggccgcgtcctgggagagcctctgcgcgctcagcctcccgcccatctccgcgcaggccgtcgccaagatcgctgccgccgcctcctcctcgcagtagccacggcacgcgtgcggacttgnccgctggcgttgtttttgggggtcgtctggttcggttcagaagtagcgctcgtgagtcttcagacagagctcgtttgtcgccgccgccgagtctgtttgtttgttctttctactccatgctatctcgcatggttagtgttctgtttatggcttcgtcaagtaataacatagtatcaatt

SEQ ID NO: 5867 - protein, 190 aa, Zea mays subsp. mays
  peptide (1)..(190): Ceres Seq. ID no. 12409312
MKSPRSAVLKTSIMACADIFSSFGNLLASVSDDAFDKLLLQLLLKASQDKRFVCEEAEKATRAMAASMPPLPLLKKLKAYVHHANLRVRAKAAVAISHCAARMDIGAMKEFGMSALLQLAAELLNDRLPEAREAARGVVASTHAAFAKEAAASGQEEDAAASWESLCALSLPPISAQAVAKIAAAASSSQ

SEQ ID NO: 5868 - protein, 177 aa, Zea mays subsp. mays
  peptide (1)..(177): Ceres Seq. ID no. 12409313
MACADIFSSFGNLLASVSDDAFDKLLLQLLLKASQDKRFVCEEAEKATRAMAASMPPLPLLKKLKAYVHHANLRVRAKAAVAISHCAARMDIGAMKEFGMSALLQLAAELLNDRLPEAREAARGVVASTHAAFAKEAAASGQEEDAAASWESLCALSLPPISAQAVAKIAAAASSSQ

SEQ ID NO: 5869 - protein, 154 aa, Zea mays subsp. mays
  peptide (1)..(154): Ceres Seq. ID no. 12409314
  misc_feature (38)..(38): Xaa is any aa, unknown or other
  misc_feature (73)..(73): Xaa is any aa, unknown or other
  misc_feature (102)..(102): Xaa is any aa, unknown or other
NSAASSSTLQSPLASVAAAYPRAPFPSTASASGKLATXLMALRALDNTMPAAVEERPKKVAKVGVPAAAAKAXASPGSGGKKKKGNDENSAPRATAAAAEQXVEYISSEELEAAANPKAKGRGGWSRALTPRTGSGPARRSTTRAASRSTTPRC

SEQ ID NO: 5870 - DNA, 1453 bp, Zea mays subsp. mays
  misc_feature (1)..(1453): Ceres Seq. ID no. 12353850
  misc_feature (1)..(1453): Ortholog of  Ceres SEQ ID NO 15169300 as cited in SEQ ID NO 59572
  misc_feature (1)..(1453): Ortholog of  Ceres SEQ ID NO 15176407 as cited in SEQ ID NO 59620
  misc_feature (1)..(1453): Ortholog of  Ceres SEQ ID NO 13596876 as cited in SEQ ID NO 62696
  misc_feature (1)..(1453): Ortholog of  Ceres SEQ ID NO 13655442 as cited in SEQ ID NO 64359
  misc_feature (1)..(1453): Ortholog of  Ceres SEQ ID NO 14303652 as cited in SEQ ID NO 67569
cagaaagcgacccgaccgtctctccgctccctccctcccccacaccacccacctgtgatctcccgcgcgggagatccgcccgccccatggcgccgtcgcgcccgctcatgcgggggatccgcccgccgcgcgtcttcccgacccgcggcggccgcgcctcgccgtacgctgtcgccctcacggccctgctcctcgtctccgccgccctcctcgcgctcatcgccttcggcgtcttctcgctccccgtgtcagcgccgaacgccgccgccaccaccacagccggaggggagaccgaatccgccgacacccgccccgcgcgcccccgcgcccgccgggacctgggggaggggctgggagagcgcggcgcgcagtggaccgaggtcatctcgtgggagccaagggcattcgtctaccacaacttcctgtctaaggaagagtgtgaatacctaattggattggccaagcctcacatggtaaaatcaacagttgtcgacagcactactggtaaaagcaaggacagcagggtccggacaagttcgggcatgtttcttcaaagaggaagggacaaggttattcgagtaattgaaaagaggattgcagactataccttcatacctgtagatcatggagagggactccaagtactgcattatgaagtcgggcagaagtatgagcctcactttgattattttcttgatgagtttaacaccaagaatggtggtcagaggatggctactcttctgatgtatctatcagatgttgaagaagggggcgagactattttccctgatgcaaatgtgaacgtcagttctttaccatggtacaatgagctttcagagtgtgccaagagaggcctttctgtcaaaccaaagatgggagatgcacttcttttctggagcatgaaaccagatgccaccctggacccattaagtttgcatgggggttgtcctgtgattagaggaaataaatggtcgtcaaccaagtggatgcatatccacgagtacaaagcttgagccttcaagactcgagagtcgagcgtaccaaagatggatctctatgcatgtgacttggggctgtctactgggttgacacccatgtatgctttacagacccactgaagctgtattctttgctcctttgttggaggggggagaattgcagataataggggccaataagcaggggccttgctcatccctgcagtatttttgggtctgatccttgctgacttggcttttgtcttttcttttctttttcttaccttgccgtaccccagctatagaggaatggtttagtgtctgggggcatagagtttgagattttgttttgtgccacacctgtgttactagtataagctttggtactaatgaataacgaggcctaagctcacatctactacatgaatggtgtaatattgttgaagatagaaagcatctaatgttcggtggttttg

SEQ ID NO: 5871 - protein, 336 aa, Zea mays subsp. mays
  peptide (1)..(336): Ceres Seq. ID no. 12353851
ESDPTVSPLPPSPTPPTCDLPRGRSARPMAPSRPLMRGIRPPRVFPTRGGRASPYAVALTALLLVSAALLALIAFGVFSLPVSAPNAAATTTAGGETESADTRPARPRARRDLGEGLGERGAQWTEVISWEPRAFVYHNFLSKEECEYLIGLAKPHMVKSTVVDSTTGKSKDSRVRTSSGMFLQRGRDKVIRVIEKRIADYTFIPVDHGEGLQVLHYEVGQKYEPHFDYFLDEFNTKNGGQRMATLLMYLSDVEEGGETIFPDANVNVSSLPWYNELSECAKRGLSVKPKMGDALLFWSMKPDATLDPLSLHGGCPVIRGNKWSSTKWMHIHEYKA

SEQ ID NO: 5872 - protein, 308 aa, Zea mays subsp. mays
  peptide (1)..(308): Ceres Seq. ID no. 12353852
MAPSRPLMRGIRPPRVFPTRGGRASPYAVALTALLLVSAALLALIAFGVFSLPVSAPNAAATTTAGGETESADTRPARPRARRDLGEGLGERGAQWTEVISWEPRAFVYHNFLSKEECEYLIGLAKPHMVKSTVVDSTTGKSKDSRVRTSSGMFLQRGRDKVIRVIEKRIADYTFIPVDHGEGLQVLHYEVGQKYEPHFDYFLDEFNTKNGGQRMATLLMYLSDVEEGGETIFPDANVNVSSLPWYNELSECAKRGLSVKPKMGDALLFWSMKPDATLDPLSLHGGCPVIRGNKWSSTKWMHIHEYKA

SEQ ID NO: 5873 - protein, 301 aa, Zea mays subsp. mays
  peptide (1)..(301): Ceres Seq. ID no. 12353853
MRGIRPPRVFPTRGGRASPYAVALTALLLVSAALLALIAFGVFSLPVSAPNAAATTTAGGETESADTRPARPRARRDLGEGLGERGAQWTEVISWEPRAFVYHNFLSKEECEYLIGLAKPHMVKSTVVDSTTGKSKDSRVRTSSGMFLQRGRDKVIRVIEKRIADYTFIPVDHGEGLQVLHYEVGQKYEPHFDYFLDEFNTKNGGQRMATLLMYLSDVEEGGETIFPDANVNVSSLPWYNELSECAKRGLSVKPKMGDALLFWSMKPDATLDPLSLHGGCPVIRGNKWSSTKWMHIHEYKA

SEQ ID NO: 5874 - DNA, 1160 bp, Zea mays subsp. mays
  misc_feature (1)..(1160): Ceres Seq. ID no. 12358324
  misc_feature (1)..(1160): Ortholog of  Ceres SEQ ID NO 15173035 as cited in SEQ ID NO 56029
  misc_feature (1)..(1160): Ortholog of  Ceres SEQ ID NO 13586951 as cited in SEQ ID NO 0
agtactcgtcctccttgcagagcttgcaccaacacgccaccttaccttgctttgctcgcactcgcacacagttgcgagcgcattgcttgcattgcgcagccgcaggccgcagcacgaagctagccagtaggcggtagatggcgagcagcgcggggaaccgcttcctgaggcagctgagcgcgagcaacggcgacgaagcggtctgcggcggcctgcagatggaccagcaggagtacggcggcgccggcgtggggaggaggggatcccggcggtggtcgaagaagcgggccgccgccgccgccgccgcgaggggctacggcgccggcagcgggaatggcgtgaagcagccggcctctgccgcggggaagcgggtgatggtggtggtggacgagagctcgggagccaaccacgccatgatgtgggcgctcacccacgtcgccgacaagggggacttcctcacgctgctccacgtcctgccgcgctccggcagcggcaggggcgaggaggcctcctccctcgccaactcgctcggcacgctctgcaaggcctccaggccagaggtggaggtcgaagcgcttgtgatccaagggcccaagctgggcaccgtgctcagccaggtgaagaatctggaggcctccgtgctggtgctcagccagtgcaggccatctccctgctggttaagctgcttccctgcggagcagcggcgaggagtttgtggagcagtgcatcaaccaggcggagtgcctgacgctggcggtgaggaagcagagcaagggcgtcggtgggtacctcatcagcacccggtggcagaagaacttctggctcctggcctgacaaccatgcattttacctagctagttactactgctacatgatcacatttgttttaagtcactcccgtatatttgctgtcatttcgtgtcatcaagtgcgtcacaagaaagaccatctctctctctccttcatcctgttgtaaagcgaaaagagcctccgaatctgaccacctttctacgaacctgtatcttccctgcaagtctttagcgtgcgtgtagtactgtgatctgcactgaacaatcatgtaatgctgcataaatgaccaattctgttgtacggcgcttcttgcttgctgcaattgacacttgaggctgtacagcttgcgg

SEQ ID NO: 5875 - protein, 238 aa, Zea mays subsp. mays
  peptide (1)..(238): Ceres Seq. ID no. 12358325
MASSAGNRFLRQLSASNGDEAVCGGLQMDQQEYGGAGVGRRGSRRWSKKRAAAAAAARGYGAGSGNGVKQPASAAGKRVMVVVDESSGANHAMMWALTHVADKGDFLTLLHVLPRSGSGRGEEASSLANSLGTLCKASRPEVEVEALVIQGPKLGTVLSQVKNLEASVLVLSQCRPSPCWLSCFPAEQRRGVCGAVHQPGGVPDAGGEEAEQGRRWVPHQHPVAEELLAPGLTTMHFT

SEQ ID NO: 5876 - protein, 211 aa, Zea mays subsp. mays
  peptide (1)..(211): Ceres Seq. ID no. 12358326
MDQQEYGGAGVGRRGSRRWSKKRAAAAAAARGYGAGSGNGVKQPASAAGKRVMVVVDESSGANHAMMWALTHVADKGDFLTLLHVLPRSGSGRGEEASSLANSLGTLCKASRPEVEVEALVIQGPKLGTVLSQVKNLEASVLVLSQCRPSPCWLSCFPAEQRRGVCGAVHQPGGVPDAGGEEAEQGRRWVPHQHPVAEELLAPGLTTMHFT

SEQ ID NO: 5877 - protein, 159 aa, Zea mays subsp. mays
  peptide (1)..(159): Ceres Seq. ID no. 12358327
MVVVDESSGANHAMMWALTHVADKGDFLTLLHVLPRSGSGRGEEASSLANSLGTLCKASRPEVEVEALVIQGPKLGTVLSQVKNLEASVLVLSQCRPSPCWLSCFPAEQRRGVCGAVHQPGGVPDAGGEEAEQGRRWVPHQHPVAEELLAPGLTTMHFT

SEQ ID NO: 5878 - DNA, 1420 bp, Zea mays subsp. mays
  misc_feature (1)..(1420): Ceres Seq. ID no. 12373624
  misc_feature (1)..(1420): Ortholog of  Ceres SEQ ID NO 13662567 as cited in SEQ ID NO 62884
ctctctcgtgcggcaactgggctattggcgaccgccaacgccgacgattacatttacaccaagtgcccaagccgtcttcgactacaccaggtgccaagttttcttcgcgtccttcacccgcgacgagcacccaccaggcatagagagagatggcaagtctaaccggcctcaccgcgaaccctaatccgaacaagtcattcgagatactgccgaacccaggtgactctgtctccagcctcagctttagtcccaagagtaatctgcttgtggcaacctcctgggataaccaggtgaggtgctgggagattgttggtggtaacagtcagccaaaggcgtccatttctcatgatcagccggttctctgctcggcttggaaggatgatggaactactgtcttctctggaggctgtgacaagcaggtcaaaatgtggcctcttctgtcaggtgggcagcctcagacggttgctatgcatgatgcccctgtcaaggaggtcgcctggattcctcagatgaatcttcttgtatccggaagctgggataagactttaaggtactgggatacaaggcaatcaaatcctgtgcatattcagcaacttcctgaacgttgctatgctcttactgtgaattatccccttatgattgttggaactgctgaccgtcatcttgttgtcttcaatttgcagaatcctcagacggagttcaagcgaatccaatcaccactaaaataccagacacggtgccttgctgcattccctgatcaacaagggtttttggttggttcaatagaaggaagagttggcgttcatcatatcgatgacgcacagcaaagcaaaaacttcacattcaaatgccacagggaaggaaatgatatattctctgtcaattcactcaacttccaccctgtccatcacacatttgcaactgctggatctgacggtgctttcaacttctgggataaggatagcaagcagaggctaaaggcttttagtagatgcccccttcccattccttgcagtaccttcaacagtgatggttccatatttgcttatgcggtttgctatgactggagccgtggggccgaaaatcacaaccctgcagctgcaaagacatccatctatctccacagtccacaggaaaccgaggtcaaaggaaagccgcgcattgcaacaggcaggaagtgattgcattgaaggtgttgcaaggaaccatgatgtcatccagcagttttgtcatgcctccctcctgtcttggaagtctggtagagtgtaaatttcagctaacttatgcgccgattatagggtttctgtagtacctggtgtttgtggtgtcttcaaaatagattctgtcgacgttctgtgatgatctccttactgcttatttctggcagtaaaatcagtgtatcttaaaaaggttgtgatgt

SEQ ID NO: 5879 - protein, 343 aa, Zea mays subsp. mays
  peptide (1)..(343): Ceres Seq. ID no. 12373625
MASLTGLTANPNPNKSFEILPNPGDSVSSLSFSPKSNLLVATSWDNQVRCWEIVGGNSQPKASISHDQPVLCSAWKDDGTTVFSGGCDKQVKMWPLLSGGQPQTVAMHDAPVKEVAWIPQMNLLVSGSWDKTLRYWDTRQSNPVHIQQLPERCYALTVNYPLMIVGTADRHLVVFNLQNPQTEFKRIQSPLKYQTRCLAAFPDQQGFLVGSIEGRVGVHHIDDAQQSKNFTFKCHREGNDIFSVNSLNFHPVHHTFATAGSDGAFNFWDKDSKQRLKAFSRCPLPIPCSTFNSDGSIFAYAVCYDWSRGAENHNPAAAKTSIYLHSPQETEVKGKPRIATGRK

SEQ ID NO: 5880 - protein, 251 aa, Zea mays subsp. mays
  peptide (1)..(251): Ceres Seq. ID no. 12373626
MWPLLSGGQPQTVAMHDAPVKEVAWIPQMNLLVSGSWDKTLRYWDTRQSNPVHIQQLPERCYALTVNYPLMIVGTADRHLVVFNLQNPQTEFKRIQSPLKYQTRCLAAFPDQQGFLVGSIEGRVGVHHIDDAQQSKNFTFKCHREGNDIFSVNSLNFHPVHHTFATAGSDGAFNFWDKDSKQRLKAFSRCPLPIPCSTFNSDGSIFAYAVCYDWSRGAENHNPAAAKTSIYLHSPQETEVKGKPRIATGRK

SEQ ID NO: 5881 - protein, 237 aa, Zea mays subsp. mays
  peptide (1)..(237): Ceres Seq. ID no. 12373627
MHDAPVKEVAWIPQMNLLVSGSWDKTLRYWDTRQSNPVHIQQLPERCYALTVNYPLMIVGTADRHLVVFNLQNPQTEFKRIQSPLKYQTRCLAAFPDQQGFLVGSIEGRVGVHHIDDAQQSKNFTFKCHREGNDIFSVNSLNFHPVHHTFATAGSDGAFNFWDKDSKQRLKAFSRCPLPIPCSTFNSDGSIFAYAVCYDWSRGAENHNPAAAKTSIYLHSPQETEVKGKPRIATGRK

SEQ ID NO: 5882 - DNA, 1510 bp, Zea mays subsp. mays
  misc_feature (1)..(1510): Ceres Seq. ID no. 12349160
  misc_feature (1)..(1510): Ortholog of  Ceres SEQ ID NO 13528157 as cited in SEQ ID NO 60102
  misc_feature (1)..(1510): Ortholog of  Ceres SEQ ID NO 15225423 as cited in SEQ ID NO 64689
aacacaacacatctgagagacatacagcaagctctctccccattggccatatctagctcgtagtctacactgcctctaaaccttgacatttcctttgtattcccctttccaatttgcagtagtttgtaggtagaccgcaaggtggttttttcttgcagcaatggcggccaaggtttgacaaggcatgacgtcctgattaagccccctcgcggcagccacaagatttgttgcagcgtgagacaggagctgcggctgcggaggaagtgagcaaaagcatggatctttccggcacgcagggcgagctgccgatggcaacaatgcacgccggcgggtcgccgtacctggggctgcaccacgggcacccacagcagcacaaccatggcgcgaacggccggcacatgtcgccgccggatgtggtggcggaggaggccaagaaccggcagctggcggtggtgcccgtgggcacaggaggcggaggcggggcaggggtgaggtaccgcgagtgcctgaagaaccacgcggctgccatcggcgggagcgcgacggacgggtgcggcgagttcatgcccgcgggcgaggaggggtcgctggacgcgctccggtgctcggcgtgcgggtgccaccgcaacttccaccgcaaggagccgccgggcggcgacgggcggcagctgtacgggcaccaccaccaccacccgctgagcccgctggccgcggtgcacccccaccatcaccgggggctgctggtggcggcgcttcccccggcgccgacgcgcatggtgatgccgctgagcgccgccatgcaccatcaccagcagccgccgcagcagcaccacagctcggcgtcagcggactccgacgacgcacacgtgccaggggtgcgcgggggggaggtgcagcagcagcagcaggcaccggcacggaagcggttccggaccaagttcaccgcggagcagaaggcccggatgctggggttcgccggaggacgccgggtggcggctgcagaagctggacgaggcggcggtgcagcgcttctgccaggaggtcggcgtgaagcggcgcgtgctcaaggtgtggatgcacaacaacaagcacaccctggcgcggcgcggccacgccgggctccccggcgacccggagctgctggggccgcacgacggccagctcggcatgccgctcccggagccggcggcggagcccgcagttgctgctgcggctgcggctggacttggagtgaccgaccaagccatgtctttcgggactggacgacattgatcaagagagtctaatgctgactgaatcagccttgcggcatagggaagctgttttctttgttaatctgctgctgatctcatcaatctagccgtagctttagctgcatttgcattccactgttccatccatcctagctatccatcaaccacaaactgatgatgcggagtctccatggatttctattccttgttgatttctgtagctgctctccccgctcttgactttaattttttagtgc

SEQ ID NO: 5883 - protein, 336 aa, Zea mays subsp. mays
  peptide (1)..(336): Ceres Seq. ID no. 12349161
MDLSGTQGELPMATMHAGGSPYLGLHHGHPQQHNHGANGRHMSPPDVVAEEAKNRQLAVVPVGTGGGGGAGVRYRECLKNHAAAIGGSATDGCGEFMPAGEEGSLDALRCSACGCHRNFHRKEPPGGDGRQLYGHHHHHPLSPLAAVHPHHHRGLLVAALPPAPTRMVMPLSAAMHHHQQPPQQHHSSASADSDDAHVPGVRGGEVQQQQQAPARKRFRTKFTAEQKARMLGFAGGRRVAAAEAGRGGGAALLPGGRREAARAQGVDAQQQAHPGAARPRRAPRRPGAAGAARRPARHAAPGAGGGARSCCCGCGWTWSDRPSHVFRDWTTLIKRV

SEQ ID NO: 5884 - protein, 325 aa, Zea mays subsp. mays
  peptide (1)..(325): Ceres Seq. ID no. 12349162
MATMHAGGSPYLGLHHGHPQQHNHGANGRHMSPPDVVAEEAKNRQLAVVPVGTGGGGGAGVRYRECLKNHAAAIGGSATDGCGEFMPAGEEGSLDALRCSACGCHRNFHRKEPPGGDGRQLYGHHHHHPLSPLAAVHPHHHRGLLVAALPPAPTRMVMPLSAAMHHHQQPPQQHHSSASADSDDAHVPGVRGGEVQQQQQAPARKRFRTKFTAEQKARMLGFAGGRRVAAAEAGRGGGAALLPGGRREAARAQGVDAQQQAHPGAARPRRAPRRPGAAGAARRPARHAAPGAGGGARSCCCGCGWTWSDRPSHVFRDWTTLIKRV

SEQ ID NO: 5885 - protein, 322 aa, Zea mays subsp. mays
  peptide (1)..(322): Ceres Seq. ID no. 12349163
MHAGGSPYLGLHHGHPQQHNHGANGRHMSPPDVVAEEAKNRQLAVVPVGTGGGGGAGVRYRECLKNHAAAIGGSATDGCGEFMPAGEEGSLDALRCSACGCHRNFHRKEPPGGDGRQLYGHHHHHPLSPLAAVHPHHHRGLLVAALPPAPTRMVMPLSAAMHHHQQPPQQHHSSASADSDDAHVPGVRGGEVQQQQQAPARKRFRTKFTAEQKARMLGFAGGRRVAAAEAGRGGGAALLPGGRREAARAQGVDAQQQAHPGAARPRRAPRRPGAAGAARRPARHAAPGAGGGARSCCCGCGWTWSDRPSHVFRDWTTLIKRV

SEQ ID NO: 5886 - DNA, 1347 bp, Zea mays subsp. mays
  misc_feature (1)..(1347): Ceres Seq. ID no. 12381237
  misc_feature (1)..(1347): Ortholog of  Ceres SEQ ID NO 13598416 as cited in SEQ ID NO 63371
  misc_feature (1)..(1347): Ortholog of  Ceres SEQ ID NO 13584271 as cited in SEQ ID NO 63893
ccggaacgcccgtcccgtccgtcctctccccatccacatccatcccgtgtgctcctactgctcctcgatttgatcaccgattaggggaggcggtttaccagtgagcacgcgcgagagataggataggaggaaagggaagctagcggcttcgctctcgcggggagatggcgcaggcggtggaggagtggtaccggcagatgcccatcatcacgcgctcctacctcaccgccgctgtcgtcaccaccgtcggctgcaccctcgaaatcatttcgccgtatcacctgtaccttaacccgaagctcgtggtgcagcactacgagatttggcgcctcgtcaccaacttcctctacttccgcaagatggatttggattttctattccacatgttctttcttgcacgatactgcaagcttctggaggaaaactcatttagaggaagaactgctgactttttttacatgctcttgtttggtgctactgtcctaactggcattgttctgatcggagggatgataccttacatttctgagacatttgccagaattctgttcttgagcaattcattgacatttatgatggtttatgtctggagcaagcacaacccttttatccatatgagctttctgggcctgtttacctttacggctgcgtacttaccatgggttctgttgggcttctctatcctcgttggaagcagcacatgggtggacctcttgggtatgattgctggacatatgtactacttcctggaagatgtatacccacgtatgactgggcgtcgccccctaaagacaccgtccttcatcaaggcgctatttgctgatgacaatgttgtggtggcacagccacccaatgctgggattggtgctggtgcaaggttcggtgctattggtgtagatccccaggctcaatgatgaattactttcagtgacctgagggccgaggctgtgactgatctgggatgcggcagtttgtattctctgcgcaaattgcggaactgtacaagccattgttcttgtgtatttatacaggctagatgagagttattgtgcataacaaaaagattagtagtatcggaggcggctaagtttgtcacctgttggcagggcccggaggaaaatggatcgtgatgggcaaacaggccaacccctgttgcagaaacttgttcatgtgacggtttaacatctgacctgctaccctttcatgcatcggtgaatttagtctaggaaactgtttgaagtggggaaatttggtgctttggcagcgagaatttggatggagcgctgtaattgcagaatggtgcaaggaatgactcctaacattgtggacgcctggatggtgttcgtc

SEQ ID NO: 5887 - protein, 249 aa, Zea mays subsp. mays
  peptide (1)..(249): Ceres Seq. ID no. 12381238
MAQAVEEWYRQMPIITRSYLTAAVVTTVGCTLEIISPYHLYLNPKLVVQHYEIWRLVTNFLYFRKMDLDFLFHMFFLARYCKLLEENSFRGRTADFFYMLLFGATVLTGIVLIGGMIPYISETFARILFLSNSLTFMMVYVWSKHNPFIHMSFLGLFTFTAAYLPWVLLGFSILVGSSTWVDLLGMIAGHMYYFLEDVYPRMTGRRPLKTPSFIKALFADDNVVVAQPPNAGIGAGARFGAIGVDPQAQ

SEQ ID NO: 5888 - protein, 238 aa, Zea mays subsp. mays
  peptide (1)..(238): Ceres Seq. ID no. 12381239
MPIITRSYLTAAVVTTVGCTLEIISPYHLYLNPKLVVQHYEIWRLVTNFLYFRKMDLDFLFHMFFLARYCKLLEENSFRGRTADFFYMLLFGATVLTGIVLIGGMIPYISETFARILFLSNSLTFMMVYVWSKHNPFIHMSFLGLFTFTAAYLPWVLLGFSILVGSSTWVDLLGMIAGHMYYFLEDVYPRMTGRRPLKTPSFIKALFADDNVVVAQPPNAGIGAGARFGAIGVDPQAQ

SEQ ID NO: 5889 - protein, 184 aa, Zea mays subsp. mays
  peptide (1)..(184): Ceres Seq. ID no. 12381240
MDLDFLFHMFFLARYCKLLEENSFRGRTADFFYMLLFGATVLTGIVLIGGMIPYISETFARILFLSNSLTFMMVYVWSKHNPFIHMSFLGLFTFTAAYLPWVLLGFSILVGSSTWVDLLGMIAGHMYYFLEDVYPRMTGRRPLKTPSFIKALFADDNVVVAQPPNAGIGAGARFGAIGVDPQAQ

SEQ ID NO: 5890 - DNA, 1244 bp, Zea mays subsp. mays
  misc_feature (1)..(1244): Ceres Seq. ID no. 12356309
  misc_feature (1)..(1244): Ortholog of  Ceres SEQ ID NO 12609045 as cited in SEQ ID NO 51314
  misc_feature (1)..(1244): Ortholog of  Ceres SEQ ID NO 14316312 as cited in SEQ ID NO 60042
  misc_feature (1)..(1244): Ortholog of  Ceres SEQ ID NO 13595877 as cited in SEQ ID NO 67702
  misc_feature (1)..(1244): Ortholog of  Ceres SEQ ID NO 13654367 as cited in SEQ ID NO 67993
acccatccaagataccgacgagcaggccagagcgaaggaatggactccatggccagcgacgacagcaaccaaggagcagcagccaagccgaagccgaagccaccaccgctaccgctgtccgtgcgcctccagctggccgggctgacagcggccatcgacgccgtggagcgccgcgacgggacggtgaaccgctgcctgtacggcgtgatcgaccggctcctgagcgcgcgcgccagcccgcgcccggacgcctccggggtgcgctcctacgacgtgaccatggacgcgtcccgcggcatctgggcgcgcgtcttcgcgccggccgcggcggaccgcccgctccccgtggtggtgtacttccacggcggcggcttcgcgctcttctccccggccatcgggcccttcaacggcgtgtgccgccgcctctgcgccgcgctcggcgccgtcgtggtgtccgtcaactaccgcctggccccggagcaccgctggcccgccgcctacgacgacggcgtcgacgcgctgcgcttcctcgacgcccgcggcggcgtcccgggcctggacgacggcgtgcccgtcgacctcggcacctgcttcctggccggggagagcgcgggcggaaacatcgtgcaccacgtcgccaaccgctgggcggcggcgtggcagccgtccgcgcgggccctccgcgtcgcgggcgtcttccccgtgcagccctacttcggcggcgtggagcgcacgccgtcggagctggagctagagggcgtggcgcccgtggtcaacctcaggcgctccgacttctcgtggaccgcgttcctgcccgacggcgccacccgcgaccacccggccgcgcacgtcaccgacgacaacgccgacctcgccgacgacttcccgcccgccatggtcattatcggcggcttcgacccgctcatggactggcagcgacgctacgccgacgtgctgcgccggaaggggaaggaggtgctggtggccgagtacccaggcatgttccacggcttctacggcttcccggagctccccgaggctaccaaggtgctgcaggatatgaaggccttcgtcgacagccacatacccacgcccaagctcgccgacgcgtgatgcacgaacaccatcccattccattctagtgtcatgagtcatgactgcttggttcatctatctgctgtcaaaatatatacttcctatatattaaagcagggcgcaaagcttccatctggtgcgcccacgcc

SEQ ID NO: 5891 - protein, 379 aa, Zea mays subsp. mays
  peptide (1)..(379): Ceres Seq. ID no. 12356310
PSKIPTSRPERRNGLHGQRRQQPRSSSQAEAEATTATAVRAPPAGRADSGHRRRGAPRRDGEPLPVRRDRPAPERARQPAPGRLRGALLRRDHGRVPRHLGARLRAGRGGPPAPRGGVLPRRRLRALLPGHRALQRRVPPPLRRARRRRGVRQLPPGPGAPLARRLRRRRRRAALPRRPRRRPGPGRRRARRPRHLLPGRGERGRKHRAPRRQPLGGGVAAVRAGPPRRGRLPRAALLRRRGAHAVGAGARGRGARGQPQALRLLVDRVPARRRHPRPPGRARHRRQRRPRRRLPARHGHYRRLRPAHGLAATLRRRAAPEGEGGAGGRVPRHVPRLLRLPGAPRGYQGAAGYEGLRRQPHTHAQARRRVMHEHHPIPF

SEQ ID NO: 5892 - protein, 370 aa, Zea mays subsp. mays
  peptide (1)..(370): Ceres Seq. ID no. 12356311
THPRYRRAGQSEGMDSMASDDSNQGAAAKPKPKPPPLPLSVRLQLAGLTAAIDAVERRDGTVNRCLYGVIDRLLSARASPRPDASGVRSYDVTMDASRGIWARVFAPAAADRPLPVVVYFHGGGFALFSPAIGPFNGVCRRLCAALGAVVVSVNYRLAPEHRWPAAYDDGVDALRFLDARGGVPGLDDGVPVDLGTCFLAGESAGGNIVHHVANRWAAAWQPSARALRVAGVFPVQPYFGGVERTPSELELEGVAPVVNLRRSDFSWTAFLPDGATRDHPAAHVTDDNADLADDFPPAMVIIGGFDPLMDWQRRYADVLRRKGKEVLVAEYPGMFHGFYGFPELPEATKVLQDMKAFVDSHIPTPKLADA

SEQ ID NO: 5893 - protein, 357 aa, Zea mays subsp. mays
  peptide (1)..(357): Ceres Seq. ID no. 12356312
MDSMASDDSNQGAAAKPKPKPPPLPLSVRLQLAGLTAAIDAVERRDGTVNRCLYGVIDRLLSARASPRPDASGVRSYDVTMDASRGIWARVFAPAAADRPLPVVVYFHGGGFALFSPAIGPFNGVCRRLCAALGAVVVSVNYRLAPEHRWPAAYDDGVDALRFLDARGGVPGLDDGVPVDLGTCFLAGESAGGNIVHHVANRWAAAWQPSARALRVAGVFPVQPYFGGVERTPSELELEGVAPVVNLRRSDFSWTAFLPDGATRDHPAAHVTDDNADLADDFPPAMVIIGGFDPLMDWQRRYADVLRRKGKEVLVAEYPGMFHGFYGFPELPEATKVLQDMKAFVDSHIPTPKLADA

SEQ ID NO: 5894 - DNA, 1290 bp, Zea mays subsp. mays
  misc_feature (1)..(1290): Ceres Seq. ID no. 12409295
  misc_feature (1)..(1290): Ortholog of  Ceres SEQ ID NO 13585461 as cited in SEQ ID NO 69106
ctactgtttcggactttcgggttttggccgacacccgacaatcttaacatcaaactcgtcgtccacgccctcctcggcaaggttgcgtacggcgtggccctaaggttcatctcgccgcctccctcaacctcttgattccgcctccctcaacctcttgattccgcctccctgaaggcataccagcgggatcaagctattttgctggccaaccgaacggtcaagccgacgatgacgctcggatcggcggcacacaagatcccgctggaggttgcgcacaccctcgtcgagatcgccgaggtcgcgcgctacgcctaccaccaccgccccggccgccctgcaacccacgagggggacccgactgcgccgcccgcaggggctgatagcagcgggggcaccaacgaggatgccgcgcggctgctggaggagaacgccatgctccgcgcccgactcgcagatgacctcgcgctcctgcgtgagctccacggcgcgccctgcgtctccaaggagtgccctcctgatctatacaaccgattgatggcggcggtcaacaatgttagcttccttgctcatctcgagaaattacaggatgagtcagcacgtcaacttaatgaactaacttctggcgacatgacaggttcattcctcgttaagtattgtgaagtttgtttctagactacattttatggtcactgttggttcttctaatacattttgcgaagtgctattccattttctgcttcaatggaactagaggtggaagctgcagacattccggacaaagcgggtaacgggaagaaaggattgtgggtcttggtcccttgtgatacagctggagctaatttggaggaaattagtgggattgatgatgaaaattatgtcatagtaaatgaagacgatatagtcgatggtattgccgcctttgttgctaggtgcattcttgaagatccaaaatccaagtcgttatcgccaatgcagctccaaaaggctgttgcaaaggcattagatagcatgaaagctcgatggagatggtcaaccttttgggaggctggacagattatatatatcttggctacttggggcatcacattagcagggttgtacaagagccgccatgtcctgaaggtggcagcaaagggtgctgctgtgtctgccagatttgttatgaaggccatttgagtgtaagaggcactcatgtgggatcagcaatttgcaaaatgtaaatacaaaactcgtcccgtcagttgtgcatatggttgtggcatgtttatcatgatgaagttatgatcatcc

SEQ ID NO: 5895 - protein, 147 aa, Zea mays subsp. mays
  peptide (1)..(147): Ceres Seq. ID no. 12409296
MTLGSAAHKIPLEVAHTLVEIAEVARYAYHHRPGRPATHEGDPTAPPAGADSSGGTNEDAARLLEENAMLRARLADDLALLRELHGAPCVSKECPPDLYNRLMAAVNNVSFLAHLEKLQDESARQLNELTSGDMTGSFLVKYCEVCF

SEQ ID NO: 5896 - protein, 144 aa, Zea mays subsp. mays
  peptide (1)..(144): Ceres Seq. ID no. 12409297
MELEVEAADIPDKAGNGKKGLWVLVPCDTAGANLEEISGIDDENYVIVNEDDIVDGIAAFVARCILEDPKSKSLSPMQLQKAVAKALDSMKARWRWSTFWEAGQIIYILATWGITLAGLYKSRHVLKVAAKGAAVSARFVMKAI

SEQ ID NO: 5897 - protein, 79 aa, Zea mays subsp. mays
  peptide (1)..(79): Ceres Seq. ID no. 12409298
MLRARLADDLALLRELHGAPCVSKECPPDLYNRLMAAVNNVSFLAHLEKLQDESARQLNELTSGDMTGSFLVKYCEVCF

SEQ ID NO: 5898 - DNA, 1164 bp, Zea mays subsp. mays
  misc_feature (1)..(1164): Ceres Seq. ID no. 12405567
  misc_feature (1)..(1164): Ortholog of  Ceres SEQ ID NO 14314068 as cited in SEQ ID NO 52242
  misc_feature (1)..(1164): Ortholog of  Ceres SEQ ID NO 15177057 as cited in SEQ ID NO 55817
  misc_feature (1)..(1164): Ortholog of  Ceres SEQ ID NO 13585458 as cited in SEQ ID NO 60907
  misc_feature (1)..(1164): Ortholog of  Ceres SEQ ID NO 12625392 as cited in SEQ ID NO 63315
  misc_feature (1)..(1164): Ortholog of  Ceres SEQ ID NO 13598319 as cited in SEQ ID NO 68758
  misc_feature (1)..(1164): Ortholog of  Ceres SEQ ID NO 12589816 as cited in SEQ ID NO 0
aaaaaagtaccactacgactccgcctccggctccgagagcagcagcctcagtaccaccagtccagtccagcctccagctaggggaagaagaagaagagcgaaggaaggggacgggggcgaggaaggagccagagcagacccaatccctcaatggcttcctctcgcgctctcgctctcgctctcttcctcctctgcgccctgctgcccgcgccccctgtctcggccacattgctgttcggcggcggcgagtcggccaagaaggcgggcgtcgacgcggagtggcggccggccactgcgacgtggtacggcgaggcagagggcgacggcagcgacggcggcgcgtgcgggtacgggacgctggtggacgtggtgccgatgaaggcgcgggtggggtcggtgagccccgtgctgttcaaggacggcgagggctgcggcgcctgctacaaggtcaggtgcctggaccgcggcgtgtgctcgcgccgtgccgtcacggtggtcgtcacggactagtgccccggcgggctgtgcgcgttcggccgcacccacttcgacctcagcggcgccgcgttcagcaggatggccgtcgccggggccggcggccggctgcgcgaccggggccagctgtccgtcgtgtacaggaggacggcctgcaagtacggcgggaagaacatcgcgttccgtgtgaacgagggctcgactaacttctggctctcgctgctcgtcgagttcgaggacggcgagggcgacataggatccatgcagataaagcaggccaactcggtggagtggctggacatgcggcacgtgtggggggcaacctggtgcctggtgcggggcccgctcgtgggccccttctccgtgaggctcaccacgctgtccgcgcggaagacgctcacgggcccgcgacgtgatccccaggaactggacgcccaaggccacctacacctcgcgcctcaacttccagccgtctctctaggtctaggacgagggagggacccaccgcggcgactggggcccacgttttatcggccccggacactgccctgtgggcccgttgcaaaacgaggaatcagtcagtccagagtgtttttttttttttttccctgtatgcagatgcaggcaaccttcgtatggtttggtttttatcttatcgtagtcgtagct

SEQ ID NO: 5899 - protein, 232 aa, Zea mays subsp. mays
  peptide (1)..(232): Ceres Seq. ID no. 12405568
KSTTTTPPPAPRAAASVPPVQSSLQLGEEEEERRKGTGARKEPEQTQSLNGFLSRSRSRSLPPLRPAARAPCLGHIAVRRRRVGQEGGRRRGVAAGHCDVVRRGRGRRQRRRRVRVRDAGGRGADEGAGGVGEPRAVQGRRGLRRLLQGQVPGPRRVLAPCRHGGRHGLVPRRAVRVRPHPLRPQRRRVQQDGRRRGRRPAARPGPAVRRVQEDGLQVRREEHRVPCERGLD

SEQ ID NO: 5900 - protein, 196 aa, Zea mays subsp. mays
  peptide (1)..(196): Ceres Seq. ID no. 12405569
MAVAGAGGRLRDRGQLSVVYRRTACKYGGKNIAFRVNEGSTNFWLSLLVEFEDGEGDIGSMQIKQANSVEWLDMRHVWGATWCLVRGPLVGPFSVRLTTLSARKTLTGPRRDPQELDAQGHLHLAPQLPAVSLGLGRGRDPPRRLGPTFYRPRTLPCGPVAKRGISQSRVFFFFFPCMQMQATFVWFGFYLIVVVA

SEQ ID NO: 5901 - protein, 136 aa, Zea mays subsp. mays
  peptide (1)..(136): Ceres Seq. ID no. 12405570
MQIKQANSVEWLDMRHVWGATWCLVRGPLVGPFSVRLTTLSARKTLTGPRRDPQELDAQGHLHLAPQLPAVSLGLGRGRDPPRRLGPTFYRPRTLPCGPVAKRGISQSRVFFFFFPCMQMQATFVWFGFYLIVVVA

SEQ ID NO: 5902 - DNA, 1774 bp, Zea mays subsp. mays
  misc_feature (1)..(1774): Ceres Seq. ID no. 12409287
  misc_feature (1)..(1774): Ortholog of  Ceres SEQ ID NO 15174513 as cited in SEQ ID NO 58979
  misc_feature (1)..(1774): Ortholog of  Ceres SEQ ID NO 13584616 as cited in SEQ ID NO 65234
  misc_feature (1)..(1774): Ortholog of  Ceres SEQ ID NO 15178939 as cited in SEQ ID NO 0
aacgcctccgctttcattcttctcttcccctcggcttcgagggttgtttttatttctttctttcctttttccgttttttattttatttttttcttttttcgttccttttctcgttccccccgttggggttttgagctccgacgaaccctaataatcgccggggaccggcggacgatcgcccgccggcatgcaccatcagcagcggatgaagcaggcggcggcggccgcggccgcggcgcagcagcagcagctgatgcagcaggcactgctcctgcagcagcagcagcagtcgcaggcgcagccgccctttttccccgggcaccacccgcaccccggcctcctcgccgcaccacagatagagcccatagtcagtggaaacctgcctcctgggtttgattcaagtacatgccgcagcgtgtatgttggcaatatccatcttcaagtgacggacacagtactgcaggaagtcttccaaagcattggtccagtagaagggtgcaagctcatcagaaaagaaaagtcatcctttggtttcattgactactatgaccgcagatatgctgcactggcaattttatctctcaatggcagacaactgtatggtcagccgattaaagtcaattgggcatatacaagtactccgagggaggacacatcaggtcattttaatatttttgttggggatctttgcccggaagtcactgatgctactttgtttgcatttttctctggatactctacttgctcagatgctagggttatgtgggaccagaaaacaggacgatccagagggtttggttttgtttctttcaggaaccagcaggatgctcaaagtgcgataaatgacttgaatgggaagtggcttgggaaccgtcaaattcgttgcaattgggcaacgaaaggtgctaatgctggtgaagagaaacaaattctggacactaaggttgacctgtcaaatggttcatcagaatctggaaaagagaatccaaatgatgatggtcctgaaaataaccctcagtttactactgtttatgttggcaatcttcctcacgaggctaccatgaatgatgtgcacctgtttttccattcactgggggctggttcaattgaggaagtccgtgtaactcgtgataaaggctttggctttgtgaggtacagcacccatgaggaggctgcattggcaattcagatgggtaatggccaacttattggcgggaggcagataaagtgttcctggggaagcaagccgactccacaagggacagcatccttgcctctgcctcccccagcactggcaccattctccactggagtgtcggccaccgacttgctggcctaccagcgcctgactctgagcaagatggcctcgaacccagccctaatgggtcagcacgccttgaagcaggtcgctgcattggggattggcggcggagccagccagtccatctatgatggcggcttccagggcatcaatactgccaccagcacaacttccgtccagcagcagcagcagctcatgtactactagagtactactactccatgaggcacccagctacctatcccttcaagaggaaggcgaggatgaatggatgatgccccttactatacccctatacatatagtagatgaagtcattactaggacctttttttccctaatctttttaagacccatctaagtaacatgtcctgtctatgctagctatataattgtgtatttctggatacataaaggcaaggttcttagtagtataatcttctgtgtttgaccg

SEQ ID NO: 5903 - protein, 446 aa, Zea mays subsp. mays
  peptide (1)..(446): Ceres Seq. ID no. 12409288
MHHQQRMKQAAAAAAAAQQQQLMQQALLLQQQQQSQAQPPFFPGHHPHPGLLAAPQIEPIVSGNLPPGFDSSTCRSVYVGNIHLQVTDTVLQEVFQSIGPVEGCKLIRKEKSSFGFIDYYDRRYAALAILSLNGRQLYGQPIKVNWAYTSTPREDTSGHFNIFVGDLCPEVTDATLFAFFSGYSTCSDARVMWDQKTGRSRGFGFVSFRNQQDAQSAINDLNGKWLGNRQIRCNWATKGANAGEEKQILDTKVDLSNGSSESGKENPNDDGPENNPQFTTVYVGNLPHEATMNDVHLFFHSLGAGSIEEVRVTRDKGFGFVRYSTHEEAALAIQMGNGQLIGGRQIKCSWGSKPTPQGTASLPLPPPALAPFSTGVSATDLLAYQRLTLSKMASNPALMGQHALKQVAALGIGGGASQSIYDGGFQGINTATSTTSVQQQQQLMYY

SEQ ID NO: 5904 - protein, 440 aa, Zea mays subsp. mays
  peptide (1)..(440): Ceres Seq. ID no. 12409289
MKQAAAAAAAAQQQQLMQQALLLQQQQQSQAQPPFFPGHHPHPGLLAAPQIEPIVSGNLPPGFDSSTCRSVYVGNIHLQVTDTVLQEVFQSIGPVEGCKLIRKEKSSFGFIDYYDRRYAALAILSLNGRQLYGQPIKVNWAYTSTPREDTSGHFNIFVGDLCPEVTDATLFAFFSGYSTCSDARVMWDQKTGRSRGFGFVSFRNQQDAQSAINDLNGKWLGNRQIRCNWATKGANAGEEKQILDTKVDLSNGSSESGKENPNDDGPENNPQFTTVYVGNLPHEATMNDVHLFFHSLGAGSIEEVRVTRDKGFGFVRYSTHEEAALAIQMGNGQLIGGRQIKCSWGSKPTPQGTASLPLPPPALAPFSTGVSATDLLAYQRLTLSKMASNPALMGQHALKQVAALGIGGGASQSIYDGGFQGINTATSTTSVQQQQQLMYY

SEQ ID NO: 5905 - protein, 424 aa, Zea mays subsp. mays
  peptide (1)..(424): Ceres Seq. ID no. 12409290
MQQALLLQQQQQSQAQPPFFPGHHPHPGLLAAPQIEPIVSGNLPPGFDSSTCRSVYVGNIHLQVTDTVLQEVFQSIGPVEGCKLIRKEKSSFGFIDYYDRRYAALAILSLNGRQLYGQPIKVNWAYTSTPREDTSGHFNIFVGDLCPEVTDATLFAFFSGYSTCSDARVMWDQKTGRSRGFGFVSFRNQQDAQSAINDLNGKWLGNRQIRCNWATKGANAGEEKQILDTKVDLSNGSSESGKENPNDDGPENNPQFTTVYVGNLPHEATMNDVHLFFHSLGAGSIEEVRVTRDKGFGFVRYSTHEEAALAIQMGNGQLIGGRQIKCSWGSKPTPQGTASLPLPPPALAPFSTGVSATDLLAYQRLTLSKMASNPALMGQHALKQVAALGIGGGASQSIYDGGFQGINTATSTTSVQQQQQLMYY

SEQ ID NO: 5906 - DNA, 1320 bp, Zea mays subsp. mays
  misc_feature (1)..(1320): Ceres Seq. ID no. 12409283
  misc_feature (1)..(1320): Ortholog of  Ceres SEQ ID NO 13595202 as cited in SEQ ID NO 56273
agaaaggattctatactaatgcttgagtgtcgccttgttcaacttctcaaccaaggcagagagagttttcatccggcagccgccgagcctgagatccctgcaccgccgcccgccggcccgccggaatggagttcgccttagtcgagagtgaatcgttctcgccttcctgccccacgcttaccatgccagcgctgtcgattggcaacgtggggcagctcgccgtcgaccttctcatatcctcgtcgcgggcgaggcgggtggcctacctcgacgagccctccgtgctgccctgcgccggcaacgacgccttcggccctgacgccgtcggcgacctcgcactcgctctcgaagcttatgaatctacatctcataagctggctttcattcagcaaaggtctccagttactacaggaatgatggtttcatttgcaaaaaatgttgctgatttcataagcagcatcgggaaggaccatattgtcattatatcaagtttagattctggaaagaggagagtgattgatgcatccagtgacatgcaggtgtattacctttcaagttgcaatgaagatggttctgatccagaatatgagaaattggggtggaaaaagcttgaggattacgatccatctcagaaacgttggaattatcttgctagcctggttaagggtggtggtctttcagaagatatggatgatgatactgatgagatgacaataaatgattactatgcaagcttgccatttgcagcactattctctgcctgcaaggctaaaggcttgaaagtttcttgtgtcctgtgctactgctcggaaggcgacaacatgccagaatctttccagttagctgaagcaatatgcaaacttctaggtcatggccctgagaaattccatggaaatgggtcaaatgggtggatcgttcccttgtcatggaaatcagtttatggaccaccacctgatatgtctatcttttagtgttgaattatgatctggtgaagttgccatcacggaaaatgctgagtagaatcgaggatgttgaactcttcatttagacagagtaccagaagtatccaggaaggtgagttgcagacgtttgtggtcagttggtaaaggattactgaacactcaaggatggaacttctgcaggcaccatgatactgaacccttaaatgcatgaatcagaatatttttgcaacttgtactgtggctactgagagtcagatctttgtcaactcaggtctgctagggtgcttaccatcatactgccgtttccattctaaccatggaattccaagcttctcgtctgccgttttggcagttttgc

SEQ ID NO: 5907 - protein, 281 aa, Zea mays subsp. mays
  peptide (1)..(281): Ceres Seq. ID no. 12409284
MEFALVESESFSPSCPTLTMPALSIGNVGQLAVDLLISSSRARRVAYLDEPSVLPCAGNDAFGPDAVGDLALALEAYESTSHKLAFIQQRSPVTTGMMVSFAKNVADFISSIGKDHIVIISSLDSGKRRVIDASSDMQVYYLSSCNEDGSDPEYEKLGWKKLEDYDPSQKRWNYLASLVKGGGLSEDMDDDTDEMTINDYYASLPFAALFSACKAKGLKVSCVLCYCSEGDNMPESFQLAEAICKLLGHGPEKFHGNGSNGWIVPLSWKSVYGPPPDMSIF

SEQ ID NO: 5908 - protein, 262 aa, Zea mays subsp. mays
  peptide (1)..(262): Ceres Seq. ID no. 12409285
MPALSIGNVGQLAVDLLISSSRARRVAYLDEPSVLPCAGNDAFGPDAVGDLALALEAYESTSHKLAFIQQRSPVTTGMMVSFAKNVADFISSIGKDHIVIISSLDSGKRRVIDASSDMQVYYLSSCNEDGSDPEYEKLGWKKLEDYDPSQKRWNYLASLVKGGGLSEDMDDDTDEMTINDYYASLPFAALFSACKAKGLKVSCVLCYCSEGDNMPESFQLAEAICKLLGHGPEKFHGNGSNGWIVPLSWKSVYGPPPDMSIF

SEQ ID NO: 5909 - protein, 185 aa, Zea mays subsp. mays
  peptide (1)..(185): Ceres Seq. ID no. 12409286
MMVSFAKNVADFISSIGKDHIVIISSLDSGKRRVIDASSDMQVYYLSSCNEDGSDPEYEKLGWKKLEDYDPSQKRWNYLASLVKGGGLSEDMDDDTDEMTINDYYASLPFAALFSACKAKGLKVSCVLCYCSEGDNMPESFQLAEAICKLLGHGPEKFHGNGSNGWIVPLSWKSVYGPPPDMSIF

SEQ ID NO: 5910 - DNA, 1518 bp, Zea mays subsp. mays
  misc_feature (1)..(1518): Ceres Seq. ID no. 12409279
  misc_feature (1)..(1518): Ortholog of  Ceres SEQ ID NO 14316239 as cited in SEQ ID NO 54472
  misc_feature (1)..(1518): Ortholog of  Ceres SEQ ID NO 13654809 as cited in SEQ ID NO 62798
ttttttcgcctataattactcttccccgtgcgccctcgcgaggtcgaacccccaaggcgaggcgacgaaaccctcgccagtccccaactcgaacctcagtcaggcggcgtgagggagggagagttcgaggaccgaggcggcgtcgggcgagatgaagcttaacgtcaagaccctcaagggcaccaacttcgagatcgaggcgagccccgatgcgtcggttgctgacgtgaagaggatcattgagaccactcagggtcagagtacctaccgggcggaccagcaaatgcttatataccaagggaaaattctcaaggatgagaccactttggaaagcaacggagttgctgagaacagcttccttgttataatgttgtccaaggctaaggcatcgtcgagtggagcttctaccactactgctgcaaaagctcctgcaactctggcccaacctgctgcccctgtgccccctgctgcatcagttgcaagaacaccaacacaggctcctgttgccacagctgaaacggcacctccaagtgcccaacctcaggctgctccagctgctacggttgctgctactgatgatgctgatgtgtacagtcaggcagcttcaaaccttgtatctggcaacagtctagaacagactatccaacaaattcttgacatgggtggtggtacatgggaacgtgatacagttgttcgtgctctacgtgctgcatacaataaccctgagagagctatagactacctgtattctggaattcctgagaatgtggaggctcagcctgttgcccgagcacctgctgctggccaacaaacaaatcagcaggccgcatcacccgctcagccagcagttgcattgccagtgcagccatcacctgcctctgcagggcctaatgcaaatcctttgaacctttttcctcagggtgttccaagtggtgggtccaacccaggcgttattccaggtgctggatctggtgcccttgatgccttgcgacagcttccacagtttcaagcactccttcagttagtccaggctaatcctcaaatcttgcagccaatgcttcaagagctaggtaaacaaaacccacaaattctgcggttgattcaggaaaatcaagctgagtttctccgcttggtgaatgaatctcctgagggtggtcctggagggaacatactaggtcaactggcagctgctgtgccacaaacgctgacagttaccccagaggaacgggaggctatccagcggctcgagggaatggggttcaaccgtgagcttgtgctagaagttttctttgcatgcaacaaggacgaagagcttacagccaactaccttctggatcatggccatgagtttgacgagcagcagcaatagacgtggggtggatggaggaaaccgaggcagttgcagaacagcgagtgtcgttcttatgctatgctgctgactatcttttatttccatatatatttgttcggaatgctttctaagtacatattaattcaatatcaagcgttataccgtgc

SEQ ID NO: 5911 - protein, 405 aa, Zea mays subsp. mays
  peptide (1)..(405): Ceres Seq. ID no. 12409280
MKLNVKTLKGTNFEIEASPDASVADVKRIIETTQGQSTYRADQQMLIYQGKILKDETTLESNGVAENSFLVIMLSKAKASSSGASTTTAAKAPATLAQPAAPVPPAASVARTPTQAPVATAETAPPSAQPQAAPAATVAATDDADVYSQAASNLVSGNSLEQTIQQILDMGGGTWERDTVVRALRAAYNNPERAIDYLYSGIPENVEAQPVARAPAAGQQTNQQAASPAQPAVALPVQPSPASAGPNANPLNLFPQGVPSGGSNPGVIPGAGSGALDALRQLPQFQALLQLVQANPQILQPMLQELGKQNPQILRLIQENQAEFLRLVNESPEGGPGGNILGQLAAAVPQTLTVTPEEREAIQRLEGMGFNRELVLEVFFACNKDEELTANYLLDHGHEFDEQQQ

SEQ ID NO: 5912 - protein, 361 aa, Zea mays subsp. mays
  peptide (1)..(361): Ceres Seq. ID no. 12409281
MLIYQGKILKDETTLESNGVAENSFLVIMLSKAKASSSGASTTTAAKAPATLAQPAAPVPPAASVARTPTQAPVATAETAPPSAQPQAAPAATVAATDDADVYSQAASNLVSGNSLEQTIQQILDMGGGTWERDTVVRALRAAYNNPERAIDYLYSGIPENVEAQPVARAPAAGQQTNQQAASPAQPAVALPVQPSPASAGPNANPLNLFPQGVPSGGSNPGVIPGAGSGALDALRQLPQFQALLQLVQANPQILQPMLQELGKQNPQILRLIQENQAEFLRLVNESPEGGPGGNILGQLAAAVPQTLTVTPEEREAIQRLEGMGFNRELVLEVFFACNKDEELTANYLLDHGHEFDEQQQ

SEQ ID NO: 5913 - protein, 333 aa, Zea mays subsp. mays
  peptide (1)..(333): Ceres Seq. ID no. 12409282
MLSKAKASSSGASTTTAAKAPATLAQPAAPVPPAASVARTPTQAPVATAETAPPSAQPQAAPAATVAATDDADVYSQAASNLVSGNSLEQTIQQILDMGGGTWERDTVVRALRAAYNNPERAIDYLYSGIPENVEAQPVARAPAAGQQTNQQAASPAQPAVALPVQPSPASAGPNANPLNLFPQGVPSGGSNPGVIPGAGSGALDALRQLPQFQALLQLVQANPQILQPMLQELGKQNPQILRLIQENQAEFLRLVNESPEGGPGGNILGQLAAAVPQTLTVTPEEREAIQRLEGMGFNRELVLEVFFACNKDEELTANYLLDHGHEFDEQQQ

SEQ ID NO: 5914 - DNA, 1676 bp, Zea mays subsp. mays
  misc_feature (1)..(1676): Ceres Seq. ID no. 12359529
  misc_feature (1)..(1676): Ortholog of  Ceres SEQ ID NO 15176433 as cited in SEQ ID NO 59539
gtacaagtacaaggatacagccgcaggcccgcagaggaagaggagagcctactctcctgccatggccgcgccgagtccgctcccccgcttcctgatactcctgctcgccgtaacctcctccgcgtttgccgccgccgcggcaaccggggctccggtggtgggggaggactacgtccgtccgccgccggcgcggtgccaccgcaaggcactccttagcctcttcccttggagcaagaaggaggagtccgccgcctcctccgatccgcagcaggtgcacatttctctagctggagaaaagcacatgagaataacatgggttaccaatgataactctgtcccatctgtggtggactatggaactaaagaaagtacatacacaatgaaatctcaaggagaaagcacatcctacagctacttattgtatagttcaggaaaaattcatcatgttgtcatcggacctcttgaagataacactatttattactaccgatgtggagggcagggtccagaattccaatttaagaccccgccctcccaatttcctttgtcattggctgttgttggtgatcttggtcagactagttggacaacatcaaccctgaatcacattaagcagtgtgagcatgatatgcttttactccctggtgatctatcttatgctgattatatgcaacacttgtgggattccttcggcacattggtggagccacttgctagcaaccggccttggatggtgacagaaggcaaccatgagaaggagcacattccattttttgagtcaggatttcaatcttataatgcacgatggaaaatgccttatgaagagagcggatctagatcaaatttgtactactcttttgaagttgctggtgcacacatcataatgctaggttcatacacagattatgatgatagctcagatcagtatgcttggctaaaggctgatcttgccaaggttgatagaaagaggacaccctggctcattgtgttgttgcacgtaccatggtacaatagcaattgggctcatcagggtgaaggcgacagtatgatggcttcaatggagcctttgctgtacgctgctcatgtggatatggtaatagcaggtcatgtccatgcttatgaacgtgcggagcgagtctacaattccagacctgatccttgtggcgctgtccacataactatcggcgacggtgggaaccgtgaaggcttggcccgcaggtaccgtaacccgaagccagcgtggtcggtcttcagggaagcgagctttgggcacggcgagctaaagatcgtgaactccacccatgcccactggacctggcacagaaacgacgacgaagagccggtgagaaccgatgacgtgtggataaactctcttgctggttcagggtgcatccaggagggcagccgtgaccgtgagtcgaggaagatcctgatgtctccttgatgcttagcagtatagcttgggcctgcgatgtactgtgtatataatgcgtgctacttgataatctaacacctagtaaaagttaatgcgtcgtgctgcttgcctgcgtgtatactggagactggtttgatctggcgcgtttgctgctcttgttgtgttgtaccactatggatgtttgtagcaaagtgacatacgacggtgttgtaatggactgaagatgaatagatgatgttcc

SEQ ID NO: 5915 - protein, 480 aa, Zea mays subsp. mays
  peptide (1)..(480): Ceres Seq. ID no. 12359530
YKYKDTAAGPQRKRRAYSPAMAAPSPLPRFLILLLAVTSSAFAAAAATGAPVVGEDYVRPPPARCHRKALLSLFPWSKKEESAASSDPQQVHISLAGEKHMRITWVTNDNSVPSVVDYGTKESTYTMKSQGESTSYSYLLYSSGKIHHVVIGPLEDNTIYYYRCGGQGPEFQFKTPPSQFPLSLAVVGDLGQTSWTTSTLNHIKQCEHDMLLLPGDLSYADYMQHLWDSFGTLVEPLASNRPWMVTEGNHEKEHIPFFESGFQSYNARWKMPYEESGSRSNLYYSFEVAGAHIIMLGSYTDYDDSSDQYAWLKADLAKVDRKRTPWLIVLLHVPWYNSNWAHQGEGDSMMASMEPLLYAAHVDMVIAGHVHAYERAERVYNSRPDPCGAVHITIGDGGNREGLARRYRNPKPAWSVFREASFGHGELKIVNSTHAHWTWHRNDDEEPVRTDDVWINSLAGSGCIQEGSRDRESRKILMSP

SEQ ID NO: 5916 - protein, 460 aa, Zea mays subsp. mays
  peptide (1)..(460): Ceres Seq. ID no. 12359531
MAAPSPLPRFLILLLAVTSSAFAAAAATGAPVVGEDYVRPPPARCHRKALLSLFPWSKKEESAASSDPQQVHISLAGEKHMRITWVTNDNSVPSVVDYGTKESTYTMKSQGESTSYSYLLYSSGKIHHVVIGPLEDNTIYYYRCGGQGPEFQFKTPPSQFPLSLAVVGDLGQTSWTTSTLNHIKQCEHDMLLLPGDLSYADYMQHLWDSFGTLVEPLASNRPWMVTEGNHEKEHIPFFESGFQSYNARWKMPYEESGSRSNLYYSFEVAGAHIIMLGSYTDYDDSSDQYAWLKADLAKVDRKRTPWLIVLLHVPWYNSNWAHQGEGDSMMASMEPLLYAAHVDMVIAGHVHAYERAERVYNSRPDPCGAVHITIGDGGNREGLARRYRNPKPAWSVFREASFGHGELKIVNSTHAHWTWHRNDDEEPVRTDDVWINSLAGSGCIQEGSRDRESRKILMSP

SEQ ID NO: 5917 - protein, 380 aa, Zea mays subsp. mays
  peptide (1)..(380): Ceres Seq. ID no. 12359532
MRITWVTNDNSVPSVVDYGTKESTYTMKSQGESTSYSYLLYSSGKIHHVVIGPLEDNTIYYYRCGGQGPEFQFKTPPSQFPLSLAVVGDLGQTSWTTSTLNHIKQCEHDMLLLPGDLSYADYMQHLWDSFGTLVEPLASNRPWMVTEGNHEKEHIPFFESGFQSYNARWKMPYEESGSRSNLYYSFEVAGAHIIMLGSYTDYDDSSDQYAWLKADLAKVDRKRTPWLIVLLHVPWYNSNWAHQGEGDSMMASMEPLLYAAHVDMVIAGHVHAYERAERVYNSRPDPCGAVHITIGDGGNREGLARRYRNPKPAWSVFREASFGHGELKIVNSTHAHWTWHRNDDEEPVRTDDVWINSLAGSGCIQEGSRDRESRKILMSP

SEQ ID NO: 5918 - DNA, 1551 bp, Zea mays subsp. mays
  misc_feature (1)..(1551): Ceres Seq. ID no. 12344145
  misc_feature (1)..(1551): Ortholog of  Ceres SEQ ID NO 15177328 as cited in SEQ ID NO 52523
  misc_feature (1)..(1551): Ortholog of  Ceres SEQ ID NO 13655881 as cited in SEQ ID NO 64426
attcctactccgagtcgccacctgcatttgtctatcggtcaggagcatggaggggagacggctttcacgccagcagttgcgctcgctaccggacgccgcgtccttctcgccggaagtcgcggccagcccggggctcgtcggctccggccagttgggtctcggtctctcggcggcgttcgagactctgccgccgattttggtagaagtgaatggctttacaaggacactgattttgaataggccaaagcagttaaatgcactctcctcgaccatgattatgggactcttgaggtgtttcactgcttatgagaaagacgatggagttaaattgttgattatgaagggtaaaggaagagcattttgtgctggaggtgatgttgctgcagttgttcgatctatacataaagacagctggaaatatggtgctgatttcttccgaaatgaatttttgttgaattacataattgcaacttataccaaacctcaggtttctcttcttagtggaatcgtcatgggtggaggtgctggcgtttctttacatggaaggtttagagttgccaccgataacacggtttttgcaatgccagaaacagctctgggtctctttccagatataggggcctcatattttctgtctcggcttcctggattctatggagagtatgttggtcttgctggtgccagattggatggtggggaaatgcttgcatgtggtctggcaactcattttgtccagtcaaatagtctgctatcgctggaagaatcacttaaaaaggtggatacttccaatgcttttgcagtgtgtggtatcatcgatcaatttgctcaacaaccatcactgaaagaaagcagctctttgaataggttggaaatcatcaacaaatgcttttccaaaaggacagtcgaagaaattatatccgctcttgaagtagaggcctcaaattcggcagatgaatgggttgctacaacaatccagtccttgaagaaggcttctcctaccagtctgaaaatctctctgagatcgataagagaagggaggacacaaactgttggggagtgcttgcagcgggaatatagaatggtctgccatgtcatgcgtggtgacttcagcagagacttctttgagggatgcagggctatattgctagataaagatcgaaacccaaagtggatgcctccaaggttggaacaagtgcatgatgaggctgttgaacagtatttctccagaattgatgatccacagtgggaagacttgaacctacctgctagacgctcccacggaagaaatatcgagtccaagctttgatcgaaggtcatgggagaaaggtggaactctggaacggagcctcggtagtggtcagaataacacattattgcacatcatctcaagtttgaagagtctgcagactattgataaaataaaaacatgaatgtgccatataggtcaacttgtatcacagaaagaaactctttgctgtttatacgtggagactggagtcatatgcatttttaaataattataagtaataaaatcgaaaaagaaatcgttgg

SEQ ID NO: 5919 - protein, 434 aa, Zea mays subsp. mays
  peptide (1)..(434): Ceres Seq. ID no. 12344146
FLLRVATCICLSVRSMEGRRLSRQQLRSLPDAASFSPEVAASPGLVGSGQLGLGLSAAFETLPPILVEVNGFTRTLILNRPKQLNALSSTMIMGLLRCFTAYEKDDGVKLLIMKGKGRAFCAGGDVAAVVRSIHKDSWKYGADFFRNEFLLNYIIATYTKPQVSLLSGIVMGGGAGVSLHGRFRVATDNTVFAMPETALGLFPDIGASYFLSRLPGFYGEYVGLAGARLDGGEMLACGLATHFVQSNSLLSLEESLKKVDTSNAFAVCGIIDQFAQQPSLKESSSLNRLEIINKCFSKRTVEEIISALEVEASNSADEWVATTIQSLKKASPTSLKISLRSIREGRTQTVGECLQREYRMVCHVMRGDFSRDFFEGCRAILLDKDRNPKWMPPRLEQVHDEAVEQYFSRIDDPQWEDLNLPARRSHGRNIESKL

SEQ ID NO: 5920 - protein, 419 aa, Zea mays subsp. mays
  peptide (1)..(419): Ceres Seq. ID no. 12344147
MEGRRLSRQQLRSLPDAASFSPEVAASPGLVGSGQLGLGLSAAFETLPPILVEVNGFTRTLILNRPKQLNALSSTMIMGLLRCFTAYEKDDGVKLLIMKGKGRAFCAGGDVAAVVRSIHKDSWKYGADFFRNEFLLNYIIATYTKPQVSLLSGIVMGGGAGVSLHGRFRVATDNTVFAMPETALGLFPDIGASYFLSRLPGFYGEYVGLAGARLDGGEMLACGLATHFVQSNSLLSLEESLKKVDTSNAFAVCGIIDQFAQQPSLKESSSLNRLEIINKCFSKRTVEEIISALEVEASNSADEWVATTIQSLKKASPTSLKISLRSIREGRTQTVGECLQREYRMVCHVMRGDFSRDFFEGCRAILLDKDRNPKWMPPRLEQVHDEAVEQYFSRIDDPQWEDLNLPARRSHGRNIESKL

SEQ ID NO: 5921 - protein, 344 aa, Zea mays subsp. mays
  peptide (1)..(344): Ceres Seq. ID no. 12344148
MIMGLLRCFTAYEKDDGVKLLIMKGKGRAFCAGGDVAAVVRSIHKDSWKYGADFFRNEFLLNYIIATYTKPQVSLLSGIVMGGGAGVSLHGRFRVATDNTVFAMPETALGLFPDIGASYFLSRLPGFYGEYVGLAGARLDGGEMLACGLATHFVQSNSLLSLEESLKKVDTSNAFAVCGIIDQFAQQPSLKESSSLNRLEIINKCFSKRTVEEIISALEVEASNSADEWVATTIQSLKKASPTSLKISLRSIREGRTQTVGECLQREYRMVCHVMRGDFSRDFFEGCRAILLDKDRNPKWMPPRLEQVHDEAVEQYFSRIDDPQWEDLNLPARRSHGRNIESKL

SEQ ID NO: 5922 - DNA, 2017 bp, Zea mays subsp. mays
  misc_feature (1)..(2017): Ceres Seq. ID no. 12405563
  misc_feature (1)..(2017): Ortholog of  Ceres SEQ ID NO 13584744 as cited in SEQ ID NO 69137
aatcaggctcgcggccgagccaccgaggagcaaagcaaagctctcgttggtcgtggcggcagcggcggcgcgcggtgtcgagctgcggcgctgaaggcaagagagccgcgcgccgtgaagagtcgtcgtcgatccccgtccgagctccgtcgcttcattgatgaatgccgaagctatagcggtccttgctcgttccaaggttcgatgccccggtcgccgcccggatgacactgccaaccccggtggtagccggcgttgcggctggcgccgccgcgctgctactggccgccgccctcgccgtggcgtggtggtggctcgtgatcgtgaggcggcgccggcgccgtgaccggagctccgacaccggatcctcgtcggaggctcctcctcccacgctggcggagtggggccggtgcggccgcacctcgtcggcgcccgagttccacggcgccaggcagttctcgctggaggagctggcgcacgccaccaacggcttcgccgaggccaacctggtcggcgcgggggcctttggcctggtgtacaagggcctgctgctagacggcaccgtcgtcgccatcaagcgccgcgcgggcgcgccgcgccaggacttcgcaaacgagatcaggaggctgtcagagatctggcaccgcaacgtcgtgacgttgatcggcttctgccaagaaggcggtctacagatgctggtgttcgaatacctgcccaacgccagtgtcagcggccacttgtacgacaccggcaaggagaggatgaccaggctggagttcaagcagaggctgtcaatagccattggagcagctaaaggtctgagtcacctccacagcctggcgccgccgctgatccacagggacttcaagacgagcaacgtgctggtcgacgagaacttcatcgccaaggtgtccgacgccgggatccacaggctgctgcgagggactgatggtggcgccgtcgccgctccggcgagtcgcggtgtcttccaagacccggagtgagtagtagcaaaccagcccggcctggatgaaatgtacgttctgctgccatctggattcttaccatgcatgcatgcactgcgttcctggcgtgctcgcttgcactgcagggtacattcatcggcgcaggcgcagctctctgagagcagcgacgtgtacagcttcggggtgttccttgtggagctggtcacaggcagggaggctgcggggctgatgccgccggggtccagcaaggactctctcgctcaatggatggaggcgcgtttcggctcgaacgagctggtcgacccgaggctgggagggagcttcacctcggagggtatggcggaggtggtgggcctggcgtccagctgcctgagcccgtcggcgaggcggcggcccaggatgcggctggtggcggcggagctggaccggatcctggagaaggagatggccctgaccaccgtcatgggcgatggcggcaccgccatcgtcacgctcggcagccagctcttcacgtcctgactgaccgggatccgatggctggcatggcatcatcgacccaaggaggaagcatggtcgccgacgacgagacccccgcgttgcttccttcgtgtcctgggccgggagctgaacgacgcaacgcaacgcgatgcaagcagttcgtggccggtgattctccagctcactgctccacctcaggaaatttcaagagaccgcgacaggcgcgcgaacctgtgtcctgcattttcttcagtcttccatgttcagagttccgttggatttcatccagcagctcagccaaaatatgtgcatatgtaaaaattcacatctggaattggaagatggaatttatactagtactagattagacgcagaggctgagaggcatattttggggtgtggaacctcatcagccagggtcacttatttccatttgtttattctttctctgaaacaacaacatgcgatgcgacactgcagctctcccaaaccgaactgtacccaaccgaagcgtgtcagtccagttcaatttt

SEQ ID NO: 5923 - protein, 259 aa, Zea mays subsp. mays
  peptide (1)..(259): Ceres Seq. ID no. 12405564
MTLPTPVVAGVAAGAAALLLAAALAVAWWWLVIVRRRRRRDRSSDTGSSSEAPPPTLAEWGRCGRTSSAPEFHGARQFSLEELAHATNGFAEANLVGAGAFGLVYKGLLLDGTVVAIKRRAGAPRQDFANEIRRLSEIWHRNVVTLIGFCQEGGLQMLVFEYLPNASVSGHLYDTGKERMTRLEFKQRLSIAIGAAKGLSHLHSLAPPLIHRDFKTSNVLVDENFIAKVSDAGIHRLLRGTDGGAVAAPASRGVFQDPE

SEQ ID NO: 5924 - protein, 200 aa, Zea mays subsp. mays
  peptide (1)..(200): Ceres Seq. ID no. 12405565
MDGGAFRLERAGRPEAGRELHLGGYGGGGGPGVQLPEPVGEAAAQDAAGGGGAGPDPGEGDGPDHRHGRWRHRHRHARQPALHVLTDRDPMAGMASSTQGGSMVADDETPALLPSCPGPGAERRNATRCKQFVAGDSPAHCSTSGNFKRPRQAREPVSCIFFSLPCSEFRWISSSSSAKICAYVKIHIWNWKMEFILVLD

SEQ ID NO: 5925 - protein, 156 aa, Zea mays subsp. mays
  peptide (1)..(156): Ceres Seq. ID no. 12405566
MYVLLPSGFLPCMHALRSWRARLHCRVHSSAQAQLSESSDVYSFGVFLVELVTGREAAGLMPPGSSKDSLAQWMEARFGSNELVDPRLGGSFTSEGMAEVVGLASSCLSPSARRRPRMRLVAAELDRILEKEMALTTVMGDGGTAIVTLGSQLFTS

SEQ ID NO: 5926 - DNA, 1047 bp, Zea mays subsp. mays
  misc_feature (1)..(1047): Ceres Seq. ID no. 12349973
  misc_feature (1)..(1047): Ortholog of  Ceres SEQ ID NO 12557497 as cited in SEQ ID NO 43
  misc_feature (1)..(1047): Ortholog of  Ceres SEQ ID NO 13600601 as cited in SEQ ID NO 497
  misc_feature (1)..(1047): Ortholog of  Ceres SEQ ID NO 13664283 as cited in SEQ ID NO 61283
  misc_feature (1)..(1047): Ortholog of  Ceres SEQ ID NO 12635513 as cited in SEQ ID NO 0
  misc_feature (1)..(1047): Ortholog of  Ceres SEQ ID NO 15179044 as cited in SEQ ID NO 0
  misc_feature (1)..(1047): Ortholog of  Ceres SEQ ID NO 15179333 as cited in SEQ ID NO 0
cacgccacgctctccaacgccacagcttgcgcccgcaatggcactcgtctccgcctcctcgtcctccaccaccgccgtcacggcgctccccaggaatgggcagcgggcgtcgtcctccttcctcggcggcaagacgctgctgagacaggccgaggcggcccggccgtcgttcgccgtgcgcgccgcggcggaccccaacaggccgatctggttccccggcagcacccctccgccgtggctcgacggcagccttcccggcgacttcggctttgatccctggggcctcggatctgacccggagagcctgcggtggaacgtgcaggcggagctggtgcactgccggtgggcgatgctcggcgcggcgggcatcttcatcccggagttcctgaccaagatcggcgtcctcaacacgcccttctggtacaccgccggcgagcagcagtacttcaccgacaccaccaccctcttcatcatcgagctcatcctcatcggctgggccgagggccgccgctgggctgacatcatcaagcccggaagcgtcaacaccgaccccatcttccccagcaacaagctcaccggcaccgacgtcgggtaccctggtggcctctggtttgacccgctcggctggggcagcggctcgccggagaagatcaaggagctgcgcaccaaggagatcaagaacggacgcctcgccatgctcgccgtcatgggcgcctggttccaggccgagtacaccggcaccggccccatcgacaacctcttcgcccacctcgccgaccctggccacgccaccatcttccaggccttcacccccaaatgaggagttgaacttattattagcattttgaggagtgctaccacacatgcatcgtcaggttgatggccgatatatatgaaacttcacattttttttggtggggaaggactgctgagtagactgtcaatgatggaatgctcgtggtgcgagtgcgatgcatggtgtacttgtactatgttgtaaccagtgtaaaaaggggatactcgttagatgttatgccatgttcactg

SEQ ID NO: 5927 - protein, 272 aa, Zea mays subsp. mays
  peptide (1)..(272): Ceres Seq. ID no. 12349974
TPRSPTPQLAPAMALVSASSSSTTAVTALPRNGQRASSSFLGGKTLLRQAEAARPSFAVRAAADPNRPIWFPGSTPPPWLDGSLPGDFGFDPWGLGSDPESLRWNVQAELVHCRWAMLGAAGIFIPEFLTKIGVLNTPFWYTAGEQQYFTDTTTLFIIELILIGWAEGRRWADIIKPGSVNTDPIFPSNKLTGTDVGYPGGLWFDPLGWGSGSPEKIKELRTKEIKNGRLAMLAVMGAWFQAEYTGTGPIDNLFAHLADPGHATIFQAFTPK

SEQ ID NO: 5928 - protein, 260 aa, Zea mays subsp. mays
  peptide (1)..(260): Ceres Seq. ID no. 12349975
MALVSASSSSTTAVTALPRNGQRASSSFLGGKTLLRQAEAARPSFAVRAAADPNRPIWFPGSTPPPWLDGSLPGDFGFDPWGLGSDPESLRWNVQAELVHCRWAMLGAAGIFIPEFLTKIGVLNTPFWYTAGEQQYFTDTTTLFIIELILIGWAEGRRWADIIKPGSVNTDPIFPSNKLTGTDVGYPGGLWFDPLGWGSGSPEKIKELRTKEIKNGRLAMLAVMGAWFQAEYTGTGPIDNLFAHLADPGHATIFQAFTPK

SEQ ID NO: 5929 - protein, 156 aa, Zea mays subsp. mays
  peptide (1)..(156): Ceres Seq. ID no. 12349976
MLGAAGIFIPEFLTKIGVLNTPFWYTAGEQQYFTDTTTLFIIELILIGWAEGRRWADIIKPGSVNTDPIFPSNKLTGTDVGYPGGLWFDPLGWGSGSPEKIKELRTKEIKNGRLAMLAVMGAWFQAEYTGTGPIDNLFAHLADPGHATIFQAFTPK

SEQ ID NO: 5930 - DNA, 1531 bp, Zea mays subsp. mays
  misc_feature (1)..(1531): Ceres Seq. ID no. 12358328
  misc_feature (1)..(1531): Ortholog of  Ceres SEQ ID NO 14301836 as cited in SEQ ID NO 67386
atcagcgctagcttagctatccggccgcatccgctgctcgcctcctcacttgagcgtgtgtcgtgtagcatttagtcagctgctcctgcttgctagggttagggtttgcgggcgcgcgcgcgcgtgcccgcgcgcgagctggccgcgggagggatgacgccgcaccggtcgccggcggggaccggaggaagtggcggcggagggccgccggcgctacactacctgagcggcccttacggagacaccaccttcaccaaggttttcgtgggcggcctcgcctgggagacgcggagtgaggggcttcgcgcccactttgaggtctacggggacatcctcgaggccgttgtcatcaccgaccgcgccacaggccgctccaagggctacggattcgtaaccttccaggacccagagtcggcgaggatggcctgcatggacccatatccagtgatcgatggccggccgtgctaattgcaaccttgccatcttagggcgtcctggtccagctgtgcctttcggccatcagcatatggacctgaatacctatatcagcagctttgtagaatgcatatggtccatatgttggacaacagtatattccagtttacggtggcccaaggacagtaggcccagcagtctacccatatgggcagtctggccaacctgtaccaagtgatcatgcttattctcttggttatgccccaagtcgtgttctcccactatcgaatcagaatgttaacgctgcaaatgttgtgcgcataccaccacttcaacaatttcctccaggagctccacgacctcagcaacagcttttggcccctgctcgtgcaccgccattcccacagaacaacgtttctgaacaagcgacaggttgacaaggatgccagaaagtgacgaattttaggtatcctatagtctgcagcaggactaagaaaagttgtaccgctaaattgggcggcatgcttttttcttgcaaattgttttcgtttgctctctaaagtctgcaggttgtccctatccatggttacctgaacttcttataacgtgagtgtctgatctgctccgcgggaaggggcaggcaagctcgagcgactgaagatgaagcccctcttgctcagcttctgtcagtgtctgtacattccccatctgccagacatcctgatagctgatggtctgtgcaggaccaaagtggatgccggaaatggagtccggcctccaacctgtgtataatataggtcatgtagtggtccaaatcgtagaacaggtccattctttgaaaacatctggttgtgtatattaattctcttagcaccttcagtgcatgttttcatgtctcattagagggaataggtatttcaatgtcattgcattgtcagtgagtcatgtacattattatactgaaaatgtaaactatatatgtcatctgtgtcaactgacaactgtaatcaaataatgacatccctatcttgggaaagaacatgatttattgcaagttgcaacggatggggaaaactagggatggatacggatactt

SEQ ID NO: 5931 - protein, 104 aa, Zea mays subsp. mays
  peptide (1)..(104): Ceres Seq. ID no. 12358329
MTPHRSPAGTGGSGGGGPPALHYLSGPYGDTTFTKVFVGGLAWETRSEGLRAHFEVYGDILEAVVITDRATGRSKGYGFVTFQDPESARMACMDPYPVIDGRPC

SEQ ID NO: 5932 - protein, 82 aa, Zea mays subsp. mays
  peptide (1)..(82): Ceres Seq. ID no. 12358330
MGSLANLYQVIMLILLVMPQVVFSHYRIRMLTLQMLCAYHHFNNFLQELHDLSNSFWPLLVHRHSHRTTFLNKRQVDKDARK

SEQ ID NO: 5933 - protein, 73 aa, Zea mays subsp. mays
  peptide (1)..(73): Ceres Seq. ID no. 12358331
MAGRANCNLAILGRPGPAVPFGHQHMDLNTYISSFVECIWSICWTTVYSSLRWPKDSRPSSLPIWAVWPTCTK

SEQ ID NO: 5934 - DNA, 1400 bp, Zea mays subsp. mays
  misc_feature (1)..(1400): Ceres Seq. ID no. 12347987
  misc_feature (1)..(1400): Ortholog of  Ceres SEQ ID NO 12364737 as cited in SEQ ID NO 51089
  misc_feature (1)..(1400): Ortholog of  Ceres SEQ ID NO 14311515 as cited in SEQ ID NO 51680
  misc_feature (1)..(1400): Ortholog of  Ceres SEQ ID NO 14306553 as cited in SEQ ID NO 53121
  misc_feature (1)..(1400): Ortholog of  Ceres SEQ ID NO 12581561 as cited in SEQ ID NO 53617
  misc_feature (1)..(1400): Ortholog of  Ceres SEQ ID NO 14316263 as cited in SEQ ID NO 55294
  misc_feature (1)..(1400): Ortholog of  Ceres SEQ ID NO 13582301 as cited in SEQ ID NO 56509
  misc_feature (1)..(1400): Ortholog of  Ceres SEQ ID NO 13595567 as cited in SEQ ID NO 56760
  misc_feature (1)..(1400): Ortholog of  Ceres SEQ ID NO 14315035 as cited in SEQ ID NO 56880
  misc_feature (1)..(1400): Ortholog of  Ceres SEQ ID NO 13594147 as cited in SEQ ID NO 58975
  misc_feature (1)..(1400): Ortholog of  Ceres SEQ ID NO 15176751 as cited in SEQ ID NO 59719
  misc_feature (1)..(1400): Ortholog of  Ceres SEQ ID NO 13597380 as cited in SEQ ID NO 64054
  misc_feature (1)..(1400): Ortholog of  Ceres SEQ ID NO 12625474 as cited in SEQ ID NO 64169
  misc_feature (1)..(1400): Ortholog of  Ceres SEQ ID NO 13597502 as cited in SEQ ID NO 64681
  misc_feature (1)..(1400): Ortholog of  Ceres SEQ ID NO 15180805 as cited in SEQ ID NO 0
gaacatcctaatcaaaaccgctcgatcgcgcccccatcaatcaatcaatcaattctcgacctcactactcgatctctcgtctcatcagtgtgactgtgtgagtgtccgagcacggtagcacgcgcaatggacgctctgctcgtgactaccttcctcgtccccgtggtggcgctcctcctcggttccgggtccgggtccgcggcaccgctgccgcgcgccttcttcgtgttcggtgactccctcgtggacaacggcaacaacaactacctgatgacgacggcgcgcgccgacgcgccgccctacgggatcgacttccccacgcacatggccacggggaggttctccaacgggctgaacatccccgacatcatcagcgagcacctgggctcccagcccgcgctgccgtacctgagccccgacctccgcggcgcccagctcctggtgggcgccaacttcgcgtccgccggcgtcggcatcctcaacgacaccggcatacagttcgtgaacatcatcaggatcggacagcagctgcgcaacttccaggagtaccagcagaggctggcggcgttcgtcggcgaggacgcggcgcggcaggccgtcagcgacgcgctcgtgctcatcacgctcggcggcaacgacttcgtcaacaactactacctggtgcccttctccgtccgctctcgccagtttgccatccaagactacgtcccctacctcatctccgagtacaggaagatcctcacgcggctgtacgagctcggggcccggcgcgtggtggtgacgggcaccgggatgatcgggtgcgtgccggcggagctcgccatgcacagcgtcgacggcgagtgcgcgcgcgacctcacggaggcggccgacctcttcaacccgcagctggtgcagatgctctccgagctcaacgccgacatcggcgccgacgtcttcatcgccgccaacaccaaccgggtcagcttcgacttcatgttcaacccgcaggactacgggttcgtgacgtccaaggtggcgtgctgcgggcagggcccctacaacgggatcgggctgtgcacgccggcgtccaacgtgtgccccaaccgggacgtgtacgcgtactgggacgcgttccaccccacggagcgcgccaaccggatcatcgtcggccagttcatgcacggatccaccgaccacatcagccccatgaacatcagcaccatcctcgccatggacaacaggaactaggccctgcgcgtggcgtgcctcgacctcgatccatccatctctagccggctgggattgagatgccaatctgcactgccatggatccgtcccgacactggcagctataatactacgagacgacacacatagctactgcatgcatgcgtaatactactagtataagttcgtgc

SEQ ID NO: 5935 - protein, 367 aa, Zea mays subsp. mays
  peptide (1)..(367): Ceres Seq. ID no. 12347988
MDALLVTTFLVPVVALLLGSGSGSAAPLPRAFFVFGDSLVDNGNNNYLMTTARADAPPYGIDFPTHMATGRFSNGLNIPDIISEHLGSQPALPYLSPDLRGAQLLVGANFASAGVGILNDTGIQFVNIIRIGQQLRNFQEYQQRLAAFVGEDAARQAVSDALVLITLGGNDFVNNYYLVPFSVRSRQFAIQDYVPYLISEYRKILTRLYELGARRVVVTGTGMIGCVPAELAMHSVDGECARDLTEAADLFNPQLVQMLSELNADIGADVFIAANTNRVSFDFMFNPQDYGFVTSKVACCGQGPYNGIGLCTPASNVCPNRDVYAYWDAFHPTERANRIIVGQFMHGSTDHISPMNISTILAMDNRN

SEQ ID NO: 5936 - protein, 319 aa, Zea mays subsp. mays
  peptide (1)..(319): Ceres Seq. ID no. 12347989
MTTARADAPPYGIDFPTHMATGRFSNGLNIPDIISEHLGSQPALPYLSPDLRGAQLLVGANFASAGVGILNDTGIQFVNIIRIGQQLRNFQEYQQRLAAFVGEDAARQAVSDALVLITLGGNDFVNNYYLVPFSVRSRQFAIQDYVPYLISEYRKILTRLYELGARRVVVTGTGMIGCVPAELAMHSVDGECARDLTEAADLFNPQLVQMLSELNADIGADVFIAANTNRVSFDFMFNPQDYGFVTSKVACCGQGPYNGIGLCTPASNVCPNRDVYAYWDAFHPTERANRIIVGQFMHGSTDHISPMNISTILAMDNRN

SEQ ID NO: 5937 - protein, 301 aa, Zea mays subsp. mays
  peptide (1)..(301): Ceres Seq. ID no. 12347990
MATGRFSNGLNIPDIISEHLGSQPALPYLSPDLRGAQLLVGANFASAGVGILNDTGIQFVNIIRIGQQLRNFQEYQQRLAAFVGEDAARQAVSDALVLITLGGNDFVNNYYLVPFSVRSRQFAIQDYVPYLISEYRKILTRLYELGARRVVVTGTGMIGCVPAELAMHSVDGECARDLTEAADLFNPQLVQMLSELNADIGADVFIAANTNRVSFDFMFNPQDYGFVTSKVACCGQGPYNGIGLCTPASNVCPNRDVYAYWDAFHPTERANRIIVGQFMHGSTDHISPMNISTILAMDNRN

SEQ ID NO: 5938 - DNA, 1920 bp, Zea mays subsp. mays
  misc_feature (1)..(1920): Ceres Seq. ID no. 12368597
  misc_feature (1)..(1920): Ortholog of  Ceres SEQ ID NO 15169264 as cited in SEQ ID NO 55026
  misc_feature (1)..(1920): Ortholog of  Ceres SEQ ID NO 15224709 as cited in SEQ ID NO 68627
gcacgagaccattacctagaacatcctaatcgaaaagcactcgcttccttcgacggactcatcgccgatcacaccaggctagctagcccacccacagtcgtagggccaggaccgataggaggagctcggtttttccgaccaggaccgccgccgccacacccgaagaagccgacgatgcagacgacgacgacgacgtcctcggtggtggccgagctggagggcgcgctgctccggagcgcggacacgttcccgtacttcatgctcgtggcgttcgaggcgtccgggctgccgcgcttcgcgctgctgctggcgctgtggccgctgctgccggctgctggagctggcgggccggcgcggcctggcgctgcgcgccgccgcgttcgtggccaccgcgggcgtgccgcgcgccgaggtggaggcagtgtcgcgcgccgtgctgcccaagttcatggccgacgacgtcgaccccgccgcgtgggcggccttcgggagctgcgaggggacgcgcgtcgtcgtcacgcggatgccccgcgtcatggtcgaccgcttcgccagggagcacctaggcgcgcacgcggtcgtcggctgcgacctcgagtacagccggctcaggcggtccacgggtctgctaagaggcgcgagctatgaggacgtcgccacccgtgtgcgcgcgttgttcgccggcgacggctgccggccggcactcgggatcggcgggtcaaagatggcgcgctcattcttgacattctgcgaggagcagctcaggcagccattcccagcgcccaacgagacgaacgccccgccgttccggccggtcatcttccacgacgggcgcctcgtgtgccggcccacgccattcatgtccctcgtcatccttctctggctgccgctcggcgtgctggtcgccttcgtccggatcgccgtcgggctcatggtccccatctggaccgtcccctacatcgcgccggtcttcggcggcgccgtgatcacccacggccgcgcgcctccccccgccaagctcggcggcggctcgccctcgggggtcctcttcgtctgcacgcaccgcacgctcatggaccccgtggtgctggccgccgtgctcggccggcgcgtggcggccgtgacgtactccatctcccgcctctcggaggtcctctccccgatcccgacggtgcggctgacgcgcgaccgggacgcggacgcggcgcgcatgcgcgcggagctggcccgcggcggcgacgtggcggtgtgccccgagggcaccacgtgccgggagcccttcctgctccgcttctccaagctcttcgcggagctcagcgacagcatcgtgcccgtggcgatgaactaccgcgtggggctgttccacccgacgacggcgcgcgggtggaaggccatggaccccatcttcttcttcatgaacccgcggcccgtgtacgaggtgacgttcctgaaccagctccccgcggagtcgacgtgcgcggcggggaagagccccgtggacgtggccaactacgtgcagcggatactcgccgccacgctcgggttcgaatgcaccaccctcaccaggaaggacaagtacacggtgctcgcgggaaacgacggcgtcgtcaacgccaagccggcctggcagagccgcgtgaaggatgtcctcggcttcctgctccactaaccacattacttgcacggctctggactctgcgctcaaatacttcgctcaccgatttgattgagtttatactttacatttatttatacatgtaagtaagaataaccacacacaaaagcatgtagtagtaacatacagtagtgattattagcctttatttcttcacataataagtactgtatattgtattgttctttgttttacaagtgttttggtgaatttttactgggtgtaatcaaatatattttgtagtc

SEQ ID NO: 5939 - protein, 406 aa, Zea mays subsp. mays
  peptide (1)..(406): Ceres Seq. ID no. 12368598
MADDVDPAAWAAFGSCEGTRVVVTRMPRVMVDRFAREHLGAHAVVGCDLEYSRLRRSTGLLRGASYEDVATRVRALFAGDGCRPALGIGGSKMARSFLTFCEEQLRQPFPAPNETNAPPFRPVIFHDGRLVCRPTPFMSLVILLWLPLGVLVAFVRIAVGLMVPIWTVPYIAPVFGGAVITHGRAPPPAKLGGGSPSGVLFVCTHRTLMDPVVLAAVLGRRVAAVTYSISRLSEVLSPIPTVRLTRDRDADAARMRAELARGGDVAVCPEGTTCREPFLLRFSKLFAELSDSIVPVAMNYRVGLFHPTTARGWKAMDPIFFFMNPRPVYEVTFLNQLPAESTCAAGKSPVDVANYVQRILAATLGFECTTLTRKDKYTVLAGNDGVVNAKPAWQSRVKDVLGFLLH

SEQ ID NO: 5940 - protein, 381 aa, Zea mays subsp. mays
  peptide (1)..(381): Ceres Seq. ID no. 12368599
MPRVMVDRFAREHLGAHAVVGCDLEYSRLRRSTGLLRGASYEDVATRVRALFAGDGCRPALGIGGSKMARSFLTFCEEQLRQPFPAPNETNAPPFRPVIFHDGRLVCRPTPFMSLVILLWLPLGVLVAFVRIAVGLMVPIWTVPYIAPVFGGAVITHGRAPPPAKLGGGSPSGVLFVCTHRTLMDPVVLAAVLGRRVAAVTYSISRLSEVLSPIPTVRLTRDRDADAARMRAELARGGDVAVCPEGTTCREPFLLRFSKLFAELSDSIVPVAMNYRVGLFHPTTARGWKAMDPIFFFMNPRPVYEVTFLNQLPAESTCAAGKSPVDVANYVQRILAATLGFECTTLTRKDKYTVLAGNDGVVNAKPAWQSRVKDVLGFLLH

SEQ ID NO: 5941 - protein, 377 aa, Zea mays subsp. mays
  peptide (1)..(377): Ceres Seq. ID no. 12368600
MVDRFAREHLGAHAVVGCDLEYSRLRRSTGLLRGASYEDVATRVRALFAGDGCRPALGIGGSKMARSFLTFCEEQLRQPFPAPNETNAPPFRPVIFHDGRLVCRPTPFMSLVILLWLPLGVLVAFVRIAVGLMVPIWTVPYIAPVFGGAVITHGRAPPPAKLGGGSPSGVLFVCTHRTLMDPVVLAAVLGRRVAAVTYSISRLSEVLSPIPTVRLTRDRDADAARMRAELARGGDVAVCPEGTTCREPFLLRFSKLFAELSDSIVPVAMNYRVGLFHPTTARGWKAMDPIFFFMNPRPVYEVTFLNQLPAESTCAAGKSPVDVANYVQRILAATLGFECTTLTRKDKYTVLAGNDGVVNAKPAWQSRVKDVLGFLLH

SEQ ID NO: 5942 - DNA, 982 bp, Zea mays subsp. mays
  misc_feature (1)..(982): Ceres Seq. ID no. 12404445
  misc_feature (1)..(982): Ortholog of  Ceres SEQ ID NO 13599401 as cited in SEQ ID NO 0
gttttgtttccattccatcggtggcacgagacaggagacgccaaggccatagctagagcctagagcagcagcagaggcttgacctgaagctccacccgccatggcattcacgcccgctacggcctgctgcaaggcttccctggcgctggcaccgcgggcgtcgccccgcggcccggcggcctgcgcgcaggcggcgctcctctgcacgccctccacctccgtgttccgcggcctccgggcgcccgcatccgccgcgccggccccgcgccggcgccgctcggcggcgtccacgggcatagtctgcggcaaggtcgccaagggcagcgtgccgccgaacttcaccctcaaggaccagaacggcaagcccgtgtcgctgaacaagttcaagggcaagcccgtcgtggtttacttctaccccgccgacgagacgcccggatgcacaaagcaggcgtgcgcgttcagggactcgtacgagaagttcaagaaggccggggcggaggtgatcggcatcagcggcgacgacgcggcgtcgcacaaggcgttcgcgcagaagtaccggctgccgttcacgctgctgagcgacgaggggaaccgcgtgcgcaaggagtggggcgtcccctcggacctgttcgggacgctgccggggcgccagacgtacgtgctggacaagcagggcgtcgtgcagtacgtctacaacaaccagttccagcccgagaagcacatcggcgagacgctcaagatcctgcagaccctctgatccgatcaacctcctcactgttctgggccatgctctgcattcgtcgctgtaaaagtaccggactatgtagtagtgtagtgtatgtaaccaagagctgatgacctgatgttttgttccatccttcagtgagtctatctatcacacgattctggctcgtttgatcgaccagcatcttcctgtttgtcatggtcagtttcacttgtattacaactgtacttttggtcg

SEQ ID NO: 5943 - protein, 218 aa, Zea mays subsp. mays
  peptide (1)..(218): Ceres Seq. ID no. 12404446
MAFTPATACCKASLALAPRASPRGPAACAQAALLCTPSTSVFRGLRAPASAAPAPRRRRSAASTGIVCGKVAKGSVPPNFTLKDQNGKPVSLNKFKGKPVVVYFYPADETPGCTKQACAFRDSYEKFKKAGAEVIGISGDDAASHKAFAQKYRLPFTLLSDEGNRVRKEWGVPSDLFGTLPGRQTYVLDKQGVVQYVYNNQFQPEKHIGETLKILQTL

SEQ ID NO: 5944 - protein, 139 aa, Zea mays subsp. mays
  peptide (1)..(139): Ceres Seq. ID no. 12404447
MHKAGVRVQGLVREVQEGRGGGDRHQRRRRGVAQGVRAEVPAAVHAAERRGEPRAQGVGRPLGPVRDAAGAPDVRAGQAGRRAVRLQQPVPAREAHRRDAQDPADPLIRSTSSLFWAMLCIRRCKSTGLCSSVVYVTKS

SEQ ID NO: 5945 - DNA, 1843 bp, Zea mays subsp. mays
  misc_feature (1)..(1843): Ceres Seq. ID no. 12406900
  misc_feature (1)..(1843): Ortholog of  Ceres SEQ ID NO 15170155 as cited in SEQ ID NO 64363
ggattcgggcgctcggcgtagccgcgcagtggtgtgtctgcctccctccttgtatcctcctcgaattcgagcggcggcgacggcgggaagggagatggaggcggttagaggcgatgggaggtggtgcgtggtgactggcggccgcgggttcgccgcgaggcatctggtgacgatgctgctccgctccggcgagtggcgggtgcgcgtggccgacctgggccctgccatcacgctcgaccgcgacgaagaagagggtttcctgggtgctgctctccgcgaaggccaggccgtctacgtgtccgccgacctccgtgacaaggcccaggtcgccagagcttttgaaggggcagaagtagttttccatatggctgctccagattcatccatcaacaacttccaccttcattatggagtcaatgtcgatggaacaaagaatgttattgacacttgtatccgttgcaaggtgaagagactcatctatactagttcacctagtgtcgtgtttgatggagttcatggaatttttaatgcagatgaatcaatgccttacccagataagtttaatgattcatattcagaaacgaaagcggatgcagaaaagcttgtgatgagagctaatggtagggaagggcttcttacatgctgtatacgcccaagtagcatttttggccctggtgataagctaatggttccatctttggttgctgctgcaagggcagggaagtccaaatacattattggtgatgggaacaactactatgatttcacctacgtggaaaatgtggcatatggccatgtttgtgcggagaaaactctatcatctgaagatggtgcaaagatagccgctggaaaaacctatttcataacaaatatggagcctataaaattctgggagttcatgtcattgattttagaaggtcttggatatgaaaggccttcagtaaaaataccagtctctgttatgatgccggtggctcatgttgtagaatggacttaccagaaatttgccaagtatggaatgaaagttcctcagctgaccccttcaaggatcaggctgctttcatgtaacaggacattcagttgctcaagagcaaaggagcagcttggttatgaacctctcgtgtcccttaaggatggagtgaagagaacagtagagtcgtactcccatctacaagctcagaatcataggagtatatcaaaggcttcaattttcctcgggaatggaaatcttgcaaaaacagtactttgggaagatgcgaagcaaactgtgacagtgcttctactgttggctgttatctactaccacttatttacatgtagttacaccttcatcacagcgatggcaaagcttttgtcactaactgctctgttcttattcattcatggcatgctgccatcaaatctgttcggtcacaaggttgagaaactcgaggcctctaattttcacatcacccaggcacaggctcatcatattgctaattccattagttcgaattggaactctttagtcagtgcgctaagatctctttgtagaggaaatgattggctattgtttctcaaggtttcactatctctgctggttgtcagcatccttagttccatgtcttctcaggctgcatttaaaataggtactgctctggttttcacaggcttcaaagcgtatgagaaatgggaggacagcattgatagtatggtgggcgacgcctgtaccattcttctgcactttggttctgccaaggaatcatctagctagaaacaaacgtaggtgtagcttgcagactgccagttactttgtttactgatattatcttcagctccagctgtttctgggtttcgttgacct

SEQ ID NO: 5946 - protein, 583 aa, Zea mays subsp. mays
  peptide (1)..(583): Ceres Seq. ID no. 12406901
DSGARRSRAVVCLPPSLYPPRIRAAATAGREMEAVRGDGRWCVVTGGRGFAARHLVTMLLRSGEWRVRVADLGPAITLDRDEEEGFLGAALREGQAVYVSADLRDKAQVARAFEGAEVVFHMAAPDSSINNFHLHYGVNVDGTKNVIDTCIRCKVKRLIYTSSPSVVFDGVHGIFNADESMPYPDKFNDSYSETKADAEKLVMRANGREGLLTCCIRPSSIFGPGDKLMVPSLVAAARAGKSKYIIGDGNNYYDFTYVENVAYGHVCAEKTLSSEDGAKIAAGKTYFITNMEPIKFWEFMSLILEGLGYERPSVKIPVSVMMPVAHVVEWTYQKFAKYGMKVPQLTPSRIRLLSCNRTFSCSRAKEQLGYEPLVSLKDGVKRTVESYSHLQAQNHRSISKASIFLGNGNLAKTVLWEDAKQTVTVLLLLAVIYYHLFTCSYTFITAMAKLLSLTALFLFIHGMLPSNLFGHKVEKLEASNFHITQAQAHHIANSISSNWNSLVSALRSLCRGNDWLLFLKVSLSLLVVSILSSMSSQAAFKIGTALVFTGFKAYEKWEDSIDSMVGDACTILLHFGSAKESSS

SEQ ID NO: 5947 - protein, 552 aa, Zea mays subsp. mays
  peptide (1)..(552): Ceres Seq. ID no. 12406902
MEAVRGDGRWCVVTGGRGFAARHLVTMLLRSGEWRVRVADLGPAITLDRDEEEGFLGAALREGQAVYVSADLRDKAQVARAFEGAEVVFHMAAPDSSINNFHLHYGVNVDGTKNVIDTCIRCKVKRLIYTSSPSVVFDGVHGIFNADESMPYPDKFNDSYSETKADAEKLVMRANGREGLLTCCIRPSSIFGPGDKLMVPSLVAAARAGKSKYIIGDGNNYYDFTYVENVAYGHVCAEKTLSSEDGAKIAAGKTYFITNMEPIKFWEFMSLILEGLGYERPSVKIPVSVMMPVAHVVEWTYQKFAKYGMKVPQLTPSRIRLLSCNRTFSCSRAKEQLGYEPLVSLKDGVKRTVESYSHLQAQNHRSISKASIFLGNGNLAKTVLWEDAKQTVTVLLLLAVIYYHLFTCSYTFITAMAKLLSLTALFLFIHGMLPSNLFGHKVEKLEASNFHITQAQAHHIANSISSNWNSLVSALRSLCRGNDWLLFLKVSLSLLVVSILSSMSSQAAFKIGTALVFTGFKAYEKWEDSIDSMVGDACTILLHFGSAKESSS

SEQ ID NO: 5948 - protein, 526 aa, Zea mays subsp. mays
  peptide (1)..(526): Ceres Seq. ID no. 12406903
MLLRSGEWRVRVADLGPAITLDRDEEEGFLGAALREGQAVYVSADLRDKAQVARAFEGAEVVFHMAAPDSSINNFHLHYGVNVDGTKNVIDTCIRCKVKRLIYTSSPSVVFDGVHGIFNADESMPYPDKFNDSYSETKADAEKLVMRANGREGLLTCCIRPSSIFGPGDKLMVPSLVAAARAGKSKYIIGDGNNYYDFTYVENVAYGHVCAEKTLSSEDGAKIAAGKTYFITNMEPIKFWEFMSLILEGLGYERPSVKIPVSVMMPVAHVVEWTYQKFAKYGMKVPQLTPSRIRLLSCNRTFSCSRAKEQLGYEPLVSLKDGVKRTVESYSHLQAQNHRSISKASIFLGNGNLAKTVLWEDAKQTVTVLLLLAVIYYHLFTCSYTFITAMAKLLSLTALFLFIHGMLPSNLFGHKVEKLEASNFHITQAQAHHIANSISSNWNSLVSALRSLCRGNDWLLFLKVSLSLLVVSILSSMSSQAAFKIGTALVFTGFKAYEKWEDSIDSMVGDACTILLHFGSAKESSS

SEQ ID NO: 5949 - DNA, 1490 bp, Zea mays subsp. mays
  misc_feature (1)..(1490): Ceres Seq. ID no. 12356378
  misc_feature (1)..(1490): Ortholog of  Ceres SEQ ID NO 14303631 as cited in SEQ ID NO 62864
atcacgaatcaccaacaccctctcctccaccttccatcccgatcaccgccgccaccgctttcgttccacgtcccgatggcaccggtagatctaacccccaggcagccccggaaggcgtatggcggcgacgccggcgcctactacgagtggagcccagccgacctgcccatgctcggcgtcgcctccatcggcgcaggccaagctctccctcgccgccggtgggctctcgctccccagctactccgactcttccaaggtcgcgtacgttcttgaaggcactggcacctgcggcatcgtcctgccggaggcgaccaaggagaaggtgctggccgtgaaggagggcgacgccctcgcgctccccttcggcgtggtcacgtggtggcacaacggccccgccgcgccgacccagctcacggtcctcttcctcggcgacacctccaagggccacaggccggggcagttcaccaacttccagctgacgggcgcgagcggcatcttcacgggcttctccaccgagttcgtgtcgcgcgcgtgggacctgccggaggcgaacgccgcggcgctggtgtcgagccagccggcgtcgggcatcgtcagggcctcgtccccgctgccggcgccctcggcgcaggaccgcgagggggtggcgctcaactgcctggaggcgccgctggacgtggacatcccgggcgggggccgcgtggtggtgctcaacacggcgaacctgcccctggtcagggaggtcgggctgggcgccgacctggtccgcatcgacgcgcactccatgtgctccccgggcttctcgtgcgactcggcgtaccaggtcacctacatcgtgcgcggcagcgggcgcgtgcaggtggtcgggcccgacggggtgcgcgtcctggagacgcgcgtcgagggcggcttcctcttcatcgtgccccgcttccacgtggtgtccaagatcgcggacgcgtcgggcatggaatggttctccatcatcaccacccccaacccgatcttcagccatctggccggaaagacgtcggtgtggaaagccatctcggcggaggtgctgcaggcntcgttcaacaccacgccggagatggagaagctgttccggtccaagaggcttgactcggagatcttcttcgcgcccccgtccaactgagcaaataggcggaagcccacggtggagtgctctcgtgaagtcgtcgtggttagattagcattagcttagctcgccttaataaagagagaatggtggtggtcctcggctcactgcttcttcagtagcttcagtcgttcagtggttcagtcgttgcgtcggtcggttgtcgtgtccgttcgtcgaactgccaagttttgttaattattattattgtcaccctctgttttgtctaggtctagggctggaaaaaaactttaagccgcggcttgttcaggctcgcgagctatattgttttaattaatctataaaataataataaatattataattctat

SEQ ID NO: 5950 - protein, 345 aa, Zea mays subsp. mays
  peptide (1)..(345): Ceres Seq. ID no. 12356379
  misc_feature (317)..(317): Xaa is any aa, unknown or other
MAATPAPTTSGAQPTCPCSASPPSAQAKLSLAAGGLSLPSYSDSSKVAYVLEGTGTCGIVLPEATKEKVLAVKEGDALALPFGVVTWWHNGPAAPTQLTVLFLGDTSKGHRPGQFTNFQLTGASGIFTGFSTEFVSRAWDLPEANAAALVSSQPASGIVRASSPLPAPSAQDREGVALNCLEAPLDVDIPGGGRVVVLNTANLPLVREVGLGADLVRIDAHSMCSPGFSCDSAYQVTYIVRGSGRVQVVGPDGVRVLETRVEGGFLFIVPRFHVVSKIADASGMEWFSIITTPNPIFSHLAGKTSVWKAISAEVLQXSFNTTPEMEKLFRSKRLDSEIFFAPPSN

SEQ ID NO: 5951 - DNA, 1071 bp, Zea mays subsp. mays
  misc_feature (1)..(1071): Ceres Seq. ID no. 12402571
  misc_feature (1)..(1071): Ortholog of  Ceres SEQ ID NO 12474685 as cited in SEQ ID NO 88
  misc_feature (1)..(1071): Ortholog of  Ceres SEQ ID NO 13638574 as cited in SEQ ID NO 51223
  misc_feature (1)..(1071): Ortholog of  Ceres SEQ ID NO 15177112 as cited in SEQ ID NO 55956
  misc_feature (1)..(1071): Ortholog of  Ceres SEQ ID NO 12610790 as cited in SEQ ID NO 56123
  misc_feature (1)..(1071): Ortholog of  Ceres SEQ ID NO 14315399 as cited in SEQ ID NO 57112
  misc_feature (1)..(1071): Ortholog of  Ceres SEQ ID NO 13655636 as cited in SEQ ID NO 63519
  misc_feature (1)..(1071): Ortholog of  Ceres SEQ ID NO 13655896 as cited in SEQ ID NO 64970
aactgcccaacaaacgatggccggcgtgtcagcaagcatcccgtgcgtggtgctcaacacgggccacgcgatgcccgtgctgggcttcgggaccggctcctccagcacgccggaggatctgccggcgaccatcctccacgccgtccgccttggctaccgccacatcgacacggcctccatgtacggcacggagggggcggtcggagccgccgtctccgacgccgtcgctgcgggggccgtcacctcccgcgctgacctcttcatcacctccaagctcgtgatgaaggacgcgcatccggaccgcgtgctccccgcgatccgggagtcgctggcccgcctaggcctggactacctcgacctcttcctcgtccactggcccgtcgccgccgacgagaacaacaagcccgtgccgttcgacatggaaggcgtctggcacgccatggaggagtgccaccgcatcggccttgctaggtccgtcggcgtcagcaacttctctgcggccaagatgtcccggctgctcgccttcgccgccgtaccgccggctgtgaaccaggtggaggtgaacgtcggctggcgtcaagagaaggtcagggaggcctgcgccaagaacggcgtcgtcgtcaccgccttctcgccgctgggcgcgatcggcacggcgtggggatccaacgccgtcatggaaagcggcgcgctggaggacatcgccgccaggagaggcaagaccattgctcaggtagcgttgaggtggcttcacgagcaaggggtgtgctttgtggcgaggagctttaacaaggagaggttgaagcaaaacatggagcttttcgattgggagttgagcgtcgatgacaaggagaagatcatggggattccacagaggagagcatgccgtgcagagttctttttgtcaccagacgggccgtacaagaccttggaggagctatgggacggggagatatgagataccatgtagctgttgtatctattgtttgtcgacatcgttgttgcttgctgctgtggggaaatatcttcggaatactctctgaatgaatgtggactaacagttggtcctgg

SEQ ID NO: 5952 - protein, 318 aa, Zea mays subsp. mays
  peptide (1)..(318): Ceres Seq. ID no. 12402572
TAQQTMAGVSASIPCVVLNTGHAMPVLGFGTGSSSTPEDLPATILHAVRLGYRHIDTASMYGTEGAVGAAVSDAVAAGAVTSRADLFITSKLVMKDAHPDRVLPAIRESLARLGLDYLDLFLVHWPVAADENNKPVPFDMEGVWHAMEECHRIGLARSVGVSNFSAAKMSRLLAFAAVPPAVNQVEVNVGWRQEKVREACAKNGVVVTAFSPLGAIGTAWGSNAVMESGALEDIAARRGKTIAQVALRWLHEQGVCFVARSFNKERLKQNMELFDWELSVDDKEKIMGIPQRRACRAEFFLSPDGPYKTLEELWDGEI

SEQ ID NO: 5953 - protein, 313 aa, Zea mays subsp. mays
  peptide (1)..(313): Ceres Seq. ID no. 12402573
MAGVSASIPCVVLNTGHAMPVLGFGTGSSSTPEDLPATILHAVRLGYRHIDTASMYGTEGAVGAAVSDAVAAGAVTSRADLFITSKLVMKDAHPDRVLPAIRESLARLGLDYLDLFLVHWPVAADENNKPVPFDMEGVWHAMEECHRIGLARSVGVSNFSAAKMSRLLAFAAVPPAVNQVEVNVGWRQEKVREACAKNGVVVTAFSPLGAIGTAWGSNAVMESGALEDIAARRGKTIAQVALRWLHEQGVCFVARSFNKERLKQNMELFDWELSVDDKEKIMGIPQRRACRAEFFLSPDGPYKTLEELWDGEI

SEQ ID NO: 5954 - protein, 295 aa, Zea mays subsp. mays
  peptide (1)..(295): Ceres Seq. ID no. 12402574
MPVLGFGTGSSSTPEDLPATILHAVRLGYRHIDTASMYGTEGAVGAAVSDAVAAGAVTSRADLFITSKLVMKDAHPDRVLPAIRESLARLGLDYLDLFLVHWPVAADENNKPVPFDMEGVWHAMEECHRIGLARSVGVSNFSAAKMSRLLAFAAVPPAVNQVEVNVGWRQEKVREACAKNGVVVTAFSPLGAIGTAWGSNAVMESGALEDIAARRGKTIAQVALRWLHEQGVCFVARSFNKERLKQNMELFDWELSVDDKEKIMGIPQRRACRAEFFLSPDGPYKTLEELWDGEI

SEQ ID NO: 5955 - DNA, 481 bp, Zea mays subsp. mays
  misc_feature (1)..(481): Ceres Seq. ID no. 1404853
  misc_feature (1)..(481): Ortholog of  Ceres SEQ ID NO 13565116 as cited in SEQ ID NO 0
gccaattggacctttccaattacaagatgtgtctggatatggagtgggcttgacagtaaaggacatctacgcagctgcctttggagaacgaaatttcagctctgagttgatggatttgatggtacagaatgggcggcatggaaagagtaatggcaaaggctattacatttatatgaagggtgagaagccaaagcctgaccctagtgttcagcatgtgattgaggagtaccgaaaacgtgtgaagataatgcctggtggaaagcctgtgacattaacagatcaagacatattggagatgattttbttcccagttgtgaatgaggcatgtagggttatggatgaaaatgttgtgattcgggcttctgatcttgatattgcatctgtccttggaatgggttttcccaagtacaggggtggcctcgttttctgggctgacactgttggggcacttatatacattcaaagctaagcaagtgggctg

SEQ ID NO: 5956 - protein, 155 aa, Zea mays subsp. mays
  peptide (1)..(155): Ceres Seq. ID no. 1404854
  misc_feature (101)..(101): Xaa is any aa, unknown or other
PIGPFQLQDVSGYGVGLTVKDIYAAAFGERNFSSELMDLMVQNGRHGKSNGKGYYIYMKGEKPKPDPSVQHVIEEYRKRVKIMPGGKPVTLTDQDILEMIXFPVVNEACRVMDENVVIRASDLDIASVLGMGFPKYRGGLVFWADTVGALIYIQS

SEQ ID NO: 5957 - protein, 119 aa, Zea mays subsp. mays
  peptide (1)..(119): Ceres Seq. ID no. 1404855
  misc_feature (65)..(65): Xaa is any aa, unknown or other
MDLMVQNGRHGKSNGKGYYIYMKGEKPKPDPSVQHVIEEYRKRVKIMPGGKPVTLTDQDILEMIXFPVVNEACRVMDENVVIRASDLDIASVLGMGFPKYRGGLVFWADTVGALIYIQS

SEQ ID NO: 5958 - protein, 116 aa, Zea mays subsp. mays
  peptide (1)..(116): Ceres Seq. ID no. 1404856
  misc_feature (62)..(62): Xaa is any aa, unknown or other
MVQNGRHGKSNGKGYYIYMKGEKPKPDPSVQHVIEEYRKRVKIMPGGKPVTLTDQDILEMIXFPVVNEACRVMDENVVIRASDLDIASVLGMGFPKYRGGLVFWADTVGALIYIQS

SEQ ID NO: 5959 - DNA, 1198 bp, Zea mays subsp. mays
  misc_feature (1)..(1198): Ceres Seq. ID no. 12373616
  misc_feature (1)..(1198): Ortholog of  Ceres SEQ ID NO 14309202 as cited in SEQ ID NO 0
gaagcagtcgtacttgtacactccttgtctccttcgctttggcacactggacacgtccaccacgtgaacacgtcaacagaagtgacccatcaaggggcccacaggtccacgagcccgagtgacgactgacgacagatcgcttgtgcgtcgctaacccgccgctagtcggctagtgggtgggaaatccgcagattcccgtcgctacttcggccacatggctgcagcggcggcgtggaccggcgccgcatcccccaactcgctgctgctctcgcgctcgcctccccacgccgccgcgctcgcgccttcgccgggaagctccatgcggaggcggctcctcctcggcgtcggcaccccggccgtggcggcgctggcggccgcggcgccgccagcggtgctgcaggacggagcggtcactgtgctcatcaccgccggcgcctactctcttgtgcgcgtcttcgacgagctcaccgagcggcggctcatcgaaaagagcttgagcaggaaggttgtgcacgtgctatccggcgtcctgttcatgtcatcttggcccctgttcagcaattcgacagaagcacggtatttcgccgcggttgtcccgttcctgaactccatgaggcttctgatatatggactccgtctctacactgatgaagctctggtaaaatcagtgacacgtgaaggaaaaccagaggaattgctgagaggtccactctattatgtcctggtgctgctgttcagcgttttagtcttctggcgtgagtcccccatcgggatcgtctccttgtcgatgatgagcggtggcgatggttttgctgacattgttgggaggaggtatggctcagcgaagctgccattcaatcggaagaagagctgggccgggagcatctcgatgttcatttctggtttcctgctgtccgcgatgatgatgctctacttctcaagcctgggttacattgatgttatctgggaagaggcacttggtaagctggcgcttgttgcactagcagcgacagtagtggagtgcgttcctgtgactgaagttgtagatgacaacatatctgttcctttggccaccatgctggtagcttttctcttgtttagctccaaccgcacaatagttaattaaaatactactagtgcattatttaagacatgtgatgagttcttcagtgatgagttgtgcttacttttgcttcct

SEQ ID NO: 5960 - protein, 303 aa, Zea mays subsp. mays
  peptide (1)..(303): Ceres Seq. ID no. 12373617
MAAAAAWTGAASPNSLLLSRSPPHAAALAPSPGSSMRRRLLLGVGTPAVAALAAAAPPAVLQDGAVTVLITAGAYSLVRVFDELTERRLIEKSLSRKVVHVLSGVLFMSSWPLFSNSTEARYFAAVVPFLNSMRLLIYGLRLYTDEALVKSVTREGKPEELLRGPLYYVLVLLFSVLVFWRESPIGIVSLSMMSGGDGFADIVGRRYGSAKLPFNRKKSWAGSISMFISGFLLSAMMMLYFSSLGYIDVIWEEALGKLALVALAATVVECVPVTEVVDDNISVPLATMLVAFLLFSSNRTIVN

SEQ ID NO: 5961 - protein, 268 aa, Zea mays subsp. mays
  peptide (1)..(268): Ceres Seq. ID no. 12373618
MRRRLLLGVGTPAVAALAAAAPPAVLQDGAVTVLITAGAYSLVRVFDELTERRLIEKSLSRKVVHVLSGVLFMSSWPLFSNSTEARYFAAVVPFLNSMRLLIYGLRLYTDEALVKSVTREGKPEELLRGPLYYVLVLLFSVLVFWRESPIGIVSLSMMSGGDGFADIVGRRYGSAKLPFNRKKSWAGSISMFISGFLLSAMMMLYFSSLGYIDVIWEEALGKLALVALAATVVECVPVTEVVDDNISVPLATMLVAFLLFSSNRTIVN

SEQ ID NO: 5962 - protein, 196 aa, Zea mays subsp. mays
  peptide (1)..(196): Ceres Seq. ID no. 12373619
MSSWPLFSNSTEARYFAAVVPFLNSMRLLIYGLRLYTDEALVKSVTREGKPEELLRGPLYYVLVLLFSVLVFWRESPIGIVSLSMMSGGDGFADIVGRRYGSAKLPFNRKKSWAGSISMFISGFLLSAMMMLYFSSLGYIDVIWEEALGKLALVALAATVVECVPVTEVVDDNISVPLATMLVAFLLFSSNRTIVN

SEQ ID NO: 5963 - DNA, 1315 bp, Zea mays subsp. mays
  misc_feature (1)..(1315): Ceres Seq. ID no. 12344153
  misc_feature (1)..(1315): Ortholog of  Ceres SEQ ID NO 14303884 as cited in SEQ ID NO 53685
  misc_feature (1)..(1315): Ortholog of  Ceres SEQ ID NO 14316111 as cited in SEQ ID NO 60001
  misc_feature (1)..(1315): Ortholog of  Ceres SEQ ID NO 12614713 as cited in SEQ ID NO 60887
  misc_feature (1)..(1315): Ortholog of  Ceres SEQ ID NO 14309256 as cited in SEQ ID NO 0
accgaaaaaaaaattccccatgtgggaacgtggtggttgttcgcggggacggcgactggtacttttttgtcgctgcggagacggggagtcttccgactcttccccaacgggaattcctcactcacatccctacgcacgaacggaaacgccccgtgctgcgctcgcagtctcgcatggagtccaccactgctgctgctaccgcggcggcggcgccggcaccggtgctgctggtgacgaacgacgacggaatcgacgcgccggggctccgcttccttgtcgaccgtctcgtcgccgcagggcgataccgcgtactcgtctgcgcgcccgacacagacaaatcgggtgtgagccactgcatcacatggcgccctgcactccgctgtaaacgtgttgatataataggtgctacagcatttggagtttcaggaactcctgctgactgtgcttctttaggcatctctggaaaactatttgatggtttggttcctgatctggtacttagtggaatcaacattggaaataattgtgggtaccatgtcatttattctggaacagttgctggtgctagggaggcattcttatacgggattcctgcaatagctatgtcatatgattgggttgcgggtcggagcagtgttaatgacctcaaggtgtctgcagaggtctgcatgcctctgataaatgctatcgtgactgagatcaagaatgggacttaccctcaaggatcattcttgaatgtagatgtacctacagatgctgcgcaccacaagggctacaaaattacaaaacaaggaacatatatggcagaattagttgggagcagacggtttacaagaagcctgcagtagaaagttaccagacagcaaacatggatgttgatggtgaaaaggatagcgaactagttacttcagaaaatgacctactgtttaagagagtgattgtagggagaagttccaatggagtggaaggagaggaaacggaccataattccctagttgatggatatatcactgttactcctttgggtgctctttcccgcacagaaccagacgccataccctatttcaaagcttgtgtctcacgtctggttgataatttctcttctcctggctcttctttttctagaagcagaggatgagccatgaaatttctaaagctgtttatttatcgcaatgatcaagttccacactgctttttcctaccccataacattgttaccatacatgggcaatattgccattcttgctacctgaatgttattactgcaatcagcatgtgtattctgcttcatagcctatgtcagaattatgcattc

SEQ ID NO: 5964 - protein, 281 aa, Zea mays subsp. mays
  peptide (1)..(281): Ceres Seq. ID no. 12344154
RKKNSPCGNVVVVRGDGDWYFFVAAETGSLPTLPQREFLTHIPTHERKRPVLRSQSRMESTTAAATAAAAPAPVLLVTNDDGIDAPGLRFLVDRLVAAGRYRVLVCAPDTDKSGVSHCITWRPALRCKRVDIIGATAFGVSGTPADCASLGISGKLFDGLVPDLVLSGINIGNNCGYHVIYSGTVAGAREAFLYGIPAIAMSYDWVAGRSSVNDLKVSAEVCMPLINAIVTEIKNGTYPQGSFLNVDVPTDAAHHKGYKITKQGTYMAELVGSRRFTRSLQ

SEQ ID NO: 5965 - protein, 224 aa, Zea mays subsp. mays
  peptide (1)..(224): Ceres Seq. ID no. 12344155
MESTTAAATAAAAPAPVLLVTNDDGIDAPGLRFLVDRLVAAGRYRVLVCAPDTDKSGVSHCITWRPALRCKRVDIIGATAFGVSGTPADCASLGISGKLFDGLVPDLVLSGINIGNNCGYHVIYSGTVAGAREAFLYGIPAIAMSYDWVAGRSSVNDLKVSAEVCMPLINAIVTEIKNGTYPQGSFLNVDVPTDAAHHKGYKITKQGTYMAELVGSRRFTRSLQ

SEQ ID NO: 5966 - DNA, 1371 bp, Zea mays subsp. mays
  misc_feature (1)..(1371): Ceres Seq. ID no. 12373612
  misc_feature (1)..(1371): Ortholog of  Ceres SEQ ID NO 14316161 as cited in SEQ ID NO 52384
  misc_feature (1)..(1371): Ortholog of  Ceres SEQ ID NO 14315249 as cited in SEQ ID NO 52512
  misc_feature (1)..(1371): Ortholog of  Ceres SEQ ID NO 15174595 as cited in SEQ ID NO 53460
  misc_feature (1)..(1371): Ortholog of  Ceres SEQ ID NO 13503553 as cited in SEQ ID NO 64822
  misc_feature (1)..(1371): Ortholog of  Ceres SEQ ID NO 13660155 as cited in SEQ ID NO 67635
tccgccttctgctctctctcgcctctggtgcgcagagctagctctcttgaagcctcgagactcgtctcgccgctgctctgctctgctccccagctctgccgctgcgtgcctgcgtcagttgttgcattgcagccagcgagccttgagctgctagctctctcttcaccacagttcacaggcatggagttcgaggatcgctgccacaaggtccaggagcccaagttcgactgcctgctcttcgacctcgacgacaccctgtatccgctgagctccgggatcgcgggccatgtcaagaagaacattgaagattacatggtcgagaagctgggtattgacgagagcaagatcgagaacctgggaaatctgctgtacaagaactacggcaccacgatggctggcctcagggcgatcggctacagcttcgattacgatgagtaccacgccttcgtccatggaaggctgccgtacgacaacatcaagcccgaccctgttctcaagcacattctcaagaacctgcccatccgcaaactcatattcaccaacggcgacaaggtccacgccgtgagagccctggagaggctgggcctggaggactgcttcgaggggatcatctgcttcgagaccctgaacccgccgtgcccgcctcagggagaccgggaggccgagatcttcgacatcgccggccacttcgcccgctccggcgccgccgccgagctgcccaagacccccgtcctgtgcaagcccaacgtcgacgccatggaggaggcgctcaggatcgccaacgtcaacccgcacaaggcgattttcttcgacgacagcgtacgcaacatccaggccgggaagcagatcggccttcacacagtgctggtgggcaagtcgcagcgggtgaaaggcgcggaccacgcgctggagagcatccacaacgtcagggaggcgctgccggggctgtgggaggaggccgagaaggcggaggacgtgctctacgccgagcgcgtcgccatggagacctcggtcaccgcgtaaacccctctctcgaatcctccggtgcaccgtcagcccaaccttctcgacatccaggaccgggacgatcgcataccactctctccccgagccagggctggtggtttcacgctggaactgaatccagccatggccgggccgagaatttccgacagcaagaaggggtgcagcatgtaaaggggggagcagatgatatcatgtttgggatgctcccagatatgtatagttatgtatcagccagttgtttgtaaattaccaataaatattagaagtaataagaaaaaatggagtttacttgtacgtttcttgtgctctgtcatctgaagtaataaaagcggttagcaagaatgg

SEQ ID NO: 5967 - protein, 340 aa, Zea mays subsp. mays
  peptide (1)..(340): Ceres Seq. ID no. 12373613
SAFCSLSPLVRRASSLEASRLVSPLLCSAPQLCRCVPASVVALQPASLELLALSSPQFTGMEFEDRCHKVQEPKFDCLLFDLDDTLYPLSSGIAGHVKKNIEDYMVEKLGIDESKIENLGNLLYKNYGTTMAGLRAIGYSFDYDEYHAFVHGRLPYDNIKPDPVLKHILKNLPIRKLIFTNGDKVHAVRALERLGLEDCFEGIICFETLNPPCPPQGDREAEIFDIAGHFARSGAAAELPKTPVLCKPNVDAMEEALRIANVNPHKAIFFDDSVRNIQAGKQIGLHTVLVGKSQRVKGADHALESIHNVREALPGLWEEAEKAEDVLYAERVAMETSVTA

SEQ ID NO: 5968 - protein, 280 aa, Zea mays subsp. mays
  peptide (1)..(280): Ceres Seq. ID no. 12373614
MEFEDRCHKVQEPKFDCLLFDLDDTLYPLSSGIAGHVKKNIEDYMVEKLGIDESKIENLGNLLYKNYGTTMAGLRAIGYSFDYDEYHAFVHGRLPYDNIKPDPVLKHILKNLPIRKLIFTNGDKVHAVRALERLGLEDCFEGIICFETLNPPCPPQGDREAEIFDIAGHFARSGAAAELPKTPVLCKPNVDAMEEALRIANVNPHKAIFFDDSVRNIQAGKQIGLHTVLVGKSQRVKGADHALESIHNVREALPGLWEEAEKAEDVLYAERVAMETSVTA

SEQ ID NO: 5969 - protein, 236 aa, Zea mays subsp. mays
  peptide (1)..(236): Ceres Seq. ID no. 12373615
MVEKLGIDESKIENLGNLLYKNYGTTMAGLRAIGYSFDYDEYHAFVHGRLPYDNIKPDPVLKHILKNLPIRKLIFTNGDKVHAVRALERLGLEDCFEGIICFETLNPPCPPQGDREAEIFDIAGHFARSGAAAELPKTPVLCKPNVDAMEEALRIANVNPHKAIFFDDSVRNIQAGKQIGLHTVLVGKSQRVKGADHALESIHNVREALPGLWEEAEKAEDVLYAERVAMETSVTA

SEQ ID NO: 5970 - DNA, 1648 bp, Zea mays subsp. mays
  misc_feature (1)..(1648): Ceres Seq. ID no. 13496119
  misc_feature (1)..(1648): Ortholog of  Ceres SEQ ID NO 13600071 as cited in SEQ ID NO 0
ccgacctcccccttcctctccccctgccgctccccgcgccgagaaggagaaccccagccgccgcgcagcgcgccgcccatggcctcctcgtcggagaacgcggctgtgccgccggaggaggagccccaggccccgccgccgccggacacagagcctaccgaggcggcgcccggcgaggcggaggatgagccgcaaaccctagagcgggcgcaggagctcttcgacaggggttccaaggccatcgaggatgaggacttcgtcgacgccgtagactgtctcagccgagcgctcgagatcagggcttcacattatggagagctcgcaccggagtgtgccagcacatacttcaaatatggatgtgccctgctatacaaagctcaggaggagagtgatgttttgggaaatgttcccaagagcttgccaaatgaagactcagtgaagagtacagctactaaagatgacagtggaacctcaaaggtctctggtaccgatgcggaggatgctgcgtcatcagaaaaagttgatgctgaagaaggtcacaactcaaatggcaaaaatcaggagaatgggaatggtgaagttgagaaagatgatgacgacgtcgacgatgatgagaagatgggagatgaagaggataatgatttggatctttcttggaaaatgttggacattgctagggcaatagttgagaagagccaagataacactatggagaaagtaaaaatatattctgctcttgctgaagtggcaacggaaagagaggacatggacaactcactcagtgactatatgaaagctttatccatgttggagcatttggttgagcctgaccatcgtcgagttgtggaattaaacttccgcatttgtttggtttatgaactagtttccaagatcggagaagcaatttcatactgtgcaaaagcaatttcgctatgcaagtcacgcatacagagcctgaaaagttccaaggatgctttgttggctggtatagatggtgatgcatctgctgctgaagctgaaggaggctcagaaaaatctgccattgaaaaagagctagagcagcttactagcatattgcctgatcttgagaagaagcttgaggacctgtctgaagcaaacccaagcgctgacatggatgagatggtgaaggcaatcgtgtccagggtaactgatgtgatgccaaaagctgcatcttttacttcttcccagatggcaacctcaagcaatggattcgactcctcggttatgtctacggcagcgacaaccggaagctctggaagcaccgtgactgaccttggggttgtaggcagaggcgtcaaacgagctagcatcaagccgatctctgctgaacctgctgctaagaaacctgcacttgattcaccatctcaacaaggtgacagcagcatcaactctgaggttgttcctgcaacgcagactggagacgagtcagtatctaagtaaattacaatttcattagccctactgtaatgttaacttgctggaacatattagctgctatgtaaacgcttaagaagggactgctggggccatagactcatcgtgagctgaccattgaaatgttaaattgctgagatcatcatggcggtaaatcatgtctgctatatcaaatatgcttggtgagatgtgc

SEQ ID NO: 5971 - protein, 486 aa, Zea mays subsp. mays
  peptide (1)..(486): Ceres Seq. ID no. 13496120
PTSPFLSPCRSPRREGEPQPPRSAPPMASSSENAAVPPEEEPQAPPPPDTEPTEAAPGEAEDEPQTLERAQELFDRGSKAIEDEDFVDAVDCLSRALEIRASHYGELAPECASTYFKYGCALLYKAQEESDVLGNVPKSLPNEDSVKSTATKDDSGTSKVSGTDAEDAASSEKVDAEEGHNSNGKNQENGNGEVEKDDDDVDDDEKMGDEEDNDLDLSWKMLDIARAIVEKSQDNTMEKVKIYSALAEVATEREDMDNSLSDYMKALSMLEHLVEPDHRRVVELNFRICLVYELVSKIGEAISYCAKAISLCKSRIQSLKSSKDALLAGIDGDASAAEAEGGSEKSAIEKELEQLTSILPDLEKKLEDLSEANPSADMDEMVKAIVSRVTDVMPKAASFTSSQMATSSNGFDSSVMSTAATTGSSGSTVTDLGVVGRGVKRASIKPISAEPAAKKPALDSPSQQGDSSINSEVVPATQTGDESVSK

SEQ ID NO: 5972 - protein, 460 aa, Zea mays subsp. mays; identical to SEQ ID NO: 3042
  peptide (1)..(460): Ceres Seq. ID no. 13496121

SEQ ID NO: 5973 - protein, 280 aa, Zea mays subsp. mays; identical to SEQ ID NO: 2639
  peptide (1)..(280): Ceres Seq. ID no. 13496122

SEQ ID NO: 5974 - DNA, 851 bp, Zea mays subsp. mays
  misc_feature (1)..(851): Ceres Seq. ID no. 12412763
  misc_feature (1)..(851): Ortholog of  Ceres SEQ ID NO 14305967 as cited in SEQ ID NO 1343
  misc_feature (1)..(851): Ortholog of  Ceres SEQ ID NO 14309614 as cited in SEQ ID NO 52633
  misc_feature (1)..(851): Ortholog of  Ceres SEQ ID NO 12626306 as cited in SEQ ID NO 65869
atcatccctgcagttgtggatcagttcgtcctccgtctctctccacaagtctcctctaggcgccaagcaatgacaaggtcagcaccgccggcctctcctccggcgccgaagcccgtgctgcgcgggagccagctggagcagctccgcgagatcttccggcgcttcgacatggacggcgacggcagcctgacgcagctggagctgggggcgctgctgcggtcgctgggcctgcgccccacgggggaggaggcccgcgcgctgctggcggccatggactccaacggcaacggcgcggtggagttcggcgagctggcggccgccatcgcgccgctgctcaccacgcagacgcacctcgtcgaccaggcccagctcctggaggtgttccgcgccttcgaccgcgacggcaacggctacatctccgccgccgagctggcgcgatccatggcgcgcatcggccagccgctcaccttcgaggagctcacgcgcatgatgcgcgacgccgacgccgacggcgacggcgtcatcagcttcaacgagttcgccgccgtcatggccaagtccgcgctcgacttcctcggcgtcgcctgatgccctctgatggaccgatcgatcgatcggtctcgctcaccgcccgccgccgtaaccccgtgtccctgtgaccctgtccctcgcccgccattgattacctgttctctctctctctctctctctcttttgttaggaagatgctcatccggttaatgtaggataactgacacaagataatgtaactcaaaaactcatcgctggtttgtaacatggatgaactcggaaaatgtgtacatattttggatggatttgttcaatcttcc

SEQ ID NO: 5975 - protein, 195 aa, Zea mays subsp. mays
  peptide (1)..(195): Ceres Seq. ID no. 12412764
IIPAVVDQFVLRLSPQVSSRRQAMTRSAPPASPPAPKPVLRGSQLEQLREIFRRFDMDGDGSLTQLELGALLRSLGLRPTGEEARALLAAMDSNGNGAVEFGELAAAIAPLLTTQTHLVDQAQLLEVFRAFDRDGNGYISAAELARSMARIGQPLTFEELTRMMRDADADGDGVISFNEFAAVMAKSALDFLGVA

SEQ ID NO: 5976 - protein, 172 aa, Zea mays subsp. mays
  peptide (1)..(172): Ceres Seq. ID no. 12412765
MTRSAPPASPPAPKPVLRGSQLEQLREIFRRFDMDGDGSLTQLELGALLRSLGLRPTGEEARALLAAMDSNGNGAVEFGELAAAIAPLLTTQTHLVDQAQLLEVFRAFDRDGNGYISAAELARSMARIGQPLTFEELTRMMRDADADGDGVISFNEFAAVMAKSALDFLGVA

SEQ ID NO: 5977 - protein, 139 aa, Zea mays subsp. mays
  peptide (1)..(139): Ceres Seq. ID no. 12412766
MDGDGSLTQLELGALLRSLGLRPTGEEARALLAAMDSNGNGAVEFGELAAAIAPLLTTQTHLVDQAQLLEVFRAFDRDGNGYISAAELARSMARIGQPLTFEELTRMMRDADADGDGVISFNEFAAVMAKSALDFLGVA

SEQ ID NO: 5978 - DNA, 1347 bp, Zea mays subsp. mays
  misc_feature (1)..(1347): Ceres Seq. ID no. 12401406
  misc_feature (1)..(1347): Ortholog of  Ceres SEQ ID NO 13594758 as cited in SEQ ID NO 51898
  misc_feature (1)..(1347): Ortholog of  Ceres SEQ ID NO 13661175 as cited in SEQ ID NO 61110
  misc_feature (1)..(1347): Ortholog of  Ceres SEQ ID NO 13598708 as cited in SEQ ID NO 68118
  misc_feature (1)..(1347): Ortholog of  Ceres SEQ ID NO 13596265 as cited in SEQ ID NO 68369
  misc_feature (1)..(1347): Ortholog of  Ceres SEQ ID NO 15179585 as cited in SEQ ID NO 0
gggacacagcacaagaacactcctagctgaagatctcgagtgcaacgcaacgttggcgcttggcggccagtagtagcagctaatttagcgtcgctccttcctactagacgagagatcgagaaaccatggccaagctccaagtcactcctggcgccgcgttcaccgagtgcaatgaactcaacttccagggcctgtacatgtaccacacgcccctgggtcccaaggccaaccaagctgcgatcctagagagcaaggccaagatcggcatcggtgccaccgtggttaacaactgggcagtgtatgacgggccagggccaggcgctaagctggtcggccgtgcgcagggcttgcacatcctagccggaaactgggtcaactcattcaccctggtgttcgaggatgaaaggttcagtgggtccacgcttgaagtgaggggcataacggtcgaaactggcgagtgggctgttgttgggggcaccggccagtttgctatggcgaacggcatcatctccaagaagttccacgagcagagaagcgacgggaacgtcatagagcttagtgtccatgctttctgcccactgctcaaagggaaaaggggcggtgctgtgacaaaggttgggccatggggcggaagcggagggtctccaatggagctgacagagacggagacgcccatgcgtctggagagcatcaccgtccgcagcggcgtggccgtcaactccatctcattctcctacgtcgactctgccggccacaagcgctctgctggtccctggggtggttccggtggacagcctgatcaggtccagctcgccgagtctgaggtggtcacacaagtgtccggaacatacggcaccatcgacgacgacgaccgcaccgtgataacctccattaagttcgtcacgaaccttgacaagacctacgggcctttcggagcgtacggggacggcgacgacacctcctttaccgtccccgtgcagccggggagtggcgccatcgtgggcttcttcgcgcgcgttggcggggccggggactacctggacgccattggcgtctacgtgcgccccctctaaaaagctttgttttgtgatgtgaatgaagcagctgcatgcatgctgctctactccacacagagtcgagtccatcaccaccagctgcttgaatgcgtgcgtgcggccggcttccagttgctttatttcgtacctgagtgttgtgttgtggtgtgtttgctcatgtacttcggtacgttgcttggtaaactctggtcagtgttgtgtgtgtttgcctttgtcatgaatttcgacggaataataaagacctcgtgtagaagaggtcagggttttatcg

SEQ ID NO: 5979 - protein, 315 aa, Zea mays subsp. mays
  peptide (1)..(315): Ceres Seq. ID no. 12401407
MAKLQVTPGAAFTECNELNFQGLYMYHTPLGPKANQAAILESKAKIGIGATVVNNWAVYDGPGPGAKLVGRAQGLHILAGNWVNSFTLVFEDERFSGSTLEVRGITVETGEWAVVGGTGQFAMANGIISKKFHEQRSDGNVIELSVHAFCPLLKGKRGGAVTKVGPWGGSGGSPMELTETETPMRLESITVRSGVAVNSISFSYVDSAGHKRSAGPWGGSGGQPDQVQLAESEVVTQVSGTYGTIDDDDRTVITSIKFVTNLDKTYGPFGAYGDGDDTSFTVPVQPGSGAIVGFFARVGGAGDYLDAIGVYVRPL

SEQ ID NO: 5980 - protein, 291 aa, Zea mays subsp. mays
  peptide (1)..(291): Ceres Seq. ID no. 12401408
MYHTPLGPKANQAAILESKAKIGIGATVVNNWAVYDGPGPGAKLVGRAQGLHILAGNWVNSFTLVFEDERFSGSTLEVRGITVETGEWAVVGGTGQFAMANGIISKKFHEQRSDGNVIELSVHAFCPLLKGKRGGAVTKVGPWGGSGGSPMELTETETPMRLESITVRSGVAVNSISFSYVDSAGHKRSAGPWGGSGGQPDQVQLAESEVVTQVSGTYGTIDDDDRTVITSIKFVTNLDKTYGPFGAYGDGDDTSFTVPVQPGSGAIVGFFARVGGAGDYLDAIGVYVRPL

SEQ ID NO: 5981 - protein, 193 aa, Zea mays subsp. mays
  peptide (1)..(193): Ceres Seq. ID no. 12401409
MANGIISKKFHEQRSDGNVIELSVHAFCPLLKGKRGGAVTKVGPWGGSGGSPMELTETETPMRLESITVRSGVAVNSISFSYVDSAGHKRSAGPWGGSGGQPDQVQLAESEVVTQVSGTYGTIDDDDRTVITSIKFVTNLDKTYGPFGAYGDGDDTSFTVPVQPGSGAIVGFFARVGGAGDYLDAIGVYVRPL

SEQ ID NO: 5982 - DNA, 1628 bp, Zea mays subsp. mays
  misc_feature (1)..(1628): Ceres Seq. ID no. 12409250
  misc_feature (1)..(1628): Ortholog of  Ceres SEQ ID NO 13598635 as cited in SEQ ID NO 64865
  misc_feature (1)..(1628): Ortholog of  Ceres SEQ ID NO 12625120 as cited in SEQ ID NO 67706
  misc_feature (1)..(1628): Ortholog of  Ceres SEQ ID NO 13595999 as cited in SEQ ID NO 68173
aaccccaccccaccgcccgcaaccgcaagctcagattccctccccaccccaccccaccccaccgtcccgctcactccagcccagcccgcgtccccacagcccagcgacagcgggcaccggcggcatccagccatgtgcggcggcgccatcctgtcggacatcatcccgccgccgccaccgcggcgggtcacggctggccacctctggcccgagagcaagaagccgaggagggctgcatccggcaggaggggagcccccgtggagcagcatgagcaggaggaggatttcgaggccgacttcgaggagttcgaggtggagtccggcgagtcggagctcgagtccgaggacgagcccaagcccttcgccgcccccaggagcgcgctcgccagaggtggactaaacactggtgcagctggtgtcgatggccctgctgcaaattcagttaaaaggaagaggaagaaccagttcaggggtatccgccggcgcccgtggggcaaatgggctgctgagatcagagatcctcgcaagggcgtgcgcgtctggctcggtactttcaactcccccgaagaagctgccagagcttacgacgccgaggcacgcaggatccgcggcaagaaggctaaagtcaacttcccggatgaggttcctacggcggtttctcagaagcgccgtgctgctgggcctgcctctctgaaagcgcctaagatggacgttgaggaggagaagccgatcatcaagctcgcagtgaacaatatgaccaactcaaacgcatatcactaccctgccgtcgtcggccacaacatcatacccgagccattcatgcagactcagaacatgccattcgctcctctggtgaattatgctgccctagtgaacctgtcttcagaccaaggcagcaactcgttcggttgctcggacttcagcctcgagaacgactccaggacccctgacataacttcggtgcctgcgcccgttgccaccttggccgccgttggcgagtctgtgttcgtccagaacaccgccggccatgctgtggcgtctcctgcgacggggaacactggtgttgatctcgccgagttggagccgtatatgaatttcctgatggacggtggttcagacgactcgatcagcactctcttgagctgtgatggatcccaggacgtggtcagcaacatggacctttggagcttcgaggacatgcccatgtctgctggtttctactgaggcctgaggcccagcgactggtgcttgtgtacatagggggggacaaagggtaagagcctgcagtaacagagattggctctttctggtacttgcaatttctatcccttcaactctttcttccgcccccgtgtttcaggaataatgttctggagatgaagaaacgcttgcgtgggcgtgcctgcaggcacgcgtgtagtagctgcggtattagtatatatgcttagatgttcagtcacttcctttaagtacaatttggcgctggacatgtaccttattttactatgtatccgtgacaacagctatgtgtctgctccttttattttcttgtctttgcttcaaaaaaatggctctgaacattgcgagtttgtactttgtagacaatatatatatatatatatgtgtgg

SEQ ID NO: 5983 - protein, 407 aa, Zea mays subsp. mays
  peptide (1)..(407): Ceres Seq. ID no. 12409251
NPTPPPATASSDSLPTPPHPTVPLTPAQPASPQPSDSGHRRHPAMCGGAILSDIIPPPPPRRVTAGHLWPESKKPRRAASGRRGAPVEQHEQEEDFEADFEEFEVESGESELESEDEPKPFAAPRSALARGGLNTGAAGVDGPAANSVKRKRKNQFRGIRRRPWGKWAAEIRDPRKGVRVWLGTFNSPEEAARAYDAEARRIRGKKAKVNFPDEVPTAVSQKRRAAGPASLKAPKMDVEEEKPIIKLAVNNMTNSNAYHYPAVVGHNIIPEPFMQTQNMPFAPLVNYAALVNLSSDQGSNSFGCSDFSLENDSRTPDITSVPAPVATLAAVGESVFVQNTAGHAVASPATGNTGVDLAELEPYMNFLMDGGSDDSISTLLSCDGSQDVVSNMDLWSFEDMPMSAGFY

SEQ ID NO: 5984 - protein, 363 aa, Zea mays subsp. mays
  peptide (1)..(363): Ceres Seq. ID no. 12409252
MCGGAILSDIIPPPPPRRVTAGHLWPESKKPRRAASGRRGAPVEQHEQEEDFEADFEEFEVESGESELESEDEPKPFAAPRSALARGGLNTGAAGVDGPAANSVKRKRKNQFRGIRRRPWGKWAAEIRDPRKGVRVWLGTFNSPEEAARAYDAEARRIRGKKAKVNFPDEVPTAVSQKRRAAGPASLKAPKMDVEEEKPIIKLAVNNMTNSNAYHYPAVVGHNIIPEPFMQTQNMPFAPLVNYAALVNLSSDQGSNSFGCSDFSLENDSRTPDITSVPAPVATLAAVGESVFVQNTAGHAVASPATGNTGVDLAELEPYMNFLMDGGSDDSISTLLSCDGSQDVVSNMDLWSFEDMPMSAGFY

SEQ ID NO: 5985 - DNA, 1324 bp, Zea mays subsp. mays
  misc_feature (1)..(1324): Ceres Seq. ID no. 12343225
  misc_feature (1)..(1324): Ortholog of  Ceres SEQ ID NO 13646963 as cited in SEQ ID NO 20658
  misc_feature (1)..(1324): Ortholog of  Ceres SEQ ID NO 15169278 as cited in SEQ ID NO 58762
atcctcagctcagtctcttccactctcccttgacctgtctcctctcacctgctgactgctgtgccgctccgctccggtggcatctgcatctgcatctccatccctcgatctgtcttctctcagggtggaagaagcgtgacaatggaggctccacccgtggcgctgttcgacaccctcaaggcagccaaaccgttcttcttgttggctggtcccaacgtgattgaatcggaggagcacgtcctgaagatggccaaacacatcaaagcaattacgaccaagcttggaattccactcgtgttcaagtccagctttgataaagcaaaccgtacatcatcaaaatcgttccgtggtcctggtcttgaagaaggtctaaagatccttcaaaaggtgaaagcaacatatgaccttccgatagtcactgatgtgcacgaaagccaccagtgtgaagctgttggaagagttgctgacatcatacagattccagccttcctctgtcgccagactgatcttctagtggctgctgctaagactggaaaaattatcaatatcaagaaaggacaattctgtgcgccttctgttatggtgaactctacagagaaagtaaggcttgctgggaatccaaatgtgatggtctgtgagcgtggtaccatgtttggctacaatgatctatttgttgacccaaggaaccttgagtggctgagggaaagcaactgcccagttgtagctgatgtaacacatgctctacagcaaccagctggaagaaagcttgatggtggaggtgttgcaagcggtgggctacgagaactaataccgtgcattgcaaggacttcggttgctgttggtgttgatggtattttcatggaggtacatgatgaccccttgaatgcaccatgcgatggcccaactcaatggccattgcgcaatctggaagagctgttggaggaattaattgcaattgctcgagttaccaagggaaagaagccattcaagatcgacctcactccgttccaggagtgatctgctttggttgatagaaagcacaatgccaccatccatggaattccacagggtggatttcaatatgaattgagtacttgctattgttgggagcatacctgcagtggatgacttaggctatctctagcagatttttttatctcattccgtattttatttcctttttcaaactccactctgcaaacagtgtcaaacagtgttgtcatctacagtttcgcattccctgttttaccctatctactcgagacagtcttatcaccgaacaaactattgtgttgaaacctgccggattggtttgtgttatttc

SEQ ID NO: 5986 - protein, 291 aa, Zea mays subsp. mays
  peptide (1)..(291): Ceres Seq. ID no. 12343226
MEAPPVALFDTLKAAKPFFLLAGPNVIESEEHVLKMAKHIKAITTKLGIPLVFKSSFDKANRTSSKSFRGPGLEEGLKILQKVKATYDLPIVTDVHESHQCEAVGRVADIIQIPAFLCRQTDLLVAAAKTGKIINIKKGQFCAPSVMVNSTEKVRLAGNPNVMVCERGTMFGYNDLFVDPRNLEWLRESNCPVVADVTHALQQPAGRKLDGGGVASGGLRELIPCIARTSVAVGVDGIFMEVHDDPLNAPCDGPTQWPLRNLEELLEELIAIARVTKGKKPFKIDLTPFQE

SEQ ID NO: 5987 - protein, 256 aa, Zea mays subsp. mays
  peptide (1)..(256): Ceres Seq. ID no. 12343227
MAKHIKAITTKLGIPLVFKSSFDKANRTSSKSFRGPGLEEGLKILQKVKATYDLPIVTDVHESHQCEAVGRVADIIQIPAFLCRQTDLLVAAAKTGKIINIKKGQFCAPSVMVNSTEKVRLAGNPNVMVCERGTMFGYNDLFVDPRNLEWLRESNCPVVADVTHALQQPAGRKLDGGGVASGGLRELIPCIARTSVAVGVDGIFMEVHDDPLNAPCDGPTQWPLRNLEELLEELIAIARVTKGKKPFKIDLTPFQE

SEQ ID NO: 5988 - protein, 145 aa, Zea mays subsp. mays
  peptide (1)..(145): Ceres Seq. ID no. 12343228
MVNSTEKVRLAGNPNVMVCERGTMFGYNDLFVDPRNLEWLRESNCPVVADVTHALQQPAGRKLDGGGVASGGLRELIPCIARTSVAVGVDGIFMEVHDDPLNAPCDGPTQWPLRNLEELLEELIAIARVTKGKKPFKIDLTPFQE

SEQ ID NO: 5989 - DNA, 1450 bp, Zea mays subsp. mays
  misc_feature (1)..(1450): Ceres Seq. ID no. 12409243
  misc_feature (1)..(1450): Ortholog of  Ceres SEQ ID NO 15169809 as cited in SEQ ID NO 52839
  misc_feature (1)..(1450): Ortholog of  Ceres SEQ ID NO 15224302 as cited in SEQ ID NO 53942
  misc_feature (1)..(1450): Ortholog of  Ceres SEQ ID NO 14306297 as cited in SEQ ID NO 56907
agggagacggacaaaaggagaggcgtggacacgggacgcgaggtagacagcgcccggcgtgacgtggcgcgagatggagagcggagaggggggctcaccaaactgcaagtctgtctcctgactcctcgccggcgtgccggatctcctgtctctctcgcggtcggcggccgcatagcctcgttcactcgcacgacacagggcaggggggcgatgggctgcgcgacgtccaagcagttcagcaggagcgcgccggcgcacgcggatccggccgtgctggcgacccagacctcattcacggtgaacgaggtggaggcgctgtacgagctgtacaagaagctgagctgctccatcgtcaaagacgggctcatccacaaggaggagttccagctcgccttgttcaggaacagcaggagagcgaacctctttgcagacagggtcttcgatctgttcgatctcaagcggaacggagtcatcgatttcgaggagttcgtgcggtcgctcagtgtgttccaccctaaagcagatacgtcggagaagacggcgttcgctttcaagctgtatgatctgaggggaacaggctacatcgagaaagaagagctcagagagatggtcttggcgctgcttgatgagtccgacctctgcctttcagacagcaccgtcgagacgatcgtcgataacacgttcagccaagcggactcgaacggagatggcaggatagatcctgaagaatgggaggagttcgtgaagaagaacccggcaacgttaaggaacatgactctcccctatctgcaggacatcaccatgtcatttccgagcttcataatgcgttcagaagccagtgactgaaatgtttgcgtacatctgcgtgtaaggaagcaccgttccatcagctctgctgtttgttggagcctacagcttagtccatggcacgaggcaccggagaaagttcagaatgtagcagcaacggccagcagagtgcatgagggttgctgccatagctgcaggctgcagccaaacaaaatgatgaccaaagattcatctagtgtcagcttcagggttcagatggtataccagccaacaattttctttctcggtatctaaacaccgtggatgttgcgtttaaaaaaattgttgcagaggatcaacaagtctgttcatcgaagcagtgcctgagtttagaatcagaagctaactgtctattgctgagatgctttcgtctaaatcttgcgtgtagttgtaactgcaaggaaagaataacttgtggagagttggatttgttgatgaaccttagtagttcttgacttggttagttgtttccacatttcttcgcagtgccagtgcgtgcacttgtaacttgcaaattcttctcaatccacccctaatcgaagggtggatccagttccgcatgtaatgaggcaatatcatcaatagtttatgcttcgtttatccc

SEQ ID NO: 5990 - protein, 281 aa, Zea mays subsp. mays
  peptide (1)..(281): Ceres Seq. ID no. 12409244
RETDKRRGVDTGREVDSARRDVARDGERRGGLTKLQVCLLTPRRRAGSPVSLAVGGRIASFTRTTQGRGAMGCATSKQFSRSAPAHADPAVLATQTSFTVNEVEALYELYKKLSCSIVKDGLIHKEEFQLALFRNSRRANLFADRVFDLFDLKRNGVIDFEEFVRSLSVFHPKADTSEKTAFAFKLYDLRGTGYIEKEELREMVLALLDESDLCLSDSTVETIVDNTFSQADSNGDGRIDPEEWEEFVKKNPATLRNMTLPYLQDITMSFPSFIMRSEASD

SEQ ID NO: 5991 - protein, 211 aa, Zea mays subsp. mays
  peptide (1)..(211): Ceres Seq. ID no. 12409245
MGCATSKQFSRSAPAHADPAVLATQTSFTVNEVEALYELYKKLSCSIVKDGLIHKEEFQLALFRNSRRANLFADRVFDLFDLKRNGVIDFEEFVRSLSVFHPKADTSEKTAFAFKLYDLRGTGYIEKEELREMVLALLDESDLCLSDSTVETIVDNTFSQADSNGDGRIDPEEWEEFVKKNPATLRNMTLPYLQDITMSFPSFIMRSEASD

SEQ ID NO: 5992 - DNA, 1764 bp, Zea mays subsp. mays; identical to SEQ ID NO: 1515
  misc_feature (1)..(1764): Ceres Seq. ID no. 13636367
  misc_feature (1)..(1764): Ortholog of  Ceres SEQ ID NO 15177298 as cited in SEQ ID NO 52711

SEQ ID NO: 5993 - protein, 456 aa, Zea mays subsp. mays; identical to SEQ ID NO: 1516
  peptide (1)..(456): Ceres Seq. ID no. 13636368

SEQ ID NO: 5994 - protein, 392 aa, Zea mays subsp. mays; identical to SEQ ID NO: 1517
  peptide (1)..(392): Ceres Seq. ID no. 13636369

SEQ ID NO: 5995 - protein, 386 aa, Zea mays subsp. mays; identical to SEQ ID NO: 1518
  peptide (1)..(386): Ceres Seq. ID no. 13636370

SEQ ID NO: 5996 - DNA, 1386 bp, Zea mays subsp. mays
  misc_feature (1)..(1386): Ceres Seq. ID no. 13493626
  misc_feature (1)..(1386): Ortholog of  Ceres SEQ ID NO 13582297 as cited in SEQ ID NO 56486
  misc_feature (1)..(1386): Ortholog of  Ceres SEQ ID NO 13586936 as cited in SEQ ID NO 0
gaaggaaggaagccatgatgatgatgggcgaaggcgtgagcatgccgccgtggtcccaccacgtccctgtgagcggcgtcgacgaaggcgacgagatgacgccgtacctgctcgcggcgctgcgccagtacctgccgtgcaacgacgccggcgccgaggccgaggaggatgaggcggccgccgccatggcggcgggcgtggacggctacggctgcgacgagttccgcatgtacgagttcaaggtccggcggtgcgcgcgcgcgcgcagccacgactggaccgagtgccccttcgcgcacccgggggagaaggcgcggcgccgcgacccgcgcaagtaccactactccggcgccacctgcccggacttccgcaagggcgggtgcaagcgcggcgacggctgcgacatggcgcacggcgtcttcgagtgctggctccacccggcgcgctaccgcacccagccctgcaaggacggcacggcctgccgccgccgggtctgcttcttcgcgcacaccgcggaccagctgcgcgtgctcccgcccacgccgnancancantccanccccagggggcgccgnctgctcttcccccgctcgccgagtcctacgacggctccccgctccggcgccaggcgttcgagagctacctcaccaagagcatcatgtgctcgtcgccgaccagcaccctcctatcgccgcccaagtcgcccccgtcggagtccccgccattgtcgcccgacttccgccgtgggtgctggccgggcgccgggtcccccgtcaacgacgtgctcgcctcgctccgtcagctccgcctcagcagggccaactcgtccccgtcgggcggctggtgcagctaccctgcatccgcggtcgcgtacggatcgcctacggggggcgcgctctacggcctgtcctccaccccgagggccaccgccggctccggctacatggccaacctggaccctctcgacgtcaccttcggcggcgacgaggagcccgtggagagggtggagtccggccgcgcactccgcgcgaaggtgttcgagcggcttagcagggagggcgctgtttccggcgacgccggtggccccgacgtcgggtgggtctccgacctcatcaactgaggcggcggcgggtccctggcatggcaggtggcaatggcaatgggcatgggcatggagaaaggtgatggtgagccgtatcggagaaggatggcatccaaaaaaatatttccctgcatttgatttcgttcctcagttaattccgctaatccccgtgtacatatctatcaccctgtgaatattctcggttggtaagagggaggatgatgctaggcggtggatggatgggtggatttgttttggggttcttgaggtagcggaaaatatcc

SEQ ID NO: 5997 - protein, 430 aa, Zea mays subsp. mays
  peptide (1)..(430): Ceres Seq. ID no. 13493627
  misc_feature (182)..(182): Xaa is any aa, unknown or other
  misc_feature (183)..(183): Xaa is any aa, unknown or other
  misc_feature (184)..(184): Xaa is any aa, unknown or other
  misc_feature (186)..(186): Xaa is any aa, unknown or other
  misc_feature (191)..(191): Xaa is any aa, unknown or other
RKEAMMMMGEGVSMPPWSHHVPVSGVDEGDEMTPYLLAALRQYLPCNDAGAEAEEDEAAAAMAAGVDGYGCDEFRMYEFKVRRCARARSHDWTECPFAHPGEKARRRDPRKYHYSGATCPDFRKGGCKRGDGCDMAHGVFECWLHPARYRTQPCKDGTACRRRVCFFAHTADQLRVLPPTPXXXSXPRGRXLLFPRSPSPTTAPRSGARRSRATSPRASCARRRPAPSYRRPSRPRRSPRHCRPTSAVGAGRAPGPPSTTCSPRSVSSASAGPTRPRRAAGAATLHPRSRTDRLRGARSTACPPPRGPPPAPATWPTWTLSTSPSAATRSPWRGWSPAAHSARRCSSGLAGRALFPATPVAPTSGGSPTSSTEAAAGPWHGRWQWQWAWAWRKVMVSRIGEGWHPKKYFPAFDFVPQLIPLIPVYISITL

SEQ ID NO: 5998 - protein, 426 aa, Zea mays subsp. mays
  peptide (1)..(426): Ceres Seq. ID no. 13493628
  misc_feature (178)..(178): Xaa is any aa, unknown or other
  misc_feature (179)..(179): Xaa is any aa, unknown or other
  misc_feature (180)..(180): Xaa is any aa, unknown or other
  misc_feature (182)..(182): Xaa is any aa, unknown or other
  misc_feature (187)..(187): Xaa is any aa, unknown or other
MMMMGEGVSMPPWSHHVPVSGVDEGDEMTPYLLAALRQYLPCNDAGAEAEEDEAAAAMAAGVDGYGCDEFRMYEFKVRRCARARSHDWTECPFAHPGEKARRRDPRKYHYSGATCPDFRKGGCKRGDGCDMAHGVFECWLHPARYRTQPCKDGTACRRRVCFFAHTADQLRVLPPTPXXXSXPRGRXLLFPRSPSPTTAPRSGARRSRATSPRASCARRRPAPSYRRPSRPRRSPRHCRPTSAVGAGRAPGPPSTTCSPRSVSSASAGPTRPRRAAGAATLHPRSRTDRLRGARSTACPPPRGPPPAPATWPTWTLSTSPSAATRSPWRGWSPAAHSARRCSSGLAGRALFPATPVAPTSGGSPTSSTEAAAGPWHGRWQWQWAWAWRKVMVSRIGEGWHPKKYFPAFDFVPQLIPLIPVYISITL

SEQ ID NO: 5999 - protein, 425 aa, Zea mays subsp. mays
  peptide (1)..(425): Ceres Seq. ID no. 13493629
  misc_feature (177)..(177): Xaa is any aa, unknown or other
  misc_feature (178)..(178): Xaa is any aa, unknown or other
  misc_feature (179)..(179): Xaa is any aa, unknown or other
  misc_feature (181)..(181): Xaa is any aa, unknown or other
  misc_feature (186)..(186): Xaa is any aa, unknown or other
MMMGEGVSMPPWSHHVPVSGVDEGDEMTPYLLAALRQYLPCNDAGAEAEEDEAAAAMAAGVDGYGCDEFRMYEFKVRRCARARSHDWTECPFAHPGEKARRRDPRKYHYSGATCPDFRKGGCKRGDGCDMAHGVFECWLHPARYRTQPCKDGTACRRRVCFFAHTADQLRVLPPTPXXXSXPRGRXLLFPRSPSPTTAPRSGARRSRATSPRASCARRRPAPSYRRPSRPRRSPRHCRPTSAVGAGRAPGPPSTTCSPRSVSSASAGPTRPRRAAGAATLHPRSRTDRLRGARSTACPPPRGPPPAPATWPTWTLSTSPSAATRSPWRGWSPAAHSARRCSSGLAGRALFPATPVAPTSGGSPTSSTEAAAGPWHGRWQWQWAWAWRKVMVSRIGEGWHPKKYFPAFDFVPQLIPLIPVYISITL

SEQ ID NO: 6000 - DNA, 1653 bp, Zea mays subsp. mays
  misc_feature (1)..(1653): Ceres Seq. ID no. 12347991
  misc_feature (1)..(1653): Ortholog of  Ceres SEQ ID NO 13655244 as cited in SEQ ID NO 62716
aaaaactcctcaagcaatttccatttccaccacgaccactctcttcctcgcagcgcgtaccaacccgccgccgtctactgccactccgcctgctcatggcctcccctacgcaaggtgatgcccccctcgcggctccggctccggcggctgacgctacggacgcggccttcgccgccgcggccgcggtgccggatccaggcgcagagttcgggttccagcgtccggagctcgggaaggagaagctggtcgggacgggtggggttccacgagcgccatgtgttcctctgttacaagggcccggatttgtggccgtcccacctcgaggcctctgagtctgaccgcctcccccgcctcctcgccgccgccatcaaggcccgaaagcccaatctgaagaagaccatcaaattgaccatctgtgaaggagaagatggcactgaatcatcaaatggagatgtgttgatctttccagatatgatcagatataaagggctgacccattttgatgtggacaactttgttgaagaagtgcttgtgaaggatattgactggcttcctagatctcctgagcctatgagtggttcctatatttttgtttgctcccatggaagcagggacaaaaggtgtggtgtttgtggacctgctttgattaaaaggttcaaggaagagataaatgaactgggacttgatgatcaggtggctgtcagtgcatgctcacacgtgggaggtcataagtatgcaggaaatgtcatcattttcagttctgatgccaagggagaagtgactggtcattggtatggttatgttgttcctgatgatgtgcctgttttgctgcataaacatattggacaaggagaagttgtggaccatctatggaggggacagatgggtttatctgtggagcagcagaagcgagctctcgagcttcggaacatggtaaatggtggcgaagaatcccttgaagaaaccagaacagatggtgcttctttcaaccctgcagcagctggtggatgctgccaaggcaatggtggcttcacctgctgccaaactgacctgccaaaggaaaaacaagacaagagcatcatagctgagcagaaccccaagagctctgacaaggagggtggtgctggcagcaagaagggggatacaaagacttgcccagtgcccatctggtttgagacctgggagagagctgacacatatgccgctcttgctgttgttgcagctgccacagcggtgcttgtctccttcagaatctacaagaacctcaactgaagaacatgggagatcctggaagaggtgcccgaaacaagtatatgtgaaacagcttactgtgataagtctgggatgagaataaatttacctgtgcataatgctaggcttaggctatgggctatggctagcaaatcgttgtgcaaaatactgttgtatattgtttacaaagtgatgtttgaaatagaagataacggtgatgaacaagccgttggagatagccttagaacctcaaagtagcttatctggagatggagacggcgatgaaaagatgttgctgccagtgttctcgtatgtgaactccttgtgaacctccactgcaattgaagtttcgatgccttagctgctgtttatcataagcaaggcgatgggatcggcatcacc

SEQ ID NO: 6001 - protein, 423 aa, Zea mays subsp. mays
  peptide (1)..(423): Ceres Seq. ID no. 12347992
KNSSSNFHFHHDHSLPRSAYQPAAVYCHSACSWPPLRKVMPPSRLRLRRLTLRTRPSPPRPRCRIQAQSSGSSVRSSGRRSWSGRVGFHERHVFLCYKGPDLWPSHLEASESDRLPRLLAAAIKARKPNLKKTIKLTICEGEDGTESSNGDVLIFPDMIRYKGLTHFDVDNFVEEVLVKDIDWLPRSPEPMSGSYIFVCSHGSRDKRCGVCGPALIKRFKEEINELGLDDQVAVSACSHVGGHKYAGNVIIFSSDAKGEVTGHWYGYVVPDDVPVLLHKHIGQGEVVDHLWRGQMGLSVEQQKRALELRNMVNGGEESLEETRTDGASFNPAAAGGCCQGNGGFTCCQTDLPKEKQDKSIIAEQNPKSSDKEGGAGSKKGDTKTCPVPIWFETWERADTYAALAVVAAATAVLVSFRIYKNLN

SEQ ID NO: 6002 - protein, 384 aa, Zea mays subsp. mays
  peptide (1)..(384): Ceres Seq. ID no. 12347993
MPPSRLRLRRLTLRTRPSPPRPRCRIQAQSSGSSVRSSGRRSWSGRVGFHERHVFLCYKGPDLWPSHLEASESDRLPRLLAAAIKARKPNLKKTIKLTICEGEDGTESSNGDVLIFPDMIRYKGLTHFDVDNFVEEVLVKDIDWLPRSPEPMSGSYIFVCSHGSRDKRCGVCGPALIKRFKEEINELGLDDQVAVSACSHVGGHKYAGNVIIFSSDAKGEVTGHWYGYVVPDDVPVLLHKHIGQGEVVDHLWRGQMGLSVEQQKRALELRNMVNGGEESLEETRTDGASFNPAAAGGCCQGNGGFTCCQTDLPKEKQDKSIIAEQNPKSSDKEGGAGSKKGDTKTCPVPIWFETWERADTYAALAVVAAATAVLVSFRIYKNLN

SEQ ID NO: 6003 - protein, 266 aa, Zea mays subsp. mays
  peptide (1)..(266): Ceres Seq. ID no. 12347994
MIRYKGLTHFDVDNFVEEVLVKDIDWLPRSPEPMSGSYIFVCSHGSRDKRCGVCGPALIKRFKEEINELGLDDQVAVSACSHVGGHKYAGNVIIFSSDAKGEVTGHWYGYVVPDDVPVLLHKHIGQGEVVDHLWRGQMGLSVEQQKRALELRNMVNGGEESLEETRTDGASFNPAAAGGCCQGNGGFTCCQTDLPKEKQDKSIIAEQNPKSSDKEGGAGSKKGDTKTCPVPIWFETWERADTYAALAVVAAATAVLVSFRIYKNLN

SEQ ID NO: 6004 - DNA, 1517 bp, Zea mays subsp. mays
  misc_feature (1)..(1517): Ceres Seq. ID no. 13570867
  misc_feature (1)..(1517): Ortholog of  Ceres SEQ ID NO 13592961 as cited in SEQ ID NO 20522
  misc_feature (1)..(1517): Ortholog of  Ceres SEQ ID NO 13596527 as cited in SEQ ID NO 62582
  misc_feature (1)..(1517): Ortholog of  Ceres SEQ ID NO 15226378 as cited in SEQ ID NO 62741
  misc_feature (1)..(1517): Ortholog of  Ceres SEQ ID NO 13597389 as cited in SEQ ID NO 63426
  misc_feature (1)..(1517): Ortholog of  Ceres SEQ ID NO 15169639 as cited in SEQ ID NO 64624
  misc_feature (1)..(1517): Ortholog of  Ceres SEQ ID NO 14303071 as cited in SEQ ID NO 67114
  misc_feature (1)..(1517): Ortholog of  Ceres SEQ ID NO 13595998 as cited in SEQ ID NO 68161
  misc_feature (1)..(1517): Ortholog of  Ceres SEQ ID NO 14303635 as cited in SEQ ID NO 68503
agccacacaagcaaagaacttggccccgcctcccgtctcttaccgcacatgcgcgtcgggccgcgtcgacatagctgcttgccgccgacacccgcagccgcaatggccgtcgcccacgcgccgccgcgccggggcgtgctccccctcctgctcgtcgccgcgctcgtggcggcgttgccggccacctgcgccgcggccaggagcaagaagtcgtacacggccatcttcagcttcggggactcgctctccgacgccggcaacctcatcgtcaacggcacgcccaaggcgctcaccaccgcgcgccctccctacgggatgaccttcttccgcaagcccaccggccgctgctccaacggccgcctcgtcgtcgacttcctggccgagcatttcgggctgccactgccgccaccgtcgcaggccaagggcaaggacttcaagaagggcgccaacttcgccatcaccggcgcgacggccctggagtactccttcttcaaggcgcacggcatcgaccagcgcatctggaacaccggctccatcaacacccagatcggctggctccaggacatgaagccgtccctctgtaaatcggagcaagactgcaaggattacttcagcaaatccctgttcgtcgtcggggagttcgggggcaacgactacaacgcgccgctcttctccggcgtcccattttctgatgtcaagacttacgtgccccttgttgcaaaggctatcgccaatggcgttgagaaactgatcgagcttggggcaacagacctcctggtgcctggcgttctcccaattggctgcttcccgttgtacctgacgctgtacaacaccagcagcaaagcagattacaacgcccggaccgggtgccttcggaggtacaaccgcctggccttccaccacaacagggagctgaagcagcagcttgacgagcttcagaagaagtaccccaagacgaagatcatgtatggagattacttcaaggctgcactgcagtttgtcgtcaaccctgggaaatttggtttcagcacggctttgcaagcgtgctgcggcgccggagggcagggcaactacaacttcaacctgaagaagaagtgtggcgagcagggcgcgagcgtgtgctccaacccgtcgtcgtacgtgagctgggatggcatccacatgaccgaagctgcgtacagaaaggtcgccgatggctggttgaatggcccgtatgctcagcccccaattctcaagtcatgatcgagattactaggctgtgcgtaacaccgccgcagctgcatgctgcggctagagatatatatgaggagtgtttcaggcaatagatatgctaagttatggtaaagctatttggtctgttcattggaagatctgtataaactgcgccggtatagatatgttcccagctgaaatggctctagcacagatgtgcatggcatgttctctgattcttttcatttgttctaaaaaaatattgcggcagtaatatgagttgataaaagtaactaaatttctgc

SEQ ID NO: 6005 - protein, 413 aa, Zea mays subsp. mays
  peptide (1)..(413): Ceres Seq. ID no. 13570868
SHTSKELGPASRLLPHMRVGPRRHSCLPPTPAAAMAVAHAPPRRGVLPLLLVAALVAALPATCAAARSKKSYTAIFSFGDSLSDAGNLIVNGTPKALTTARPPYGMTFFRKPTGRCSNGRLVVDFLAEHFGLPLPPPSQAKGKDFKKGANFAITGATALEYSFFKAHGIDQRIWNTGSINTQIGWLQDMKPSLCKSEQDCKDYFSKSLFVVGEFGGNDYNAPLFSGVPFSDVKTYVPLVAKAIANGVEKLIELGATDLLVPGVLPIGCFPLYLTLYNTSSKADYNARTGCLRRYNRLAFHHNRELKQQLDELQKKYPKTKIMYGDYFKAALQFVVNPGKFGFSTALQACCGAGGQGNYNFNLKKKCGEQGASVCSNPSSYVSWDGIHMTEAAYRKVADGWLNGPYAQPPILKS

SEQ ID NO: 6006 - protein, 397 aa, Zea mays subsp. mays
  peptide (1)..(397): Ceres Seq. ID no. 13570869
MRVGPRRHSCLPPTPAAAMAVAHAPPRRGVLPLLLVAALVAALPATCAAARSKKSYTAIFSFGDSLSDAGNLIVNGTPKALTTARPPYGMTFFRKPTGRCSNGRLVVDFLAEHFGLPLPPPSQAKGKDFKKGANFAITGATALEYSFFKAHGIDQRIWNTGSINTQIGWLQDMKPSLCKSEQDCKDYFSKSLFVVGEFGGNDYNAPLFSGVPFSDVKTYVPLVAKAIANGVEKLIELGATDLLVPGVLPIGCFPLYLTLYNTSSKADYNARTGCLRRYNRLAFHHNRELKQQLDELQKKYPKTKIMYGDYFKAALQFVVNPGKFGFSTALQACCGAGGQGNYNFNLKKKCGEQGASVCSNPSSYVSWDGIHMTEAAYRKVADGWLNGPYAQPPILKS

SEQ ID NO: 6007 - protein, 379 aa, Zea mays subsp. mays
  peptide (1)..(379): Ceres Seq. ID no. 13570870
MAVAHAPPRRGVLPLLLVAALVAALPATCAAARSKKSYTAIFSFGDSLSDAGNLIVNGTPKALTTARPPYGMTFFRKPTGRCSNGRLVVDFLAEHFGLPLPPPSQAKGKDFKKGANFAITGATALEYSFFKAHGIDQRIWNTGSINTQIGWLQDMKPSLCKSEQDCKDYFSKSLFVVGEFGGNDYNAPLFSGVPFSDVKTYVPLVAKAIANGVEKLIELGATDLLVPGVLPIGCFPLYLTLYNTSSKADYNARTGCLRRYNRLAFHHNRELKQQLDELQKKYPKTKIMYGDYFKAALQFVVNPGKFGFSTALQACCGAGGQGNYNFNLKKKCGEQGASVCSNPSSYVSWDGIHMTEAAYRKVADGWLNGPYAQPPILKS

SEQ ID NO: 6008 - DNA, 983 bp, Zea mays subsp. mays
  misc_feature (1)..(983): Ceres Seq. ID no. 12340823
  misc_feature (1)..(983): Ortholog of  Ceres SEQ ID NO 13661969 as cited in SEQ ID NO 61215
  misc_feature (1)..(983): Ortholog of  Ceres SEQ ID NO 12614809 as cited in SEQ ID NO 68808
  misc_feature (1)..(983): Ortholog of  Ceres SEQ ID NO 12634366 as cited in SEQ ID NO 0
  misc_feature (1)..(983): Ortholog of  Ceres SEQ ID NO 14309113 as cited in SEQ ID NO 0
  misc_feature (1)..(983): Ortholog of  Ceres SEQ ID NO 15175257 as cited in SEQ ID NO 0
aaccttatttggcccggcgcgggagcccgtcctataactgaataaccgatcgaggcgcgcaacgcacacctccgattcaggacgagcagccggccagccagcgcgcgagaggacgtacggacgcacagctaggcggaggcgatggacggccgacgacgacggcaatggccgcggtcgcgctcgggggctgccgccgcgcctctcctcctcctgctgctcctggcggtgtccttgggtgggcatggtgatcacggcgcggcggctgcgggcgtcgccccggcaggcggcaacggcatgacggagctgcagaagcacgtggcgttcttcgaccgcaaccacgacggcatcatcaccttcgacgagacctaccaaggtctgcgggacgtcggagtcggcgatgtcacggccaaagccagcgccgcgttcataaacggcgccctcgggcccaagaccagacctgacaattccaactcctcaagcatggatatctacgtagagaacattcagaagggcaaacatggaagcgacacaggcgcctacgacgctcaaggaaggttcgttcccgcgaagctggacgagatgttcaccaagcacgccaagaccgtaccgaacgctctgacgaaagacgagctcgacgagatgctcaaggataaccgggagaagatggacgtcgcaggatggctgggagccaagtcggagtgggagatgctgtacaagctggccaaggacaaggacgggcgcctgcccaaggacaccgtcaggaccgtgtacgacggatccctcttttaccagctggcggcgcaggggaagaagggctgattcggttacgttaatttcagtaatcaataacaagcaacgtttttttttttttgtcgtttctgaatgcttgcctgtgtggctgtgtaagaaagcgagtgggtcggactcaatggcaggcaacggttttgttttttttattattattttaacggatcggttctact

SEQ ID NO: 6009 - protein, 225 aa, Zea mays subsp. mays
  peptide (1)..(225): Ceres Seq. ID no. 12340824
MDGRRRRQWPRSRSGAAAAPLLLLLLLAVSLGGHGDHGAAAAGVAPAGGNGMTELQKHVAFFDRNHDGIITFDETYQGLRDVGVGDVTAKASAAFINGALGPKTRPDNSNSSSMDIYVENIQKGKHGSDTGAYDAQGRFVPAKLDEMFTKHAKTVPNALTKDELDEMLKDNREKMDVAGWLGAKSEWEMLYKLAKDKDGRLPKDTVRTVYDGSLFYQLAAQGKKG

SEQ ID NO: 6010 - protein, 174 aa, Zea mays subsp. mays
  peptide (1)..(174): Ceres Seq. ID no. 12340825
MTELQKHVAFFDRNHDGIITFDETYQGLRDVGVGDVTAKASAAFINGALGPKTRPDNSNSSSMDIYVENIQKGKHGSDTGAYDAQGRFVPAKLDEMFTKHAKTVPNALTKDELDEMLKDNREKMDVAGWLGAKSEWEMLYKLAKDKDGRLPKDTVRTVYDGSLFYQLAAQGKKG

SEQ ID NO: 6011 - protein, 112 aa, Zea mays subsp. mays
  peptide (1)..(112): Ceres Seq. ID no. 12340826
MDIYVENIQKGKHGSDTGAYDAQGRFVPAKLDEMFTKHAKTVPNALTKDELDEMLKDNREKMDVAGWLGAKSEWEMLYKLAKDKDGRLPKDTVRTVYDGSLFYQLAAQGKKG

SEQ ID NO: 6012 - DNA, 1514 bp, Zea mays subsp. mays; identical to SEQ ID NO: 2054
  misc_feature (1)..(1514): Ceres Seq. ID no. 12340715
  misc_feature (1)..(1514): Ortholog of  Ceres SEQ ID NO 13638540 as cited in SEQ ID NO 51531
  misc_feature (1)..(1514): Ortholog of  Ceres SEQ ID NO 13595337 as cited in SEQ ID NO 56160
  misc_feature (1)..(1514): Ortholog of  Ceres SEQ ID NO 12615230 as cited in SEQ ID NO 62513

SEQ ID NO: 6013 - protein, 309 aa, Zea mays subsp. mays; identical to SEQ ID NO: 2055
  peptide (1)..(309): Ceres Seq. ID no. 12340716

SEQ ID NO: 6014 - protein, 182 aa, Zea mays subsp. mays; identical to SEQ ID NO: 2056
  peptide (1)..(182): Ceres Seq. ID no. 12340717

SEQ ID NO: 6015 - DNA, 1070 bp, Zea mays subsp. mays
  misc_feature (1)..(1070): Ceres Seq. ID no. 12356321
  misc_feature (1)..(1070): Ortholog of  Ceres SEQ ID NO 13594163 as cited in SEQ ID NO 60426
agattttgacaacgccttcccaacttgctcgctcccgcaacgacagcgcgcacttggattcggcgaccaccggagcgcggaggaggcacaggcgccgatctagagacgatggccgccgcgggctcctcgccgtccttctcctcctcgagtaagcggctggaagggaaggtggccctcgtcaccggtggcgccaccggcatcggcgaggccatcgttcgcctcttcatggagcacggcgccaaggtctgcatcgcggacatccaggatgaggccgggcagcagctgcgcgacgccctgggaggtgacgcgcagggcgccatgttcgtccactgcgacgtgacgtcggaggaggacgtgagccgcgccgtggacgctgcggcggagcggttcggcgcgctggacgtgatggtgaataacgccggcgtgacgggcaccaaggtgacggacatccgcaccgtggacttcgcggaggcgcgcagggtgctcgacgtcaacgtgcacggcgtgttcctggtgatgaagcacgcggcgcgcgctatgatcccgcggaagcggggctccatcgtgtcgctggccagcgtggccagcgccatcggcgggacgggcccgcacgtctacacggcgtccaagcacgccgtggtcgggctcaccaagagcgtcgccgcggagctcggccgtcatggggtgcgcgtcaactgcgtgtccccctatgccgtgcccacggcgctgtcgatgccgcacctgccccagggcgcgcgcgcagatgacgcgctcaaggacttcctggcctttgtcggcggcgaggccaacctcaagggcgtcgacgccatgcccgaggacgtcgcccaggcggtgctctacctggccagcgacgaggcgaggtacgtcagcgcggtcaacctcatggtggacggaggcttcacagccgtaaacaataacctcagggcgtttgaggattagttgaggcatttatgccagctctgggattgggagggagtattaccactatttcttctgctgttgtgacaagtgagtgcaagactaataaactgcagcatgttcatgtagcc

SEQ ID NO: 6016 - protein, 283 aa, Zea mays subsp. mays
  peptide (1)..(283): Ceres Seq. ID no. 12356322
MAAAGSSPSFSSSSKRLEGKVALVTGGATGIGEAIVRLFMEHGAKVCIADIQDEAGQQLRDALGGDAQGAMFVHCDVTSEEDVSRAVDAAAERFGALDVMVNNAGVTGTKVTDIRTVDFAEARRVLDVNVHGVFLVMKHAARAMIPRKRGSIVSLASVASAIGGTGPHVYTASKHAVVGLTKSVAAELGRHGVRVNCVSPYAVPTALSMPHLPQGARADDALKDFLAFVGGEANLKGVDAMPEDVAQAVLYLASDEARYVSAVNLMVDGGFTAVNNNLRAFED

SEQ ID NO: 6017 - protein, 244 aa, Zea mays subsp. mays
  peptide (1)..(244): Ceres Seq. ID no. 12356323
MEHGAKVCIADIQDEAGQQLRDALGGDAQGAMFVHCDVTSEEDVSRAVDAAAERFGALDVMVNNAGVTGTKVTDIRTVDFAEARRVLDVNVHGVFLVMKHAARAMIPRKRGSIVSLASVASAIGGTGPHVYTASKHAVVGLTKSVAAELGRHGVRVNCVSPYAVPTALSMPHLPQGARADDALKDFLAFVGGEANLKGVDAMPEDVAQAVLYLASDEARYVSAVNLMVDGGFTAVNNNLRAFED

SEQ ID NO: 6018 - protein, 213 aa, Zea mays subsp. mays
  peptide (1)..(213): Ceres Seq. ID no. 12356324
MFVHCDVTSEEDVSRAVDAAAERFGALDVMVNNAGVTGTKVTDIRTVDFAEARRVLDVNVHGVFLVMKHAARAMIPRKRGSIVSLASVASAIGGTGPHVYTASKHAVVGLTKSVAAELGRHGVRVNCVSPYAVPTALSMPHLPQGARADDALKDFLAFVGGEANLKGVDAMPEDVAQAVLYLASDEARYVSAVNLMVDGGFTAVNNNLRAFED

SEQ ID NO: 6019 - DNA, 791 bp, Zea mays subsp. mays
  misc_feature (1)..(791): Ceres Seq. ID no. 12386614
  misc_feature (1)..(791): Ortholog of  Ceres SEQ ID NO 14306406 as cited in SEQ ID NO 1412
  misc_feature (1)..(791): Ortholog of  Ceres SEQ ID NO 14309488 as cited in SEQ ID NO 52755
  misc_feature (1)..(791): Ortholog of  Ceres SEQ ID NO 13661778 as cited in SEQ ID NO 61468
cttctcacgccgcctgcccagagcctctgcatcatccaacaacagcgacaccacgggactcgcgccatcttcagccagcgcaaacacatggcgaggatactcgtcgaagcgcccgcaggctcgggctcgccggaggactccatcaactcggacatgatcctcatcctcgccggcctgctctgcgcgctggtctgcgtcctcggcctgggcctcgtcgcccggtgcgcgtgctcgtggcgctgggccaccgagtccggccgggcgcagccggacgccgccaaagccgcgaacaggggcgtcaagaaggaggttctgcgctcgctcccgaccgtcacgtacgtctccgacagcggcaaggcggcggcggccgcggagggaggggccgacgagtgcgccatctgcctcgccgagttcgagggaggccaggccgtgcgcgtgctgccgcagtgcggccacgcgttccacgccgcctgcgtcgacacgtggctgcgcgcgcactcctcctgcccgtcctgccgccgggtgctggccgtcgacctgccccccgccgagcggtgccgccgctgtggcgcgcgccccggtgccggcatcagcgcgctctggaaggcgcccacncgctgcagcgccgaggggccgacgttcttggcgtagtgccgtgcgcactcgatatacaggaattgaaccgacgcgcagtctcagtgatgaacttgtttttttttttagcctggtaggtttcaccttttttaggtgtgtgtagtgattagctcaacggtggagtgttctggacaagc

SEQ ID NO: 6020 - protein, 242 aa, Zea mays subsp. mays
  peptide (1)..(242): Ceres Seq. ID no. 12386615
  misc_feature (205)..(205): Xaa is any aa, unknown or other
SHAACPEPLHHPTTATPRDSRHLQPAQTHGEDTRRSARRLGLAGGLHQLGHDPHPRRPALRAGLRPRPGPRRPVRVLVALGHRVRPGAAGRRQSREQGRQEGGSALAPDRHVRLRQRQGGGGRGGRGRRVRHLPRRVRGRPGRARAAAVRPRVPRRLRRHVAARALLLPVLPPGAGRRPAPRRAVPPLWRAPRCRHQRALEGAHXLQRRGADVLGVVPCALDIQELNRRAVSVMNLFFFLAW

SEQ ID NO: 6021 - protein, 216 aa, Zea mays subsp. mays
  peptide (1)..(216): Ceres Seq. ID no. 12386616
  misc_feature (205)..(205): Xaa is any aa, unknown or other
LLTPPAQSLCIIQQQRHHGTRAIFSQRKHMARILVEAPAGSGSPEDSINSDMILILAGLLCALVCVLGLGLVARCACSWRWATESGRAQPDAAKAANRGVKKEVLRSLPTVTYVSDSGKAAAAAEGGADECAICLAEFEGGQAVRVLPQCGHAFHAACVDTWLRAHSSCPSCRRVLAVDLPPAERCRRCGARPGAGISALWKAPXRCSAEGPTFLA

SEQ ID NO: 6022 - protein, 187 aa, Zea mays subsp. mays
  peptide (1)..(187): Ceres Seq. ID no. 12386617
  misc_feature (176)..(176): Xaa is any aa, unknown or other
MARILVEAPAGSGSPEDSINSDMILILAGLLCALVCVLGLGLVARCACSWRWATESGRAQPDAAKAANRGVKKEVLRSLPTVTYVSDSGKAAAAAEGGADECAICLAEFEGGQAVRVLPQCGHAFHAACVDTWLRAHSSCPSCRRVLAVDLPPAERCRRCGARPGAGISALWKAPXRCSAEGPTFLA

SEQ ID NO: 6023 - DNA, 1042 bp, Zea mays subsp. mays
  misc_feature (1)..(1042): Ceres Seq. ID no. 13598836
  misc_feature (1)..(1042): Ortholog of  Ceres SEQ ID NO 14301396 as cited in SEQ ID NO 51789
  misc_feature (1)..(1042): Ortholog of  Ceres SEQ ID NO 12610031 as cited in SEQ ID NO 55811
  misc_feature (1)..(1042): Ortholog of  Ceres SEQ ID NO 12619664 as cited in SEQ ID NO 66048
agcatcaccattcttcatccctcgttgtcatctcacagcttgggctagagaccaaacaaaccaaagggaagcatggcagcaggcctgcaagtgtttggccagccggcgtctactgatgttgccagggttctgacgtgcctgtttgagaagaaattggagtttgagcttgtccgcattgatacatttaagacacatcacaggcttcctgagttcatcaggctgcgggatccgaatgggcaagtgaccttcaagcatggcgacaaaacccttgttgattcaagggacatatgccggtacgtttgcaaccagtttccaaattacggaaacaagagcctctatggatctggtgctctagaacgggcatcgatagaacagtggctccaggcagaagcccagaactttggccctcccagctctgcgcttgtgtttcagctggcgttcgttccgcacctcagtcacctgggcgttcgtcaggaccctgctgttattgctgaaaacgaggacaaactgaagcaggttcttgatgtttacgacgaaatactctccaagaacgagtacctggctggtgatgagttcaccctggccgacctgtctcaccttccgaactcgcactacatcgtaaacaccgagagaggaaggaagctcttcaccaacaagaagaatgtggcgaaatggtatgacaggctctcgaagcgcgagacatgggtgcaggtcgtcaagatgcagaaggaacatcctggtgcgttcaagtaatggcttgtcttggggagttgtgagtatggcttcatcgtccgtgttggtctggctcatcagtgttaaaagcccatcagtgtcgtcaaccagaataatgtgaagcccaactgtgatgtatggtcttttttttttttaaaagcgcatttgtaaactattggctatttcttgcacgtgccaattcatcgtcacatataaaataaactgtatctttggaccttgaaaaaaaaaaaaaaaaaaaaaaaaagaaaaaaaaaaaaaaaaaacggcacgagaagccggcacgagaagc

SEQ ID NO: 6024 - protein, 226 aa, Zea mays subsp. mays
  peptide (1)..(226): Ceres Seq. ID no. 15222432
MAAGLQVFGQPASTDVARVLTCLFEKKLEFELVRIDTFKTHHRLPEFIRLRDPNGQVTFKHGDKTLVDSRDICRYVCNQFPNYGNKSLYGSGALERASIEQWLQAEAQNFGPPSSALVFQLAFVPHLSHLGVRQDPAVIAENEDKLKQVLDVYDEILSKNEYLAGDEFTLADLSHLPNSHYIVNTERGRKLFTNKKNVAKWYDRLSKRETWVQVVKMQKEHPGAFK

SEQ ID NO: 6025 - DNA, 929 bp, Zea mays subsp. mays
  misc_feature (1)..(929): Ceres Seq. ID no. 12342915
  misc_feature (1)..(929): Ortholog of  Ceres SEQ ID NO 13662725 as cited in SEQ ID NO 64628
ctgttcttcttcgatttattagcccagcgttctccctctctcgtgggcgtggcgacgacttggaggccatcgctgccgccctacgccaggtgcccagatcatctgcggccccttcgccggcgacgatcaccatccatcagaaataggatcaagcgcttgaacttacagcgagatggaaaatgatagaaggcaacttggtcagatcgatccaagaagagcccgctttccttgctgcatagtatggactccaataccattcatcacttggttggtgccctttatcggtcacattggcatctgcagagaagacggtgtaattctggacttctctggtccacattttgtatcagttgacaattttgcattcggagctgttgcgcgctacattcaagtaaactgcgatgagtgctataagcttattgaacctgaaggagatgccacgtgggacggcgcgctgaagaaaggcacgcaggagttccaaaacagggaactacaacctgttcacctgcaactgccactcctttgtcgcaaacaatctgaacaggctgttttattccggccacgacgaatggaatgtggtcagcttggctgctgtgatgttcttacgaggccgctgggtgagcacggcatcggtggtgaagaccttattgccatttgcagttgtgctttccatcggtaccttccttggcggcacgaccttcctgaccggccttcttgctttcgccgctgcgatgactgtctggttccttgtgggcacctactgcatcaaaggtctcatagagttgtgattagagtatgttagactcgttgtagggggttcaagggtggcatatttttaagagttcaagcgtggcacatttttatttgtattgcattcctgtataatggattcttgatgttattcatgcacctatatgttccaaattccg

SEQ ID NO: 6026 - protein, 209 aa, Zea mays subsp. mays
  peptide (1)..(209): Ceres Seq. ID no. 12342916
MENDRRQLGQIDPRRARFPCCIVWTPIPFITWLVPFIGHIGICREDGVILDFSGPHFVSVDNFAFGAVARYIQVNCDECYKLIEPEGDATWDGALKKGTQEFQNRELQPVHLQLPLLCRKQSEQAVLFRPRRMECGQLGCCDVLTRPLGEHGIGGEDLIAICSCAFHRYLPWRHDLPDRPSCFRRCDDCLVPCGHLLHQRSHRVVIRVC

SEQ ID NO: 6027 - DNA, 876 bp, Zea mays subsp. mays
  misc_feature (1)..(876): Ceres Seq. ID no. 12390099
  misc_feature (1)..(876): Ortholog of  Ceres SEQ ID NO 12466413 as cited in SEQ ID NO 20470
gcacgagaccattacctagaacatcctaatcgaaaaccactcgcgcgtccgttccgcctccactgaacatctccttttaacacccggctccggcgactcgccccttcctccactggtgcatccaccattccacctaccccacccccacaacccgctcgcgcggctgtccaatggcgggaggcggggcgccgtcagcgtggggcccgagcccggcgctggtgaccgcactggtggcgctgcttgggctcggcctcgccgcctacatcgtcggcccgcagctctactggcacgccgcggaggtgctcacggcggcggccgcgtgccccgcctgcgactgcaactgcgacgcgcgcccgctcctcgaccttccggaagattgtgctaaacacttcaaaggggtcaagagtcgcgcatctggtgaagagacagaaaagagtttcacagagctgcttgtagaagaactaaaacagagagaagaggaggcaacacaagctcagcaagaggccgatgttaagttgctcgaggccaaaaagttagcttcacagtatcagaaggaagctgacaaatgcagctcaggcatggatacctgtgaagaaactagggagaactcagcggaagcattggtccaacaaaagaaactgacttctttgtgggagcgaagggctcgggaactaggatggagacccgagaatgccaaggcacgtctaaagtagtaaaaccagtggatggtgttggatactatgtgtagcaatagatctcattgtaaaaccagtggatggtgttggatactacgagctcgagatgatgaggaaacaaatgagttcctggttggactcgactctctttacacgccatggggccttattgttcatagtt

SEQ ID NO: 6028 - protein, 180 aa, Zea mays subsp. mays
  peptide (1)..(180): Ceres Seq. ID no. 12390100
MAGGGAPSAWGPSPALVTALVALLGLGLAAYIVGPQLYWHAAEVLTAAAACPACDCNCDARPLLDLPEDCAKHFKGVKSRASGEETEKSFTELLVEELKQREEEATQAQQEADVKLLEAKKLASQYQKEADKCSSGMDTCEETRENSAEALVQQKKLTSLWERRARELGWRPENAKARLK

SEQ ID NO: 6029 - DNA, 1183 bp, Zea mays subsp. mays
  misc_feature (1)..(1183): Ceres Seq. ID no. 12341715
  misc_feature (1)..(1183): Ortholog of  Ceres SEQ ID NO 14307273 as cited in SEQ ID NO 54302
  misc_feature (1)..(1183): Ortholog of  Ceres SEQ ID NO 14315317 as cited in SEQ ID NO 58242
  misc_feature (1)..(1183): Ortholog of  Ceres SEQ ID NO 13655375 as cited in SEQ ID NO 63347
  misc_feature (1)..(1183): Ortholog of  Ceres SEQ ID NO 12626166 as cited in SEQ ID NO 64505
  misc_feature (1)..(1183): Ortholog of  Ceres SEQ ID NO 14301599 as cited in SEQ ID NO 65699
  misc_feature (1)..(1183): Ortholog of  Ceres SEQ ID NO 14301978 as cited in SEQ ID NO 0
  misc_feature (1)..(1183): Ortholog of  Ceres SEQ ID NO 14303290 as cited in SEQ ID NO 0
aataatttggctaaggcttgtgctgcctatcgtgactttgtatcacaaaatgctataagagttaaaacttcttgttttttcttaaaaagttttggactagggtagtggggttttaaattttgctgagatacttctacctgcctgtaaggactagggtagtggggttttaaattttgcccacaaatgtaaacttttggcctaatccacctgaatagacaggatttaacactattatttgcagcactgataaccttattttgcagtgtttacttgcacaatgtgcgcttttttcctccttgcccatgttatcctaaaaattgaggaagttcttacatttgtcgacggacagagtactagatcttatattatcaacatccactaccttaacgagctggcatctgctggttacattctgctcccttcatgtagcattatggatgaagttctttgagcataagccttttgattcaagaactgtcatgggatttggagtacttaacggaatctccattgggctcctcaacttgagtcttggcttcaactctgttgggttttaccagatgactaagctggcaatcatcccgtgcactgtcattttagagacacttttcttcaggaagaagttcagtcggagtatccagatgtccctttctgtgcttcttcttggtgttggtgttgcaactgtcactgatctgcaactcaatgctgtgggatccatactgtccttgctggcaattatcacgacttgcattgctcaaattatgacaaacactatccagaagaagttcaaggtctcatcaacccaactgctttaccagtcttgcccttaccaatcactgaccctgtttctcattggccccttccttgatggctttttgactaaccaaaatgtctttgcttttaattatacatctcaagttgtgtttttcatcgtcctgtcatgcttgatatctgtttcagtgaacttcagcactttccttgtgatcggaaagacatctcctgttacttaccaagtcctgggccatcttaaaacatgccttgttcttgcttttggttatgttttgcttcacgatccgtttagctggagaaacatacttggaatcctaattgctgtagttggaatggtcttgtattcatacttctgcacagtggagacccagcaaaaaaatgttgaagtctcccc

SEQ ID NO: 6030 - protein, 248 aa, Zea mays subsp. mays
  peptide (1)..(248): Ceres Seq. ID no. 12341716
MKFFEHKPFDSRTVMGFGVLNGISIGLLNLSLGFNSVGFYQMTKLAIIPCTVILETLFFRKKFSRSIQMSLSVLLLGVGVATVTDLQLNAVGSILSLLAIITTCIAQIMTNTIQKKFKVSSTQLLYQSCPYQSLTLFLIGPFLDGFLTNQNVFAFNYTSQVVFFIVLSCLISVSVNFSTFLVIGKTSPVTYQVLGHLKTCLVLAFGYVLLHDPFSWRNILGILIAVVGMVLYSYFCTVETQQKNVEVS

SEQ ID NO: 6031 - protein, 234 aa, Zea mays subsp. mays
  peptide (1)..(234): Ceres Seq. ID no. 12341717
MGFGVLNGISIGLLNLSLGFNSVGFYQMTKLAIIPCTVILETLFFRKKFSRSIQMSLSVLLLGVGVATVTDLQLNAVGSILSLLAIITTCIAQIMTNTIQKKFKVSSTQLLYQSCPYQSLTLFLIGPFLDGFLTNQNVFAFNYTSQVVFFIVLSCLISVSVNFSTFLVIGKTSPVTYQVLGHLKTCLVLAFGYVLLHDPFSWRNILGILIAVVGMVLYSYFCTVETQQKNVEVS

SEQ ID NO: 6032 - protein, 207 aa, Zea mays subsp. mays
  peptide (1)..(207): Ceres Seq. ID no. 12341718
MTKLAIIPCTVILETLFFRKKFSRSIQMSLSVLLLGVGVATVTDLQLNAVGSILSLLAIITTCIAQIMTNTIQKKFKVSSTQLLYQSCPYQSLTLFLIGPFLDGFLTNQNVFAFNYTSQVVFFIVLSCLISVSVNFSTFLVIGKTSPVTYQVLGHLKTCLVLAFGYVLLHDPFSWRNILGILIAVVGMVLYSYFCTVETQQKNVEVS

SEQ ID NO: 6033 - DNA, 791 bp, Zea mays subsp. mays
  misc_feature (1)..(791): Ceres Seq. ID no. 12401397
  misc_feature (1)..(791): Ortholog of  Ceres SEQ ID NO 13638466 as cited in SEQ ID NO 58311
ccaataggtggtcactctactacccgaagccgcgggctcaaccctaactgacccagagcgatcggagctgacgacgatggccgggaaggcggcggccgcgacggcggcgaggtgggcggaggggtacccgtggaaggagaagctggcaaagtacaagggtgagctcgggaagggggtgtggggatactgggagctcggcgcgtggaagccgctcggcatcagcgctcgcaagcgcgcccgcctccgcaaggaggtgctcctcgccggcgaggactggagctacgatcctccccgcggggagatgcgtaccaagcgcaagggccacaagtgcgaccgcatctccgccgagaagcgagcaaatactgttgagctgatgaagaagatgccccagatgctgctcgactacaagaaacgtaggtgggagaagaagatgaaagtggaggagagcggcaagaattgataccacgcggctcgtccagggtgcttctcttcctaaataaggtccaaactttatccaggaggtttgcaggacggctagattctgacgcatcatttccttggtggattccgtctctcctgtgatgcgactttggacgcactatcctgattgtgatgctttccaacactttgccactggatcgtgatttcagtgagccccaacttctgcagcactagtattttgttgagacaaatcagctataagcatgccatctgcccaataaacttgttcatcatgtaagatcaatgctgttagtttttgtccgagtttgtgcttgcgtttgcttatactc

SEQ ID NO: 6034 - protein, 127 aa, Zea mays subsp. mays
  peptide (1)..(127): Ceres Seq. ID no. 12401398
MAGKAAAATAARWAEGYPWKEKLAKYKGELGKGVWGYWELGAWKPLGISARKRARLRKEVLLAGEDWSYDPPRGEMRTKRKGHKCDRISAEKRANTVELMKKMPQMLLDYKKRRWEKKMKVEESGKN

SEQ ID NO: 6035 - DNA, 751 bp, Zea mays subsp. mays
  misc_feature (1)..(751): Ceres Seq. ID no. 12356325
  misc_feature (1)..(751): Ortholog of  Ceres SEQ ID NO 13664333 as cited in SEQ ID NO 61344
ggcttcatctcctcctttcctccccaaaagacacaagagggggaagagagagagaggagaggcagagagaagagggggaggcagtccagtgtccacgtaggtacgctccacagaagagagatggcgatgcggatggcggcggcggcagtggcgctggtggcggtgatgggcgtgctggcgccccgagcggcggcgcagacgccgaactgcgcggagaagctgatcccgtgctcgccgtacatgaacacgacggggacgccgccggatacctgctgcggcccgctcaaggacgccgtccagaacgacctcaagtgcctctgcgacctctacgcctcgccggagatcttcaaggccttcaacatcagcctcgaccaggccctcggcctctccaagcgttgcggcctcagcgacaccaccgccgcctgcaagggcctttctcctacgcagtctcctccaggttcgccgccatcaggcggcagcagcaacgccgcccatcgcgctctgccggccagtttcgcgggactggtgacgagcttgttcctagctctgtggtctgtaatggcgtaaataaaagttccgcaatgcttgtcttaccccacagtagatggtttgcacatacgatacgatacaattcgacatttgttttgctgtgtattggtagagtgcggtgtgtctgagatcagaatttctcattggtttcttcgcggtgttcgtgttagactctgcacaattaaatggaaggtttctggcg

SEQ ID NO: 6036 - protein, 224 aa, Zea mays subsp. mays
  peptide (1)..(224): Ceres Seq. ID no. 12356326
LHLLLSSPKDTRGGREREERQREEGEAVQCPRRYAPQKRDGDADGGGGSGAGGGDGRAGAPSGGADAELRGEADPVLAVHEHDGDAAGYLLRPAQGRRPERPQVPLRPLRLAGDLQGLQHQPRPGPRPLQALRPQRHHRRLQGPFSYAVSSRFAAIRRQQQRRPSRSAGQFRGTGDELVPSSVVCNGVNKSSAMLVLPHSRWFAHTIRYNSTFVLLCIGRVRCV

SEQ ID NO: 6037 - protein, 188 aa, Zea mays subsp. mays
  peptide (1)..(188): Ceres Seq. ID no. 12356327
GFISSFPPQKTQEGEERERRGREKRGRQSSVHVGTLHRREMAMRMAAAAVALVAVMGVLAPRAAAQTPNCAEKLIPCSPYMNTTGTPPDTCCGPLKDAVQNDLKCLCDLYASPEIFKAFNISLDQALGLSKRCGLSDTTAACKGLSPTQSPPGSPPSGGSSNAAHRALPASFAGLVTSLFLALWSVMA

SEQ ID NO: 6038 - protein, 148 aa, Zea mays subsp. mays
  peptide (1)..(148): Ceres Seq. ID no. 12356328
MAMRMAAAAVALVAVMGVLAPRAAAQTPNCAEKLIPCSPYMNTTGTPPDTCCGPLKDAVQNDLKCLCDLYASPEIFKAFNISLDQALGLSKRCGLSDTTAACKGLSPTQSPPGSPPSGGSSNAAHRALPASFAGLVTSLFLALWSVMA

SEQ ID NO: 6039 - DNA, 924 bp, Zea mays subsp. mays
  misc_feature (1)..(924): Ceres Seq. ID no. 12342917
  misc_feature (1)..(924): Ortholog of  Ceres SEQ ID NO 15179194 as cited in SEQ ID NO 0
aaggacgacccaagcaagctagctcgatctactactactactatctggtacacatactagccatcctgccagccagccagcttgccatggcgcccaccgtgatgatggcctcgtcggcaaccgccgtcgccccgttccagggtctcaagtccgccgccagcctccccgtcgcccgccgcagcaccaggagcctcggcaacgtcagcaacggcggaaggatccggtgcatgcaggtgtggccggcctacggcaacaagaagttcgagacgctgtcgtacctgccgccgctgtcgacggacgacctgctgaagcaggtggactacctgctgcgcaacggctggataccctgcctcgagttcagcaagctcgggttcgtgtaccgcgagaactccacctccccgtgctactacgatggccgctactggaccatgtggaagctgcccatgttcggctgcaccgacgccacgcaggtgtacaaggagctgcaggaggccatcgccgcgtacccggacgccttccaccgcgtcatcggcttcgacaacgtcaggcagacgcagtgcgtcagcttcatcgcctacaagccccccggcagcgagtagagaccgtggctagatcgaccaatggccatgtctctgcctgttgatcggatcaccttcttgcattggttcctctctctctccctccttttttttccctttatctcatcatttcttttctcctgcatgcaatggttccttttgcttccaacaattctcctgctgatgtatccagcatggcatcatccatctacaattacgtacgtagtgcaacgactgtcgattcgttgggtgaggaacatatatgtgaatgcaagctccggctaccatacatgtgtaatgtgtaatagatatatatacaaaactgccgaggcgccgacaatacttt

SEQ ID NO: 6040 - protein, 198 aa, Zea mays subsp. mays
  peptide (1)..(198): Ceres Seq. ID no. 12342918
GRPKQASSIYYYYYLVHILAILPASQLAMAPTVMMASSATAVAPFQGLKSAASLPVARRSTRSLGNVSNGGRIRCMQVWPAYGNKKFETLSYLPPLSTDDLLKQVDYLLRNGWIPCLEFSKLGFVYRENSTSPCYYDGRYWTMWKLPMFGCTDATQVYKELQEAIAAYPDAFHRVIGFDNVRQTQCVSFIAYKPPGSE

SEQ ID NO: 6041 - protein, 170 aa, Zea mays subsp. mays
  peptide (1)..(170): Ceres Seq. ID no. 12342919
MAPTVMMASSATAVAPFQGLKSAASLPVARRSTRSLGNVSNGGRIRCMQVWPAYGNKKFETLSYLPPLSTDDLLKQVDYLLRNGWIPCLEFSKLGFVYRENSTSPCYYDGRYWTMWKLPMFGCTDATQVYKELQEAIAAYPDAFHRVIGFDNVRQTQCVSFIAYKPPGSE

SEQ ID NO: 6042 - protein, 165 aa, Zea mays subsp. mays
  peptide (1)..(165): Ceres Seq. ID no. 12342920
MMASSATAVAPFQGLKSAASLPVARRSTRSLGNVSNGGRIRCMQVWPAYGNKKFETLSYLPPLSTDDLLKQVDYLLRNGWIPCLEFSKLGFVYRENSTSPCYYDGRYWTMWKLPMFGCTDATQVYKELQEAIAAYPDAFHRVIGFDNVRQTQCVSFIAYKPPGSE

SEQ ID NO: 6043 - DNA, 1042 bp, Zea mays subsp. mays
  misc_feature (1)..(1042): Ceres Seq. ID no. 12372360
  misc_feature (1)..(1042): Ortholog of  Ceres SEQ ID NO 13594974 as cited in SEQ ID NO 56010
  misc_feature (1)..(1042): Ortholog of  Ceres SEQ ID NO 13661512 as cited in SEQ ID NO 61464
gggaaggctttgctggtagttgtagcacacacggcacaccacacggtttcgtcctcgtccaccatgctatcgtcctcgcacctcgttaagctgcccctcctgccgcgcggcctcctctcgcacctccccgcatccatcctcccgagcgggcgcgagagcaccgcggacgcagcaccctccacgccgccttcttccaagaagatgtcgtcgtccgcgcagcagcagcagcagcagcaagcgggcagcagcaaggcggagtcggcggagctggcgcgcgtgttcgagctgttcgacaaggacggcgacgggcgcatcacgcgggaggagctggcggagtcgctgcgcaagctggggcatgggcgtgccgggcgacgacgagctggcgtccatgatggcgcgcgtggacgccaacggcgacgggtgcgtggacgcggaggagttcggggagctctaccgcggcatcatggacggcgccgcggaggaggaggaggaggaggaggacgacgacgacgacatgcgggaggcgttccgcgtgttcgacgccaacggcgacgggtacatcaccgcggacgagctgggcgcggtgctgtcgtcgctggggctgcggcagggccgcaccgcggaggagtgccggcgcatgatcggccgcgtggaccgcgacggcgacggcagggtcgacttccgcgagttccgccagatgatgcgcgccggcgggctcgccacgctcgggtgatgggtgaccgtcgccggccggtgctgcctgcctcctgctcctgcacctgggcctggccatggagcgccgggcacctttttttctgcatctgcgtgcttgatttcgtgtgctagaaagaacctgtagatagatattgcttgcttggagcgaggggggagctcacgtcacgtaaccgcgttgttccgtcttcgttctgttgatttggttctttagaattgatgggcttgctaattaactgttgtatacttgtatgtactggttgttgccctgcccttaaggattgttcggggacaaggtttcccctgtttt

SEQ ID NO: 6044 - protein, 281 aa, Zea mays subsp. mays
  peptide (1)..(281): Ceres Seq. ID no. 12372361
GKALLVVVAHTAHHTVSSSSTMLSSSHLVKLPLLPRGLLSHLPASILPSGRESTADAAPSTPPSSKKMSSSAQQQQQQQAGSSKAESAELARVFELFDKDGDGRITREELAESLRKLGHGRAGRRRAGVHDGARGRQRRRVRGRGGVRGALPRHHGRRRGGGGGGGGRRRRHAGGVPRVRRQRRRVHHRGRAGRGAVVAGAAAGPHRGGVPAHDRPRGPRRRRQGRLPRVPPDDARRRARHARVMGDRRRPVLPASCSCTWAWPWSAGHLFFCICVLDFVC

SEQ ID NO: 6045 - protein, 260 aa, Zea mays subsp. mays
  peptide (1)..(260): Ceres Seq. ID no. 12372362
MLSSSHLVKLPLLPRGLLSHLPASILPSGRESTADAAPSTPPSSKKMSSSAQQQQQQQAGSSKAESAELARVFELFDKDGDGRITREELAESLRKLGHGRAGRRRAGVHDGARGRQRRRVRGRGGVRGALPRHHGRRRGGGGGGGGRRRRHAGGVPRVRRQRRRVHHRGRAGRGAVVAGAAAGPHRGGVPAHDRPRGPRRRRQGRLPRVPPDDARRRARHARVMGDRRRPVLPASCSCTWAWPWSAGHLFFCICVLDFVC

SEQ ID NO: 6046 - protein, 214 aa, Zea mays subsp. mays
  peptide (1)..(214): Ceres Seq. ID no. 12372363
MSSSAQQQQQQQAGSSKAESAELARVFELFDKDGDGRITREELAESLRKLGHGRAGRRRAGVHDGARGRQRRRVRGRGGVRGALPRHHGRRRGGGGGGGGRRRRHAGGVPRVRRQRRRVHHRGRAGRGAVVAGAAAGPHRGGVPAHDRPRGPRRRRQGRLPRVPPDDARRRARHARVMGDRRRPVLPASCSCTWAWPWSAGHLFFCICVLDFVC

SEQ ID NO: 6047 - DNA, 923 bp, Zea mays subsp. mays
  misc_feature (1)..(923): Ceres Seq. ID no. 12403512
  misc_feature (1)..(923): Ortholog of  Ceres SEQ ID NO 13580026 as cited in SEQ ID NO 62641
ctttccctccccatcccgtgaggcgtgagcgccacacccacacgaaggatcccgaagccgaagagaaccctaccgaggaggcagaaaatccgtaggcgcgcctcatacgattccgagatccgtgcctcttatcggcagccatgatgctgcgcgcggcgggcaggcgactcctcggcgtaggaggcggcgatccagcgcccgcggtcgctgctgctgtggcggcgagcaggagcagaggataccacgagcgggtggtggaccactacaacaacccgcgcaacgtggggtccttggacaaggacgacacggacgtcggaacggggatcgtcggcgcgccggcgtgcggggacgtcatgaagctgcagatccgcgtcgacgaggggtccggcaggatcgtcgacgcgcgcttcaagaccttcggctgcggctccgccatcgcgtcctcctccgtcgcttccgaatgggtcaagggcaagcaagtggaggaagtggtggccatcaagaacaccgagattgcgaagcacctgtctcttccaccagtgaagctccactgcagcatgctcgctgaggacgcaatcaaggccgccgtgaaggattacgaggcaaagaaagggaagaagatggccaaggcagaggagcaggacaccccatgcccgtaagagcgacagctagtaaactgaagcgagcagagagtactgtatgtagtatgtaacggctaacgagcgaggtactcgtgtcgtgtgtgccaaaagaagcatgtatgtaatgtaaagctaggtaacaacgatgtttgggtttcatagaataagcgaacttgccgcagtgttttttttatctgctctgcacatgaataaggtctgcccattgctctttatctgtttagtcggagcatgtatgcttagtttgatcaagcaatgctgttg

SEQ ID NO: 6048 - protein, 172 aa, Zea mays subsp. mays
  peptide (1)..(172): Ceres Seq. ID no. 12403513
MMLRAAGRRLLGVGGGDPAPAVAAAVAASRSRGYHERVVDHYNNPRNVGSLDKDDTDVGTGIVGAPACGDVMKLQIRVDEGSGRIVDARFKTFGCGSAIASSSVASEWVKGKQVEEVVAIKNTEIAKHLSLPPVKLHCSMLAEDAIKAAVKDYEAKKGKKMAKAEEQDTPCP

SEQ ID NO: 6049 - protein, 171 aa, Zea mays subsp. mays
  peptide (1)..(171): Ceres Seq. ID no. 12403514
MLRAAGRRLLGVGGGDPAPAVAAAVAASRSRGYHERVVDHYNNPRNVGSLDKDDTDVGTGIVGAPACGDVMKLQIRVDEGSGRIVDARFKTFGCGSAIASSSVASEWVKGKQVEEVVAIKNTEIAKHLSLPPVKLHCSMLAEDAIKAAVKDYEAKKGKKMAKAEEQDTPCP

SEQ ID NO: 6050 - protein, 101 aa, Zea mays subsp. mays
  peptide (1)..(101): Ceres Seq. ID no. 12403515
MKLQIRVDEGSGRIVDARFKTFGCGSAIASSSVASEWVKGKQVEEVVAIKNTEIAKHLSLPPVKLHCSMLAEDAIKAAVKDYEAKKGKKMAKAEEQDTPCP

SEQ ID NO: 6051 - DNA, 1254 bp, Zea mays subsp. mays
  misc_feature (1)..(1254): Ceres Seq. ID no. 12356329
  misc_feature (1)..(1254): Ortholog of  Ceres SEQ ID NO 13583327 as cited in SEQ ID NO 62047
aatttacgacaccagctagttgttgttttcttcgaagcttcttacaggtggcgactggcgagtgccgacctcgaccgattcttcttcgaaatcctccactagaggatcgcagcttctcttttgagcgaacaataaagcaccagctgctctcacgcttccgcgtttagccaggccggccccggccacgagcccacgacaatgaagccgcccgcgtcgtccaccgccacctcctacctcctcctggccccgctcgcgatcctcctgctcgtcttcgtgctaccgtcgctccgcccttggtcccgcgtaggctccgactccgacggcctcggcatcctctgcgcccgccgcaccggcggcttcgtcgacgtcgccgctcgacgcgccggcgccgccaccgggccagacgacacgggcggcggagttcagcctactggtgggcgtgctgaccgtgccgggccggcgggagcggcgcgacatcgtgcgcacggcgtacgcgctgcagccggccgcggagggcgcgcgcgtggacgtgcgcttcgtgttctgccgcgtgacggaccccgtggacgcggcgctgctggcggtggaggcgaggcggcacggggacgtcctggtgctggacggctgcgccgagaacatgaacgacggcaagacgtacgcgtacctgtcgtcggtgccgcgcctcttcgcggcggagccgtacgactacgtgatgaaggccgacgacgacacgtacctgcgcgtggcggcgctggcgggcgagctgcggggcaagccccgccacgacgtgtacctgggctacggctacgccatgggcgggcagccgatgccgttcatgcacggcatggggtacgtggtgtcgtgggacgtggcggcctgggtggccggcgcgcgggagatcctggagcgcaacgacaccctgggccccgaggacctcatggtcggcaagtggctcaacctcgccggcaggggcaggaaccgctacgacctcaagccccggatgtacgacctcagctgggacatggacaacttcaggcccgacaccgtcgccgtgcacacgctcaagacgaaccgccggtgggcggcggcgttcaggtacttcaacgtcgtcactgcggggatcacgccgtcgtccgaactgtaccacctgccgtgatcgtctcatcgatcgaccaacactttttttttttgtaattgtctgcgacccttgccaattgtataacaattatctggcaatacatgaatggatcgtgg

SEQ ID NO: 6052 - protein, 331 aa, Zea mays subsp. mays
  peptide (1)..(331): Ceres Seq. ID no. 12356330
MKPPASSTATSYLLLAPLAILLLVFVLPSLRPWSRVGSDSDGLGILCARRTGGFVDVAARRAGAATGPDDTGGGVQPTGGRADRAGPAGAARHRAHGVRAAAGRGGRARGRALRVLPRDGPRGRGAAGGGGEAARGRPGAGRLRREHERRQDVRVPVVGAAPLRGGAVRLRDEGRRRHVPARGGAGGRAAGQAPPRRVPGLRLRHGRAADAVHARHGVRGVVGRGGLGGRRAGDPGAQRHPGPRGPHGRQVAQPRRQGQEPLRPQAPDVRPQLGHGQLQARHRRRAHAQDEPPVGGGVQVLQRRHCGDHAVVRTVPPAVIVSSIDQHFFFL

SEQ ID NO: 6053 - protein, 172 aa, Zea mays subsp. mays
  peptide (1)..(172): Ceres Seq. ID no. 12356331
MNDGKTYAYLSSVPRLFAAEPYDYVMKADDDTYLRVAALAGELRGKPRHDVYLGYGYAMGGQPMPFMHGMGYVVSWDVAAWVAGAREILERNDTLGPEDLMVGKWLNLAGRGRNRYDLKPRMYDLSWDMDNFRPDTVAVHTLKTNRRWAAAFRYFNVVTAGITPSSELYHLP

SEQ ID NO: 6054 - DNA, 754 bp, Zea mays subsp. mays
  misc_feature (1)..(754): Ceres Seq. ID no. 12405554
  misc_feature (1)..(754): Ortholog of  Ceres SEQ ID NO 13595818 as cited in SEQ ID NO 56698
aaatgacgccatgccggcgccaccgagggcgaaagctgtccagatcgtgtgattttgcatcccatccgcgagcgcgacacgcgctgacctactcgacggcctccacctccgtcttgaggcgaagcgtagtgcgaaggaccaactctttcgaagggaaattatatctcaggtgcttaggagtctgccatggccagcgagaataaggtatttaggttcgaggaagtcgccaagcacaacgtcaccaaggactgctggatcatcatcgccggcaaggtgtatgatgtcactccttttatggatgagcatcctggtggagatgaggttttgctagctgtaactgggaaagatgctacagctgattttgaagatattggccacagtgattccgcaagggacatgatggagaagtaccacatcgggcagatagatgcttcaacaatcccagcaaagcgaacttatgtgcacccccagcaagcgcccagccactcagacaagaataatgatctcctcatcaagatcctgcagttccttgtgcccattatgatcctgggccttgcatttggtatacgtcagtacagcaaatcagagtagtactgttcttgaagacttgcctttggagtctgttttatggtaatggtttggatgagaacagttcagtaattgcttagtgtatttgtcaggtggatgttatctcattggtcatatactatgtattatggacatccatgtgttgccgaaatgtgctcttttcccc

SEQ ID NO: 6055 - protein, 134 aa, Zea mays subsp. mays
  peptide (1)..(134): Ceres Seq. ID no. 12405555
MASENKVFRFEEVAKHNVTKDCWIIIAGKVYDVTPFMDEHPGGDEVLLAVTGKDATADFEDIGHSDSARDMMEKYHIGQIDASTIPAKRTYVHPQQAPSHSDKNNDLLIKILQFLVPIMILGLAFGIRQYSKSE

SEQ ID NO: 6056 - protein, 98 aa, Zea mays subsp. mays
  peptide (1)..(98): Ceres Seq. ID no. 12405556
MDEHPGGDEVLLAVTGKDATADFEDIGHSDSARDMMEKYHIGQIDASTIPAKRTYVHPQQAPSHSDKNNDLLIKILQFLVPIMILGLAFGIRQYSKSE

SEQ ID NO: 6057 - DNA, 1600 bp, Zea mays subsp. mays
  misc_feature (1)..(1600): Ceres Seq. ID no. 12344156
  misc_feature (1)..(1600): Ortholog of  Ceres SEQ ID NO 15169655 as cited in SEQ ID NO 64922
  misc_feature (1)..(1600): Ortholog of  Ceres SEQ ID NO 13596004 as cited in SEQ ID NO 68212
acacgacccacctaccccgccgccgccgccgccgcatccccctcgattccgtctggcgatcgagggctcccagacacatcacagatacaccacgccaagccaaatcgagcaacgtctatcatcatattataatttcccctcattcatctcacagtccctcccaggcctcccctccctcctcccccgtcgccaaccaacctccaacccccagccgatcgcgtcggagatgctgggcgtcgcgcggaggcggctcggatctggatgcgtgctcgcccagctggcgcaggccctccgccccgccgccgctcccgccaggacctactccgccgcggccaaggagataactgtacgggaagcattgaataccgcattagatgaagaaatgtcggcagacccttctgttttcttgatgggagaagaggttggcgagtaccaaggtccatacaagatatccaagggtttgcttgacaagtatggccccgatagggttctcgatactccgatcactgaggcgggcttcactggcattggtgttggtgccgcttaccatggtcttcgacctattgtagagttcatgacatttaacttttcgatgcaggcaattgatcacataattaattcagctgccaagtcgaactacatgtctgctgggcagatatctgttcctattgtctttaggggtccaaatggtgctgctgctggagttggtgcccaacactcacagtgctatgcagcttggtatgcacatgttcccggattgaaagttctagctccatattctgcagaagatgctcgaggtttgctgaaagcagcaatcagggatccagatcctgttgtgttccttgaaaatgaacttctttatggtgaatcatttcctgtatctgctgaggtacttgattctagcttctgccttccgattggaaaggctaagatagagcgacaagggaaagatgtcactatcactgcattctccaaaatggtgggatatgcccttcaggccgctgatatactggccaaggaaggtatcagtgccgaggtaatcaatcttcgctcaattagaccgctggatagagctactattaatgcatctgtgaggaaaaccaatagattggtaaccgtagaagaaggcttccctcaacatgggattggtgcggaaatatgcatgtctgttgtagaggacagctttgagtatcttgatgcaccagtcgagaggattgctggagctgatgtgcccatgccgtacgctgccaaccttgagaggatggctgttccacaggtcgatgacatcgtccgggcagccaagcgtgcttgctacagggcagcagtaccgatggcagcaaccgcctagtccagcagaaccctgcatgttgcatttctttgtctaattttaatgtccgtgctgcagaaagacgtgtcacataatggtgtgacgagtacccactgccgctgcaactcaactatagcatgagctgagtttttgtagagccaccgagaggtgttcagtactccagttccagttccgcttatcttcgccgccgcagccgaaggctgcgcatgactctgcgtctgttttatggttcacgaatgattgcagatttgc

SEQ ID NO: 6058 - protein, 448 aa, Zea mays subsp. mays
  peptide (1)..(448): Ceres Seq. ID no. 12344157
HDPPTPPPPPPHPPRFRLAIEGSQTHHRYTTPSQIEQRLSSYYNFPSFISQSLPGLPSLLPRRQPTSNPQPIASEMLGVARRRLGSGCVLAQLAQALRPAAAPARTYSAAAKEITVREALNTALDEEMSADPSVFLMGEEVGEYQGPYKISKGLLDKYGPDRVLDTPITEAGFTGIGVGAAYHGLRPIVEFMTFNFSMQAIDHIINSAAKSNYMSAGQISVPIVFRGPNGAAAGVGAQHSQCYAAWYAHVPGLKVLAPYSAEDARGLLKAAIRDPDPVVFLENELLYGESFPVSAEVLDSSFCLPIGKAKIERQGKDVTITAFSKMVGYALQAADILAKEGISAEVINLRSIRPLDRATINASVRKTNRLVTVEEGFPQHGIGAEICMSVVEDSFEYLDAPVERIAGADVPMPYAANLERMAVPQVDDIVRAAKRACYRAAVPMAATA

SEQ ID NO: 6059 - protein, 373 aa, Zea mays subsp. mays
  peptide (1)..(373): Ceres Seq. ID no. 12344158
MLGVARRRLGSGCVLAQLAQALRPAAAPARTYSAAAKEITVREALNTALDEEMSADPSVFLMGEEVGEYQGPYKISKGLLDKYGPDRVLDTPITEAGFTGIGVGAAYHGLRPIVEFMTFNFSMQAIDHIINSAAKSNYMSAGQISVPIVFRGPNGAAAGVGAQHSQCYAAWYAHVPGLKVLAPYSAEDARGLLKAAIRDPDPVVFLENELLYGESFPVSAEVLDSSFCLPIGKAKIERQGKDVTITAFSKMVGYALQAADILAKEGISAEVINLRSIRPLDRATINASVRKTNRLVTVEEGFPQHGIGAEICMSVVEDSFEYLDAPVERIAGADVPMPYAANLERMAVPQVDDIVRAAKRACYRAAVPMAATA

SEQ ID NO: 6060 - protein, 321 aa, Zea mays subsp. mays
  peptide (1)..(321): Ceres Seq. ID no. 12344159
MSADPSVFLMGEEVGEYQGPYKISKGLLDKYGPDRVLDTPITEAGFTGIGVGAAYHGLRPIVEFMTFNFSMQAIDHIINSAAKSNYMSAGQISVPIVFRGPNGAAAGVGAQHSQCYAAWYAHVPGLKVLAPYSAEDARGLLKAAIRDPDPVVFLENELLYGESFPVSAEVLDSSFCLPIGKAKIERQGKDVTITAFSKMVGYALQAADILAKEGISAEVINLRSIRPLDRATINASVRKTNRLVTVEEGFPQHGIGAEICMSVVEDSFEYLDAPVERIAGADVPMPYAANLERMAVPQVDDIVRAAKRACYRAAVPMAATA

SEQ ID NO: 6061 - DNA, 1253 bp, Zea mays subsp. mays
  misc_feature (1)..(1253): Ceres Seq. ID no. 12409239
  misc_feature (1)..(1253): Ortholog of  Ceres SEQ ID NO 13504028 as cited in SEQ ID NO 56107
ataaacgagaacccagccgctgagtagacttgtgttttcgcttccccttccccatcccctctcctcccctcgccggcttgtcggtctcgccgcgccactggccatacatccaagacgctaatccgtgtgggggaaaagcccccctctctctgaaactattcaaatggcgtggggcgtatccccgcggcggcagccgtcgttcccggtgcaggccctctacgagctctgcaagcgctccttcccctccccttccgccgcctcatcgtctcccccgcccgctgatgtcgtccgcagcatctcctcgctcatggatacaatcactcctgcggatgttgggctcagagattataatcttgaggacgacagggggcatggattttttgactccaacctcctcaagggttcaggaaggcttcctcggtgggcgcggcccatcaagtaccttcatatctacagctgtgatgcattctctattggaatattctgcttgccaacttcatcagtcattcctcttcatgatcatccaggaatgactgtactgagcaaaatcctttatggttccatgcatgtgaaatcatatgattggatagagcctactgtcctagcaagtagccagccagcaaggttggccaaattacatacagatgatgttcgtactgctccatgtccaacctccattttgtatccccaaagtggtgggaacctgcactgcttcacttcagtatcttcttgtgctgttcttgatgtccttgccccaccatataacgatgacgctggtcggatttgcacttattttcatgactatccattttcaagtctctcagcagctggacgcacgaaggtagctggtaacccagataattatgcatggctggaggccataaacactccagtgaatatcaacatgcacactggcatgtataccggtccaactgtacaggaacttcagacatgatgtaaagatgaaccggagcatcaagcagcagctgggtgcctcttcactgatagtagagctctaatatagtgatgtatgttctatactttgaggttagcttttcccctctggccccctttgttggagaaactgttgtacttcagttaagagataagttttcagagtaatttctcctaatcagtttagtagaggtttcaggttcactaacctgagcagtgatcaggcttttagcttatttatttatgtttgtgcaacgctggaatggttttgaatgcaaaattgtcactgatgttgccgc

SEQ ID NO: 6062 - protein, 263 aa, Zea mays subsp. mays
  peptide (1)..(263): Ceres Seq. ID no. 12409240
MAWGVSPRRQPSFPVQALYELCKRSFPSPSAASSSPPPADVVRSISSLMDTITPADVGLRDYNLEDDRGHGFFDSNLLKGSGRLPRWARPIKYLHIYSCDAFSIGIFCLPTSSVIPLHDHPGMTVLSKILYGSMHVKSYDWIEPTVLASSQPARLAKLHTDDVRTAPCPTSILYPQSGGNLHCFTSVSSCAVLDVLAPPYNDDAGRICTYFHDYPFSSLSAAGRTKVAGNPDNYAWLEAINTPVNINMHTGMYTGPTVQELQT

SEQ ID NO: 6063 - protein, 215 aa, Zea mays subsp. mays
  peptide (1)..(215): Ceres Seq. ID no. 12409241
MDTITPADVGLRDYNLEDDRGHGFFDSNLLKGSGRLPRWARPIKYLHIYSCDAFSIGIFCLPTSSVIPLHDHPGMTVLSKILYGSMHVKSYDWIEPTVLASSQPARLAKLHTDDVRTAPCPTSILYPQSGGNLHCFTSVSSCAVLDVLAPPYNDDAGRICTYFHDYPFSSLSAAGRTKVAGNPDNYAWLEAINTPVNINMHTGMYTGPTVQELQT

SEQ ID NO: 6064 - protein, 141 aa, Zea mays subsp. mays
  peptide (1)..(141): Ceres Seq. ID no. 12409242
MTVLSKILYGSMHVKSYDWIEPTVLASSQPARLAKLHTDDVRTAPCPTSILYPQSGGNLHCFTSVSSCAVLDVLAPPYNDDAGRICTYFHDYPFSSLSAAGRTKVAGNPDNYAWLEAINTPVNINMHTGMYTGPTVQELQT

SEQ ID NO: 6065 - DNA, 2015 bp, Zea mays subsp. mays
  misc_feature (1)..(2015): Ceres Seq. ID no. 12594596
  misc_feature (1)..(2015): Ortholog of  Ceres SEQ ID NO 14310841 as cited in SEQ ID NO 53666
  misc_feature (1)..(2015): Ortholog of  Ceres SEQ ID NO 15178736 as cited in SEQ ID NO 56439
  misc_feature (1)..(2015): Ortholog of  Ceres SEQ ID NO 14308493 as cited in SEQ ID NO 60320
aacaagtcatatgcacaaaatctcatttgagcgtgcaagctccttcgcctcgaaccctctcgcgcttggctttctttcactctccagggctccactcccatctcgccgccgcagccatggcgatcacagcgccaactcccgacatcctcggcgagcgccaatccggccaggacgtccgcacgcagaacgtgatggcttgcggggcggtggccaacatcgtcaaatcctcgctcggccccgtcggtctcgacaagatgctagtggacgatattggtgatgttacaatcacaaatgatggagcaaccatacttaagatgttggaagttgagcatccagccgccaaggttcttgttgagttggctgagctccaagaccgtgaggtaggagatggaactacttccgttgtcatcatagcggcagagttactcaagagaggcaatgatcttgtgaagaataagatccatccaacctctataatcagtggctacaggcttgctatgcgtgaagcctgcaaatatgttgaggaaaagttagcagtcaaggttgacaaacttggaaaagaatcccttatcaactctgcaaaaactagcatgtcttcgaaattgattaatagtgacagtgatttctttgcaactttggttgttgaggcagttcaagccgtgaagactacaaatgccaagggagacgtgaaatatccaatcaagagcatcaatattttgaaagctcatggtaaaagcgccaaggatagttatctgttgaatggctatgcactaaacacaggccgtgcagctcaaggaatgcctacgagagtaactcctgctagaattgcttgtcttgattttaaccttcagaagacaaaaatgcaacttggtgtccaagttcttgtaactgatccaagggaacttgagaagattcgtcagagagaatctgacataacaaaggagcgaattgagaaaattctcaaggctggagctaatgttgtgttgaccaccaagggaattgacgatatgtccttgaagtactttgttgaggctggtgcgattgcagtaaggcgtgtgcgcaaggaagatctgcgacatgttgccaaagccactggtgcaactatggtgtctacttttgcggacatggaaggtgaagaaacattcgattcatcattccttggccatgctgatgaagttgtggaggaaagaattgctgacgatgatgttattctggtgaaaggcacaaagaacaccagcgcggtctctataatacttaggggcgcaaatgactacatgcttgatgagattgaacggtccttgcatgatgccctgtgcattgtgaagagaaccctggaatcaaatatggttgttgctgggggtggtgcagttgaagctgcgttgtcagtttatctggagaaccttgcaacaaccctgggttctcgggaacaattggcaattgctgaatttgctgagtctttgttaatcataccaaaggtactatctgttaatgctgcaaaagatgcaactgagcttgtagcaaagcttagggcatatcatcatactgctcaaacaaaggccgacaagcaacattattcaagtatgggccttgacctctctaagggtatcattcgcaacaaccttgagtatggcgtgatagagccatcgatgagcaaagtaaagatcattcagtttgccacggaggctgccattactatcctgaggattgacgacatgatcaagcttaccaaggaagaagagggtaacgaagagtaagcagcccaccagtagtgggctagtggactcccatgggatggttgccatagcatgtagcacttgttttttcacttatcgtttacttttgcttgctgtgagcattcgtttgtaggaaaagtgagaacggatgtgtatcaatccgtgctgggtgacgatgactcacggatggatcaaatctttgcgtatattggggccaaaacagttctatctgacggatttaagttggaaaatgaaatggtttcgtgtagtgattatttgatt

SEQ ID NO: 6066 - protein, 583 aa, Zea mays subsp. mays
  peptide (1)..(583): Ceres Seq. ID no. 12594597
QVICTKSHLSVQAPSPRTLSRLAFFHSPGLHSHLAAAAMAITAPTPDILGERQSGQDVRTQNVMACGAVANIVKSSLGPVGLDKMLVDDIGDVTITNDGATILKMLEVEHPAAKVLVELAELQDREVGDGTTSVVIIAAELLKRGNDLVKNKIHPTSIISGYRLAMREACKYVEEKLAVKVDKLGKESLINSAKTSMSSKLINSDSDFFATLVVEAVQAVKTTNAKGDVKYPIKSINILKAHGKSAKDSYLLNGYALNTGRAAQGMPTRVTPARIACLDFNLQKTKMQLGVQVLVTDPRELEKIRQRESDITKERIEKILKAGANVVLTTKGIDDMSLKYFVEAGAIAVRRVRKEDLRHVAKATGATMVSTFADMEGEETFDSSFLGHADEVVEERIADDDVILVKGTKNTSAVSIILRGANDYMLDEIERSLHDALCIVKRTLESNMVVAGGGAVEAALSVYLENLATTLGSREQLAIAEFAESLLIIPKVLSVNAAKDATELVAKLRAYHHTAQTKADKQHYSSMGLDLSKGIIRNNLEYGVIEPSMSKVKIIQFATEAAITILRIDDMIKLTKEEEGNEE

SEQ ID NO: 6067 - protein, 545 aa, Zea mays subsp. mays
  peptide (1)..(545): Ceres Seq. ID no. 12594598
MAITAPTPDILGERQSGQDVRTQNVMACGAVANIVKSSLGPVGLDKMLVDDIGDVTITNDGATILKMLEVEHPAAKVLVELAELQDREVGDGTTSVVIIAAELLKRGNDLVKNKIHPTSIISGYRLAMREACKYVEEKLAVKVDKLGKESLINSAKTSMSSKLINSDSDFFATLVVEAVQAVKTTNAKGDVKYPIKSINILKAHGKSAKDSYLLNGYALNTGRAAQGMPTRVTPARIACLDFNLQKTKMQLGVQVLVTDPRELEKIRQRESDITKERIEKILKAGANVVLTTKGIDDMSLKYFVEAGAIAVRRVRKEDLRHVAKATGATMVSTFADMEGEETFDSSFLGHADEVVEERIADDDVILVKGTKNTSAVSIILRGANDYMLDEIERSLHDALCIVKRTLESNMVVAGGGAVEAALSVYLENLATTLGSREQLAIAEFAESLLIIPKVLSVNAAKDATELVAKLRAYHHTAQTKADKQHYSSMGLDLSKGIIRNNLEYGVIEPSMSKVKIIQFATEAAITILRIDDMIKLTKEEEGNEE

SEQ ID NO: 6068 - protein, 520 aa, Zea mays subsp. mays
  peptide (1)..(520): Ceres Seq. ID no. 12594599
MACGAVANIVKSSLGPVGLDKMLVDDIGDVTITNDGATILKMLEVEHPAAKVLVELAELQDREVGDGTTSVVIIAAELLKRGNDLVKNKIHPTSIISGYRLAMREACKYVEEKLAVKVDKLGKESLINSAKTSMSSKLINSDSDFFATLVVEAVQAVKTTNAKGDVKYPIKSINILKAHGKSAKDSYLLNGYALNTGRAAQGMPTRVTPARIACLDFNLQKTKMQLGVQVLVTDPRELEKIRQRESDITKERIEKILKAGANVVLTTKGIDDMSLKYFVEAGAIAVRRVRKEDLRHVAKATGATMVSTFADMEGEETFDSSFLGHADEVVEERIADDDVILVKGTKNTSAVSIILRGANDYMLDEIERSLHDALCIVKRTLESNMVVAGGGAVEAALSVYLENLATTLGSREQLAIAEFAESLLIIPKVLSVNAAKDATELVAKLRAYHHTAQTKADKQHYSSMGLDLSKGIIRNNLEYGVIEPSMSKVKIIQFATEAAITILRIDDMIKLTKEEEGNEE

SEQ ID NO: 6069 - DNA, 1550 bp, Zea mays subsp. mays
  misc_feature (1)..(1550): Ceres Seq. ID no. 12406892
  misc_feature (1)..(1550): Ortholog of  Ceres SEQ ID NO 12593464 as cited in SEQ ID NO 69039
aaaaaaacaaacccggctctctcacttgcttcaaggccgacgggctatctcactgatagtgataggaacagaacccgtgcatatttcagtcgtcgctcgcggagccgtggcgcatcgcgactcaggcactcaccgaccgcggatatggccccgccgccatggcctctccttgcgacttccctcctcctcatcctattccaccactcgcctcgcgccgcggtggcgtttccgccgtctctgggcgacggcctcctgggcgccgcccgcgcgccgggtttcgcggcttggctgcgcggctttcggcgccgcatccacgagcgccccgagctcgccttccaggaataccgcacgagcgagctcgtccgcgacgagctcgacgcgatcggggtgccgtacgtgtggcccgtcgcgcagacgggcgtcgtggcgaccatcgccggcggcagcgatggccccgtcgtcgcgctccgagccgacatggacgcgctacccttgcaggaattggtagactgggaacacaagagcaaggagaatggaaagatgcatgcttgtggacatgatgctcacacaacgatgcttcttggggcagctaaattgcttcatgctcggaaggatgatctgaagggtaccgtgaagcttgtcttccagccaggcgaagaaggctacggcggcgcttaccatgttctcagagaaggtgtcctggatgacgtgtctgccattttcggcttgcatgtggatccaggacttcccgtaggcaccgtttcttccaggccagggccgtttctagcagcagcaggtagatttctggtgacggtcactggaaaaggcggacatgctgcagggccacaggatgctgtggatcccattgttgcagcatcatctgccatcgtcagccttcagcttcttgttgcccgggaaattgatcccctccaggctgcagtggtttcggtcacgttcatgaaaggaggtgatgcttacaacgtaattccagagtcagcatccttcggcgggaccttcaggagcttgacaacagaaggcttttcgtatctcatgaagaggatcaaagagatcatagaaggtcatgccgccgtccaccgctgcaccgccgccgtcgacttcatgcaggagaagctccgcccgtacccagccaccgtgaacgacgaagggatgtaccgtcacgccagagaagtggcagaggccatgcttggacaggacaaggtgagtgtaggcgcccagatgatgggcgccgaggatttctccttctacgcggagaagtttgcaggggcgttcttcatgatcggagtccgcaacaagagcatggaggaggcgatgcatcctctccactccccgtacttcgtgatagatgaggacgtgctgcctgtaggagctgccttccactctgcagtagcgatggagtacctgaacaaatactcaacgacccggcaaactgagctgctgcgcattgagctgtgatagattattttgcttgtaataatggttacgaggccgaggtcatgttgcacaaaagaaagtttgcattgtgcccatag

SEQ ID NO: 6070 - protein, 490 aa, Zea mays subsp. mays
  peptide (1)..(490): Ceres Seq. ID no. 12406893
KKTNPALSLASRPTGYLTDSDRNRTRAYFSRRSRSRGASRLRHSPTADMAPPPWPLLATSLLLILFHHSPRAAVAFPPSLGDGLLGAARAPGFAAWLRGFRRRIHERPELAFQEYRTSELVRDELDAIGVPYVWPVAQTGVVATIAGGSDGPVVALRADMDALPLQELVDWEHKSKENGKMHACGHDAHTTMLLGAAKLLHARKDDLKGTVKLVFQPGEEGYGGAYHVLREGVLDDVSAIFGLHVDPGLPVGTVSSRPGPFLAAAGRFLVTVTGKGGHAAGPQDAVDPIVAASSAIVSLQLLVAREIDPLQAAVVSVTFMKGGDAYNVIPESASFGGTFRSLTTEGFSYLMKRIKEIIEGHAAVHRCTAAVDFMQEKLRPYPATVNDEGMYRHAREVAEAMLGQDKVSVGAQMMGAEDFSFYAEKFAGAFFMIGVRNKSMEEAMHPLHSPYFVIDEDVLPVGAAFHSAVAMEYLNKYSTTRQTELLRIEL

SEQ ID NO: 6071 - protein, 442 aa, Zea mays subsp. mays
  peptide (1)..(442): Ceres Seq. ID no. 12406894
MAPPPWPLLATSLLLILFHHSPRAAVAFPPSLGDGLLGAARAPGFAAWLRGFRRRIHERPELAFQEYRTSELVRDELDAIGVPYVWPVAQTGVVATIAGGSDGPVVALRADMDALPLQELVDWEHKSKENGKMHACGHDAHTTMLLGAAKLLHARKDDLKGTVKLVFQPGEEGYGGAYHVLREGVLDDVSAIFGLHVDPGLPVGTVSSRPGPFLAAAGRFLVTVTGKGGHAAGPQDAVDPIVAASSAIVSLQLLVAREIDPLQAAVVSVTFMKGGDAYNVIPESASFGGTFRSLTTEGFSYLMKRIKEIIEGHAAVHRCTAAVDFMQEKLRPYPATVNDEGMYRHAREVAEAMLGQDKVSVGAQMMGAEDFSFYAEKFAGAFFMIGVRNKSMEEAMHPLHSPYFVIDEDVLPVGAAFHSAVAMEYLNKYSTTRQTELLRIEL

SEQ ID NO: 6072 - protein, 331 aa, Zea mays subsp. mays
  peptide (1)..(331): Ceres Seq. ID no. 12406895
MDALPLQELVDWEHKSKENGKMHACGHDAHTTMLLGAAKLLHARKDDLKGTVKLVFQPGEEGYGGAYHVLREGVLDDVSAIFGLHVDPGLPVGTVSSRPGPFLAAAGRFLVTVTGKGGHAAGPQDAVDPIVAASSAIVSLQLLVAREIDPLQAAVVSVTFMKGGDAYNVIPESASFGGTFRSLTTEGFSYLMKRIKEIIEGHAAVHRCTAAVDFMQEKLRPYPATVNDEGMYRHAREVAEAMLGQDKVSVGAQMMGAEDFSFYAEKFAGAFFMIGVRNKSMEEAMHPLHSPYFVIDEDVLPVGAAFHSAVAMEYLNKYSTTRQTELLRIEL

SEQ ID NO: 6073 - DNA, 1436 bp, Zea mays subsp. mays
  misc_feature (1)..(1436): Ceres Seq. ID no. 12409231
  misc_feature (1)..(1436): Ortholog of  Ceres SEQ ID NO 13504015 as cited in SEQ ID NO 51020
  misc_feature (1)..(1436): Ortholog of  Ceres SEQ ID NO 13597643 as cited in SEQ ID NO 65208
acccttactcagcatggaacaggttctctgtcctcataactccaaccaaacaacggcagctagcgagctcccgcggtcccgccgccgccccctggtcctccaaaaaacggctgaaccctaaaccctccctagctcccgccgcctcgcttaaccgcgcccatggccgccgccgctcgcgccgccctcccgcggccccacctctctcttttttcgtcctcccaccgcagcccccatctgtccctcacgccctcctccgcccctcgcctgcgcagcggcgctgccacctcccctgcgctgcagcagcaccaccaggtcaccacgcgcctgggcgacgtgatcgaggcgcagcagttcgaccgggacgcgctgaacgagatcttcgaggtggcgcgggagatggaggccgtggagaggggttcccacggcgcccccagccgcgtcctcgaggggtacctcatggccacgcttttctacgagccctccacgcgcacgcgcctctccttcgaggctgctatgcggaggctcggcggggaggtcctcaccaccgagaatgcgcgcgagttctcttccgccgccaagggggagacactcgaagataccataagaaccgttgagggttattccgatattattgtactgagacattttgaaagtggagctgcaaggaaagcagcagatactgcaaatattcctgttattaatgcaggtgatggaccagggcaacatccaacccaggctttgttggatgtgtacacaataaagagagaaattggcacactagatggaattaaacttggtttggttggtgaccttgctaatgggaggacagttcgttctctggcttacttgattgctaagtaccagaacattaagatatactttgtatctcctgatgttgttaaaatgaaggatgatatcaagaactacttaaattccaaaggtgttgaatgggaagaaagttcagatttgttggaggtggcatccaagtgtgatgttatttatcaaacacgtattcaaaaagaaagatttggtgagaggattgacctttatgaagctgctcgtggcaagtacatcatggataaaaaggtcttagatgtgctgccaaaacatgctgtcatcatgcatccccttccaaggcttgatgagatcacagtagaagttgatagtgatccaagagctgcatattttaggcaggctaagaatggcctctacataaggatggcattgctcaaacttctgcttgttggtcactgacatttcggctagtgctttagcttgtgctgcgtcaagggattagaaggtattattcttaatataatgatcgaggctgtcttactcacgcaggtcgagtttttagaaacatgtactaataatcagcagcttgtgtcaaaattcaatgttcgctgttgcaggtaataaaagtctgcatccatgcg

SEQ ID NO: 6074 - protein, 364 aa, Zea mays subsp. mays
  peptide (1)..(364): Ceres Seq. ID no. 12409232
MAAAARAALPRPHLSLFSSSHRSPHLSLTPSSAPRLRSGAATSPALQQHHQVTTRLGDVIEAQQFDRDALNEIFEVAREMEAVERGSHGAPSRVLEGYLMATLFYEPSTRTRLSFEAAMRRLGGEVLTTENAREFSSAAKGETLEDTIRTVEGYSDIIVLRHFESGAARKAADTANIPVINAGDGPGQHPTQALLDVYTIKREIGTLDGIKLGLVGDLANGRTVRSLAYLIAKYQNIKIYFVSPDVVKMKDDIKNYLNSKGVEWEESSDLLEVASKCDVIYQTRIQKERFGERIDLYEAARGKYIMDKKVLDVLPKHAVIMHPLPRLDEITVEVDSDPRAAYFRQAKNGLYIRMALLKLLLVGH

SEQ ID NO: 6075 - protein, 285 aa, Zea mays subsp. mays
  peptide (1)..(285): Ceres Seq. ID no. 12409233
MEAVERGSHGAPSRVLEGYLMATLFYEPSTRTRLSFEAAMRRLGGEVLTTENAREFSSAAKGETLEDTIRTVEGYSDIIVLRHFESGAARKAADTANIPVINAGDGPGQHPTQALLDVYTIKREIGTLDGIKLGLVGDLANGRTVRSLAYLIAKYQNIKIYFVSPDVVKMKDDIKNYLNSKGVEWEESSDLLEVASKCDVIYQTRIQKERFGERIDLYEAARGKYIMDKKVLDVLPKHAVIMHPLPRLDEITVEVDSDPRAAYFRQAKNGLYIRMALLKLLLVGH

SEQ ID NO: 6076 - protein, 265 aa, Zea mays subsp. mays
  peptide (1)..(265): Ceres Seq. ID no. 12409234
MATLFYEPSTRTRLSFEAAMRRLGGEVLTTENAREFSSAAKGETLEDTIRTVEGYSDIIVLRHFESGAARKAADTANIPVINAGDGPGQHPTQALLDVYTIKREIGTLDGIKLGLVGDLANGRTVRSLAYLIAKYQNIKIYFVSPDVVKMKDDIKNYLNSKGVEWEESSDLLEVASKCDVIYQTRIQKERFGERIDLYEAARGKYIMDKKVLDVLPKHAVIMHPLPRLDEITVEVDSDPRAAYFRQAKNGLYIRMALLKLLLVGH

SEQ ID NO: 6077 - DNA, 1486 bp, Zea mays subsp. mays
  misc_feature (1)..(1486): Ceres Seq. ID no. 13494425
  misc_feature (1)..(1486): Ortholog of  Ceres SEQ ID NO 14308430 as cited in SEQ ID NO 55350
  misc_feature (1)..(1486): Ortholog of  Ceres SEQ ID NO 15177799 as cited in SEQ ID NO 59221
  misc_feature (1)..(1486): Ortholog of  Ceres SEQ ID NO 13662846 as cited in SEQ ID NO 65519
agaaataggcgcgcgtgccgcctcggccgctcgctcctctggttaatcccccctcgccacgactcgcagccatcccttcacattatccgcgcgcgcgcgagcgagcggacgtagcgtgtgggtagcgtcgccgtgcggacggtctcttggtgccggtgcgggccgcgtgacggtgcgtgtgccgcccgcggggaggaggtcgttcggttggttggccctcggcgacgatggcggtccacggcggagaggcggtctccgtcgcgctcctcttctccctcgctttcttctgcgctcgcctcctgctcgaccgcctcgtctacaagccattagcagtctaccttttcaacaccaaagcttctaagttgatgaataatgaggccaggcaagcaaagattgtcaagttctcagagtccatttggaaacttacctactatgcttctgttcaagcatgggtcctcatgataataaagcaggaaccatggtcattggatatgatgcaatactttgatggctggccgaaccaacccatcgtgtcttcattgatgcttttctatatgtgccagtgtggattttatatctatagcatcggtgctcttgttgcttgggaaacccgcagaaaagattttgctgtaatgatgtctcatcatgtaataacatctactctaattggagtttcatatctgactggatttttccgaattgggaccatcattctcgctcttcatgatgcaagtgatgtgtttcttgagactgccaaattgtgcaaatacacagaaaaagagctgggtgctagcttgttttttggtctcttcgctatctcctggcttctattgcgtctgatttacttcccattttggataatcaaagcctctagctatcattccatcacattcttgaggaagctggatgaattcccaacaactttgtactacatcttgaacacaatgcttctcacattgcttgtattccatatgtactggtggaaactcatatgtttgatgataatgagacagctgaataataaaggacaagttacagacgatgtccgatctgattctgaggatgaggagtgatgggagattcattctttgacatctgcaacgtggcatttcctcgtcaatacttttctatgcctgcttccagaattgattgcttttaatcttggcaagtctcgggaacgtataggaaagtttaatctctgtatattgccttatgatatcaaacatggctagaccgggaatggatctatacatgatgacgggcatagctagcaagcttacttcaaggttccttaaaaaattttggttcacctttatttgatatggggaaagacatgagagggtgtacagctttttcctgaagcttgcagaacccccctctgtaccatgatcaatatacttcacttgtgagtagatttagttctaattgatgataataaattgattcttttgattgggaatgaatctcacctgaaccttgatgatct

SEQ ID NO: 6078 - protein, 281 aa, Zea mays subsp. mays
  peptide (1)..(281): Ceres Seq. ID no. 13494426
MAVHGGEAVSVALLFSLAFFCARLLLDRLVYKPLAVYLFNTKASKLMNNEARQAKIVKFSESIWKLTYYASVQAWVLMIIKQEPWSLDMMQYFDGWPNQPIVSSLMLFYMCQCGFYIYSIGALVAWETRRKDFAVMMSHHVITSTLIGVSYLTGFFRIGTIILALHDASDVFLETAKLCKYTEKELGASLFFGLFAISWLLLRLIYFPFWIIKASSYHSITFLRKLDEFPTTLYYILNTMLLTLLVFHMYWWKLICLMIMRQLNNKGQVTDDVRSDSEDEE

SEQ ID NO: 6079 - protein, 235 aa, Zea mays subsp. mays
  peptide (1)..(235): Ceres Seq. ID no. 13494427
MNNEARQAKIVKFSESIWKLTYYASVQAWVLMIIKQEPWSLDMMQYFDGWPNQPIVSSLMLFYMCQCGFYIYSIGALVAWETRRKDFAVMMSHHVITSTLIGVSYLTGFFRIGTIILALHDASDVFLETAKLCKYTEKELGASLFFGLFAISWLLLRLIYFPFWIIKASSYHSITFLRKLDEFPTTLYYILNTMLLTLLVFHMYWWKLICLMIMRQLNNKGQVTDDVRSDSEDEE

SEQ ID NO: 6080 - protein, 204 aa, Zea mays subsp. mays
  peptide (1)..(204): Ceres Seq. ID no. 13494428
MIIKQEPWSLDMMQYFDGWPNQPIVSSLMLFYMCQCGFYIYSIGALVAWETRRKDFAVMMSHHVITSTLIGVSYLTGFFRIGTIILALHDASDVFLETAKLCKYTEKELGASLFFGLFAISWLLLRLIYFPFWIIKASSYHSITFLRKLDEFPTTLYYILNTMLLTLLVFHMYWWKLICLMIMRQLNNKGQVTDDVRSDSEDEE

SEQ ID NO: 6081 - DNA, 1149 bp, Zea mays subsp. mays
  misc_feature (1)..(1149): Ceres Seq. ID no. 12409227
  misc_feature (1)..(1149): Ortholog of  Ceres SEQ ID NO 13637842 as cited in SEQ ID NO 54650
  misc_feature (1)..(1149): Ortholog of  Ceres SEQ ID NO 12608127 as cited in SEQ ID NO 57579
  misc_feature (1)..(1149): Ortholog of  Ceres SEQ ID NO 12634558 as cited in SEQ ID NO 0
  misc_feature (1)..(1149): Ortholog of  Ceres SEQ ID NO 15180294 as cited in SEQ ID NO 0
attttttaactcgaccccgccctacctctcgccgtcgaccacaagtccacaacccacaaaatgcacgggaggacccagggcgccgccgtcggcgacatgacccagcgccttctcctcgccctctcgctcatcgcatcagcgaccgccgtgcccgctgtcatccgcacggtcccggacgaccccaccgcgggctcctctggcgcggcagacgccgcggacgcgctcttctgtgacagctggaggctgtcggtggagacggccaacgcgggcccctggagcgccgtgccctcgcgctgtggggctttcgtgcgggactacatggagggacctcgctacgcgtctgactccgccgtcgccgacgccgacgccctagccttcgcctccgaagccctggccgccgccgagtggggcggctcggcgagcgcgaggcctgcgtgggtgttcgacgtcgacgagacgctgctctctaacgcgccgtactacgcggtcaacggatggggatcacaggaattcaatgagacctcatttgatgaatgggtagatgctgcaaaggcaccaacattaccatcgagcttgaatttgtacaatcaacttcagggacttggtttccatgttatcctattgactggccggagtgaattccaacgtaatgccacagaattgaatcttttgtttgctggctacaactcatgggaaaaactcatactgaggcaaccttatgatattggcaagaacgctgtgcagtacaaatcagagagacgagcagcaatggaagcggaaggtttcaagatacttgggaactcaggggatcagtggagtgatttgataggatcgcccatggcaacgagatccttcaagctaccaaacccaatgtacttcatcagctgattttattgttagagcagtggacgaaggagcaggttttcatagggtgttcatatggtcccggtgtgaaactgcttttgttagacatccctcgggacataaatttagatttttatcttcaagcatgttgaaattcaactgaggcttgggtccgtcgaatctgccctatgatgatctgtaattacacacttcttttcccacactactggaagcatttgtggtaaggctaaaaaaaaaaaaaaaaaaatcaagaactcgcacgag

SEQ ID NO: 6082 - protein, 275 aa, Zea mays subsp. mays
  peptide (1)..(275): Ceres Seq. ID no. 12409228
MHGRTQGAAVGDMTQRLLLALSLIASATAVPAVIRTVPDDPTAGSSGAADAADALFCDSWRLSVETANAGPWSAVPSRCGAFVRDYMEGPRYASDSAVADADALAFASEALAAAEWGGSASARPAWVFDVDETLLSNAPYYAVNGWGSQEFNETSFDEWVDAAKAPTLPSSLNLYNQLQGLGFHVILLTGRSEFQRNATELNLLFAGYNSWEKLILRQPYDIGKNAVQYKSERRAAMEAEGFKILGNSGDQWSDLIGSPMATRSFKLPNPMYFIS

SEQ ID NO: 6083 - protein, 263 aa, Zea mays subsp. mays
  peptide (1)..(263): Ceres Seq. ID no. 12409229
MTQRLLLALSLIASATAVPAVIRTVPDDPTAGSSGAADAADALFCDSWRLSVETANAGPWSAVPSRCGAFVRDYMEGPRYASDSAVADADALAFASEALAAAEWGGSASARPAWVFDVDETLLSNAPYYAVNGWGSQEFNETSFDEWVDAAKAPTLPSSLNLYNQLQGLGFHVILLTGRSEFQRNATELNLLFAGYNSWEKLILRQPYDIGKNAVQYKSERRAAMEAEGFKILGNSGDQWSDLIGSPMATRSFKLPNPMYFIS

SEQ ID NO: 6084 - protein, 189 aa, Zea mays subsp. mays
  peptide (1)..(189): Ceres Seq. ID no. 12409230
MEGPRYASDSAVADADALAFASEALAAAEWGGSASARPAWVFDVDETLLSNAPYYAVNGWGSQEFNETSFDEWVDAAKAPTLPSSLNLYNQLQGLGFHVILLTGRSEFQRNATELNLLFAGYNSWEKLILRQPYDIGKNAVQYKSERRAAMEAEGFKILGNSGDQWSDLIGSPMATRSFKLPNPMYFIS

SEQ ID NO: 6085 - DNA, 1268 bp, Zea mays subsp. mays
  misc_feature (1)..(1268): Ceres Seq. ID no. 12407255
  misc_feature (1)..(1268): Ortholog of  Ceres SEQ ID NO 14302021 as cited in SEQ ID NO 68979
  misc_feature (1)..(1268): Ortholog of  Ceres SEQ ID NO 14309296 as cited in SEQ ID NO 0
acctgcacgctggccccccgccccgccgcgggatcaaatacgccgcctccgcccgtccactccctcgccgcccccgtctcctctcctctcctctcccccgcatccacggccgcaggccgcagccagccactcgacgatctagtcgtctctctctccccgctctgccgcctcgctgccgcggcttcccgtcggctggaggatgaaggtcacggtcgtgtcccggagcggccgggaggtcgtcaagggcggcatcgacctcaaggactcggccaaggtcgcggacctgcaggaggccatccatgccaggactaagaagtattatccttctaggcagcggctcaccctcccccttcaacctggaaaaggcgggaagccagttgtcctcagtccgaaggccagcctgctagaatactgcgagaagggttctgggtcactgacagtggtcttcaaagatttagggccacaggtctactacagcacactgttcttcttcgagtacctgggtcctctcatcatctaccccatgttctactatctgcctgtctacaaatacttcgggtacgagggggagcgggccatgcaccctgtccagacctacgccatgtactactggtgcttccactacttcaagcggatcatggagacattcttcgtgcaccgcttcagccacgcgacgtcgccgctctcgaacgtcttcaggaactgtgcctactactggaccttcggcgcctacattgcttactactgcaaccacccgctgtacaccccagtgagtgatctgcagatgaagattgggtttggttttggggtcgtctgccaggtcgcgaacttctactgccacatcctgctgcggaacctcaggagcccaagcggcagcggcgggtaccagatcccccgcggtttcttgttcaacatcgtgacctgcgccaattataccaccgagatctatcagtgggtcggcttcaacatcgccacgcagaccgtggcaggttacgtcttccttgtcgtggcggcaggcatcatgaccaactgggcgctcggcaagcacagccgtctgaagaagctgtttgacggcaaggatgggaggcccaagtaccctcgccggtgggtgattctccctccgttcctgtgaagaggtggtggtggtcggcctattgtgattcgatgtctacagacagttgtactgtactaatcgtgcctgtttagcggttgaacttggattccgttgtccgaaatttctaatccgaaagatggatttcattgtcttc

SEQ ID NO: 6086 - protein, 310 aa, Zea mays subsp. mays; identical to SEQ ID NO: 2382
  peptide (1)..(310): Ceres Seq. ID no. 12407256

SEQ ID NO: 6087 - protein, 202 aa, Zea mays subsp. mays; identical to SEQ ID NO: 2383
  peptide (1)..(202): Ceres Seq. ID no. 12407257

SEQ ID NO: 6088 - protein, 184 aa, Zea mays subsp. mays; identical to SEQ ID NO: 2384
  peptide (1)..(184): Ceres Seq. ID no. 12407258

SEQ ID NO: 6089 - DNA, 1010 bp, Zea mays subsp. mays
  misc_feature (1)..(1010): Ceres Seq. ID no. 12353858
  misc_feature (1)..(1010): Ortholog of  Ceres SEQ ID NO 14311693 as cited in SEQ ID NO 51239
  misc_feature (1)..(1010): Ortholog of  Ceres SEQ ID NO 13661954 as cited in SEQ ID NO 61182
agaaatcagcccgccgtgtcgtgcctactctctccttcccccaaaataaaagaagcgattttgaacggctccgctagctaaagcagggcaaggcggccggaaggcaggaaatccgtacgcacgccgaggtcgaggtcgaggtctcagcagggaggatggagacggagcagcagggcgtggttgcggcggtgaagccgacgctggccaaggggacgccgtcggcgtcgttccggctccgcaacgggagcctaaacgcggtgcgcctccgccgcgtgttcgacctgttcgaccgcaacggggacggcgagatcacggtggacgagctggcgcaggcgctggacgcgctgggcctagacgcggaccgcggcgggctggccgccaccgttggcacctacgtgcccgacggcgccgcaggcctccgctttgaggacttcgaccggctgcaccgcgcgctcggggacgccttcttcggagcgctggcgggccaggacgacgcggccgcggacggcgccggcgccggggaggacgacgacgagcaggagatgcgggaggcgttcagggtcttcgacgtcgacggcgacggcttcatctctgccgccgagctgcaggaggtgctcaagaagctcggcctccccgaggccagcagcatggccaacgtccgggagatgatctgcaacgtcgaccgcgacagcgacggccgcgtcgacttcgccgagttcaagtgcatgatgcaggggatcaccgtctggggcgcctgatcgatcccatcgtcgtcggagcggacgagagtgtgtgtgtgtgtgtcgaggagcgggggcgaggcaaattgaaccacaaagctccgtatttccttcctcgagacagcgatgcgactgcgaccttcattcttgtcttgtcttgtggtggcaccggtgtgtctctacttgtgtgtgctcttcttttaaattcattaattattaatcttgtcgtctttcgctggtcaagcagaggcgatgagaatggttcatgct

SEQ ID NO: 6090 - protein, 200 aa, Zea mays subsp. mays
  peptide (1)..(200): Ceres Seq. ID no. 12353859
METEQQGVVAAVKPTLAKGTPSASFRLRNGSLNAVRLRRVFDLFDRNGDGEITVDELAQALDALGLDADRGGLAATVGTYVPDGAAGLRFEDFDRLHRALGDAFFGALAGQDDAAADGAGAGEDDDEQEMREAFRVFDVDGDGFISAAELQEVLKKLGLPEASSMANVREMICNVDRDSDGRVDFAEFKCMMQGITVWGA

SEQ ID NO: 6091 - DNA, 1017 bp, Zea mays subsp. mays
  misc_feature (1)..(1017): Ceres Seq. ID no. 12349105
  misc_feature (1)..(1017): Ortholog of  Ceres SEQ ID NO 13594918 as cited in SEQ ID NO 55747
  misc_feature (1)..(1017): Ortholog of  Ceres SEQ ID NO 12587066 as cited in SEQ ID NO 63204
gtccagggtagagagagagagggatggtgtgagggagggaagggagcaaaggcaaagcagccaacgaccagagagacacggaggctgagagagagagagagagagagatttgggaatcgagaaagcagcgaggaagaagaagatggagcaggaggaagcgtgcacctcgtcgctgcggcagtgcaggatttgccacgacgaggaggacgagcggcgctccgccatggagtcgccctgcgcctgttccggctccctcaagtacgctcacaggggatgcgtgcagaggtggtgcgacgagaagggaagcgccgtctgcgagatttgcctccagaactttgagccgggctacaccgttcctcccaagaaaacccaacctgctgatgtcgcggtgaccatcagagacagcgtgggggtgcccaggccgcagcacgagcctgaagaggaggagcaggagcaggtggacgcggcgttgatcggaggcagcgacccggagtacgccgagtgcgcgcgcgccgccggcaggagcgcgtcctggtgccggtcggtggccgtcacgttcacggtcgtcctgctgctgaggcacctggtcaccgtggtcacggtcggagcggccaaccagttcgccttcggtctcctcacggtatacttgctgcgggcgagcgggatcctgcttccgttctacctcgtcatgaggctcatctccgtgatccagcaggggcagaggcagtaccgcctccggctgctccaggagcagaggaggcacgcgttgaggtcggcccggctgcacggccaggaacaggaacagcatgtcatcctggttcgctgaggaacgagccattcattcaccttggtgtccatacattccattcatccgtcgtacgcgtacaaggttgtaagatgtaccactccatttttttgttcaggcctttacaagcctaaaaaaagcttatatgtaccaccacttcatttgtaaaccctcaaaatttgttgctgagaagatcgacatatcatgtatag

SEQ ID NO: 6092 - protein, 227 aa, Zea mays subsp. mays
  peptide (1)..(227): Ceres Seq. ID no. 12349106
MEQEEACTSSLRQCRICHDEEDERRSAMESPCACSGSLKYAHRGCVQRWCDEKGSAVCEICLQNFEPGYTVPPKKTQPADVAVTIRDSVGVPRPQHEPEEEEQEQVDAALIGGSDPEYAECARAAGRSASWCRSVAVTFTVVLLLRHLVTVVTVGAANQFAFGLLTVYLLRASGILLPFYLVMRLISVIQQGQRQYRLRLLQEQRRHALRSARLHGQEQEQHVILVR

SEQ ID NO: 6093 - protein, 200 aa, Zea mays subsp. mays
  peptide (1)..(200): Ceres Seq. ID no. 12349107
MESPCACSGSLKYAHRGCVQRWCDEKGSAVCEICLQNFEPGYTVPPKKTQPADVAVTIRDSVGVPRPQHEPEEEEQEQVDAALIGGSDPEYAECARAAGRSASWCRSVAVTFTVVLLLRHLVTVVTVGAANQFAFGLLTVYLLRASGILLPFYLVMRLISVIQQGQRQYRLRLLQEQRRHALRSARLHGQEQEQHVILVR

SEQ ID NO: 6094 - DNA, 1250 bp, Zea mays subsp. mays
  misc_feature (1)..(1250): Ceres Seq. ID no. 12365550
  misc_feature (1)..(1250): Ortholog of  Ceres SEQ ID NO 14316261 as cited in SEQ ID NO 57854
ggaacagcctcgttctgtccaagtccaactccaacgaggcaacgactcgtcagtggtcagtacactacaccgtaaccgtcgccggaatcgatcgacccaaagctccctttagagcccgagctctatccaacccacgaacgggatcccgatgcccgtggcggcctcggttctcgccgcagcggcggtctcgcccccgctgacgtggcggagatggactcctcttctcgccgcgtcacatccacaggcgaacccgcctcccgcactgcgcccgcgggcgcccgctcctcctctccgggcctcctccgttccccgcgattcctgcgccggagccgccgtccggaggacgccgtgtgcggcggcggcggcacttggtggatgtgtgaaggcggagtccacggagcgggaggcgctcgatcgggatgctctgaagcgggtggcgctactcgcgcttggctgctgcgctgcagccgccgcgctcggctgcggcgctgcagccgccgcgctcggctgcggcgcggcgcgggcagcggcggaggactccatcaaggcgtcaggattcgggctgcgggtggcggagtcgctgcggaggctcggatggcccgacgacaccgtcgtgttcgcgctcgcgacgctgccggtgatcgagctgcggggggcgatccccgttgggtattggctgcggctccatccagtccgcctcaccatcctatccgttcttgggaacatggtgcctgtaccattcatcatcctctacctgaagaaactcgcaacgtttctgtctcagaacagcgcgtccgcgactcgaattatggacctcctctttgagcgggcacggcgcaaggctgctcctgttgaggaattccagtggctcggcttgatgctgttcgttgccgttccattcccaggcacgggagcgtggacatgggccttcattgcatctgtactaggcatgccgttctggtcaggttttacagcaaatttcgtgggagtcgtccttgcagggctgctggtgaacttgctcatgaatcttggcctgaaatacgcgatcgtcactggagtagttttgttctttgtctcaaccgtcatgtggagtgttcttcgttcccttaagaagtccgttaatgtcaagtgatctagtagtctttatcaaactgttcctaatcccttcagagttcagccttgcgtaggaagcttagttgtgtaattttaagtggaactttcagcttccaagtggatttacaagagagagt

SEQ ID NO: 6095 - protein, 327 aa, Zea mays subsp. mays
  peptide (1)..(327): Ceres Seq. ID no. 12365551
MPVAASVLAAAAVSPPLTWRRWTPLLAASHPQANPPPALRPRAPAPPLRASSVPRDSCAGAAVRRTPCAAAAALGGCVKAESTEREALDRDALKRVALLALGCCAAAAALGCGAAAAALGCGAARAAAEDSIKASGFGLRVAESLRRLGWPDDTVVFALATLPVIELRGAIPVGYWLRLHPVRLTILSVLGNMVPVPFIILYLKKLATFLSQNSASATRIMDLLFERARRKAAPVEEFQWLGLMLFVAVPFPGTGAWTWAFIASVLGMPFWSGFTANFVGVVLAGLLVNLLMNLGLKYAIVTGVVLFFVSTVMWSVLRSLKKSVNVK

SEQ ID NO: 6096 - protein, 204 aa, Zea mays subsp. mays
  peptide (1)..(204): Ceres Seq. ID no. 12365552
MDSSSRRVTSTGEPASRTAPAGARSSSPGLLRSPRFLRRSRRPEDAVCGGGGTWWMCEGGVHGAGGARSGCSEAGGATRAWLLRCSRRARLRRCSRRARLRRGAGSGGGLHQGVRIRAAGGGVAAEARMARRHRRVRARDAAGDRAAGGDPRWVLAAAPSSPPHHPIRSWEHGACTIHHPLPEETRNVSVSEQRVRDSNYGPPL

SEQ ID NO: 6097 - DNA, 999 bp, Zea mays subsp. mays
  misc_feature (1)..(999): Ceres Seq. ID no. 12342921
  misc_feature (1)..(999): Ortholog of  Ceres SEQ ID NO 13622227 as cited in SEQ ID NO 413
aagaaaaaccctacgtgtcacaagcctccgcctcttctcccgtttgcgacgactgggtgggctacgccgccgccgccgccgctgccgctgctctacggtgctgagtcctttgccgatttcttcccggcgaagagcgccaccagccttttgcataaatcatcgggtatacatccatcttcatttagtagatccgcccctgctgaaaacgcactcgatggcgtccgcgacggggggttcctcctcggagatggcggtggaccacgcgacggggctgggcaccgtggagaagccgcggtttgatgctctgatgccgagtgagatgagcggcgggaggacccagttccggaaagtgaccgtgccgcagcaccggttcgcgccgctcaagcgatgctggatggaaatctacacacccgtttacgagcacatgaagatcgacatacgcatgaatctcaaggcgaggagggtggagctaaagacaaggcaagacacaccagatgtcagcaaccttcagaaatgtgctgactttgtgcatgcttttatgctcgggttcgacattgctgatgccgtcgccttgctgcgtcttgatgatctgtatgtggattcctttgagatcaaggacgtgaagaccttgcgaggggagcatctgtcgcgcgctattggccgcttatcagggaaaggaggcaagaccaagtacgccattgagaactcaaccaggacccgcatcgtcatcgctgatacaaagatccacatacttggatccttcgttaacatcaaggtcgcgcgggattcactttgcagtctcatcttgggttctcctgctggcaaagtgtattctaaactaagggctgtatcagctaggttggcggaaaggtattaaattaaatggggtttgcccgcaccgtataagggcatgttcggttcccctcaattcatatggattggagggatttgagtgggattaattccatatcaagtcaaaattcttcataatttttttcc

SEQ ID NO: 6098 - protein, 291 aa, Zea mays subsp. mays
  peptide (1)..(291): Ceres Seq. ID no. 12342922
RKTLRVTSLRLFSRLRRLGGLRRRRRRCRCSTVLSPLPISSRRRAPPAFCINHRVYIHLHLVDPPLLKTHSMASATGGSSSEMAVDHATGLGTVEKPRFDALMPSEMSGGRTQFRKVTVPQHRFAPLKRCWMEIYTPVYEHMKIDIRMNLKARRVELKTRQDTPDVSNLQKCADFVHAFMLGFDIADAVALLRLDDLYVDSFEIKDVKTLRGEHLSRAIGRLSGKGGKTKYAIENSTRTRIVIADTKIHILGSFVNIKVARDSLCSLILGSPAGKVYSKLRAVSARLAERY

SEQ ID NO: 6099 - protein, 220 aa, Zea mays subsp. mays
  peptide (1)..(220): Ceres Seq. ID no. 12342923
MASATGGSSSEMAVDHATGLGTVEKPRFDALMPSEMSGGRTQFRKVTVPQHRFAPLKRCWMEIYTPVYEHMKIDIRMNLKARRVELKTRQDTPDVSNLQKCADFVHAFMLGFDIADAVALLRLDDLYVDSFEIKDVKTLRGEHLSRAIGRLSGKGGKTKYAIENSTRTRIVIADTKIHILGSFVNIKVARDSLCSLILGSPAGKVYSKLRAVSARLAERY

SEQ ID NO: 6100 - protein, 209 aa, Zea mays subsp. mays
  peptide (1)..(209): Ceres Seq. ID no. 12342924
MAVDHATGLGTVEKPRFDALMPSEMSGGRTQFRKVTVPQHRFAPLKRCWMEIYTPVYEHMKIDIRMNLKARRVELKTRQDTPDVSNLQKCADFVHAFMLGFDIADAVALLRLDDLYVDSFEIKDVKTLRGEHLSRAIGRLSGKGGKTKYAIENSTRTRIVIADTKIHILGSFVNIKVARDSLCSLILGSPAGKVYSKLRAVSARLAERY

SEQ ID NO: 6101 - DNA, 1124 bp, Zea mays subsp. mays
  misc_feature (1)..(1124): Ceres Seq. ID no. 12403543
  misc_feature (1)..(1124): Ortholog of  Ceres SEQ ID NO 15173410 as cited in SEQ ID NO 61812
  misc_feature (1)..(1124): Ortholog of  Ceres SEQ ID NO 13596922 as cited in SEQ ID NO 62353
actgttgcagctgcaaaatactgttgcagctgcaatcactagagagaaaatactgtagaagccgcagccgcagtcggattaaagccgcagcgaacaagcccatatatcgccgtcagagccatcaccccgatggatccctgcgcttcgtgctcaggttcagcggaaactgagccgtgagcaccgccgccgccaccanntttgcgtttgcggtgacgacacgacaccaataatggcggcggcaaggacaaggagcctgctcgcggcggcgttcctggcgctggcggcggtgccggcggtgctctgccaggcgccaggccccgcggcggcggcgccgnccaacaagggcccgccgaacgttacggcgatcctggagaagnncgggcagtacnngacgttcatncggctgatgaagtngacgcagcagnacacncagctgaacgnccagctgaacaactcgttcggcagcgggtacacggtgttcgcgcccaccgacagcgccttctccagcctcaagcccggcacgctgaacaagctgtcgcagcagnagcaggtgtcgntggtgcagtaccacgtcctgccgcagttctactcgctcgactnnttcgagaccgccagcaaccccgtgcgtacgcaggcgtcnngctcnnacgggccctacacgctcaacatcaccgccgacagcagcggccaggccaacgtgtccacgggcctcgtcgccaccngcgtcnnccannccctgcgcgcgcagcagcccctcgccgtctactccgtcgaccaggtgctgctggccaacgacctgttcggcgtcaagcccccggcgtccgcgccgcccgccgccaggaagccggccaagggcgggtccgtcgccgaggcgcncgccgccggctcgntgacgcgccgccctccgnncggccgcgcgcggcgccagcaggaccgccggatggagctcgctgcnccgctctgctgttcctggccgccgcggcctccttcctgtccctgttgtgagaatgtaaacatggttcgtgcttgtcgagcacaaaagagctcgtcttcttgcggtttgtttctcttctggagttctagtaacctggatctgtccctgaatgttgatgaagccagctgtt

SEQ ID NO: 6102 - protein, 298 aa, Zea mays subsp. mays
  peptide (1)..(298): Ceres Seq. ID no. 12403544
  misc_feature (36)..(36): Xaa is any aa, unknown or other
  misc_feature (50)..(50): Xaa is any aa, unknown or other
  misc_feature (54)..(54): Xaa is any aa, unknown or other
  misc_feature (57)..(57): Xaa is any aa, unknown or other
  misc_feature (62)..(62): Xaa is any aa, unknown or other
  misc_feature (66)..(66): Xaa is any aa, unknown or other
  misc_feature (67)..(67): Xaa is any aa, unknown or other
  misc_feature (71)..(71): Xaa is any aa, unknown or other
  misc_feature (106)..(106): Xaa is any aa, unknown or other
  misc_feature (110)..(110): Xaa is any aa, unknown or other
  misc_feature (124)..(124): Xaa is any aa, unknown or other
  misc_feature (137)..(137): Xaa is any aa, unknown or other
  misc_feature (138)..(138): Xaa is any aa, unknown or other
  misc_feature (139)..(139): Xaa is any aa, unknown or other
  misc_feature (140)..(140): Xaa is any aa, unknown or other
  misc_feature (165)..(165): Xaa is any aa, unknown or other
  misc_feature (167)..(167): Xaa is any aa, unknown or other
  misc_feature (168)..(168): Xaa is any aa, unknown or other
  misc_feature (169)..(169): Xaa is any aa, unknown or other
  misc_feature (216)..(216): Xaa is any aa, unknown or other
  misc_feature (221)..(221): Xaa is any aa, unknown or other
  misc_feature (227)..(227): Xaa is any aa, unknown or other
  misc_feature (242)..(242): Xaa is any aa, unknown or other
MAAARTRSLLAAAFLALAAVPAVLCQAPGPAAAAPXNKGPPNVTAILEKXGQYXTFXRLMKXTQQXXQLNXQLNNSFGSGYTVFAPTDSAFSSLKPGTLNKLSQQXQVSXVQYHVLPQFYSLDXFETASNPVRTQAXXXXGPYTLNITADSSGQANVSTGLVATXVXXXLRAQQPLAVYSVDQVLLANDLFGVKPPASAPPAARKPAKGGSVAEAXAAGSXTRRPPXGRARRQQDRRMELAXPLCCSWPPRPPSCPCCENVNMVRACRAQKSSSSCGLFLFWSSSNLDLSLNVDEASC

SEQ ID NO: 6103 - protein, 239 aa, Zea mays subsp. mays
  peptide (1)..(239): Ceres Seq. ID no. 12403545
  misc_feature (3)..(3): Xaa is any aa, unknown or other
  misc_feature (7)..(7): Xaa is any aa, unknown or other
  misc_feature (8)..(8): Xaa is any aa, unknown or other
  misc_feature (12)..(12): Xaa is any aa, unknown or other
  misc_feature (47)..(47): Xaa is any aa, unknown or other
  misc_feature (51)..(51): Xaa is any aa, unknown or other
  misc_feature (65)..(65): Xaa is any aa, unknown or other
  misc_feature (78)..(78): Xaa is any aa, unknown or other
  misc_feature (79)..(79): Xaa is any aa, unknown or other
  misc_feature (80)..(80): Xaa is any aa, unknown or other
  misc_feature (81)..(81): Xaa is any aa, unknown or other
  misc_feature (106)..(106): Xaa is any aa, unknown or other
  misc_feature (108)..(108): Xaa is any aa, unknown or other
  misc_feature (109)..(109): Xaa is any aa, unknown or other
  misc_feature (110)..(110): Xaa is any aa, unknown or other
  misc_feature (157)..(157): Xaa is any aa, unknown or other
  misc_feature (162)..(162): Xaa is any aa, unknown or other
  misc_feature (168)..(168): Xaa is any aa, unknown or other
  misc_feature (183)..(183): Xaa is any aa, unknown or other
MKXTQQXXQLNXQLNNSFGSGYTVFAPTDSAFSSLKPGTLNKLSQQXQVSXVQYHVLPQFYSLDXFETASNPVRTQAXXXXGPYTLNITADSSGQANVSTGLVATXVXXXLRAQQPLAVYSVDQVLLANDLFGVKPPASAPPAARKPAKGGSVAEAXAAGSXTRRPPXGRARRQQDRRMELAXPLCCSWPPRPPSCPCCENVNMVRACRAQKSSSSCGLFLFWSSSNLDLSLNVDEASC

SEQ ID NO: 6104 - DNA, 667 bp, Zea mays subsp. mays
  misc_feature (1)..(667): Ceres Seq. ID no. 12353842
  misc_feature (1)..(667): Ortholog of  Ceres SEQ ID NO 15175269 as cited in SEQ ID NO 63840
aatcgtccatccgtatttccgtcacaactcacaacccgagccccccaaacccgaagcagcaggagctcccctgaccttgctccgcctccgatcaaggaaaaggaagatgagctactacggccagcagccccccgtcggcgtcccgccgcagcaaggctacccggggaaggacggctacccgccagcggggtacccgccggccggctaccccccgccggcgcagggctacccgcagcagggttacccacagcagggctacccgccgcagtacgcgcagccgcctccacagcagcagcagagcagcgggccttccttcatggaaggatgcttggctgccctctgctgctgctgcctcctggacgcctgcttctgacggatccatccgtgccgggttcaacacggctgcaagtgaagcaacaagcttacggaagagctggaactgggccgtgctattctagctttgtcctgcgttatcgccctcttttcttttcttttcttttttttttctctctctctctctctctgttataagactactggtactctgtcgatgtcgattggattagactagggctggtgtgtattctgtggatgctccgtgtttctggtgggattcaagttcaaacctgggattattgtatttcttctacctgttactctgttgccg

SEQ ID NO: 6105 - protein, 176 aa, Zea mays subsp. mays
  peptide (1)..(176): Ceres Seq. ID no. 12353843
NRPSVFPSQLTTRAPQTRSSRSSPDLAPPPIKEKEDELLRPAAPRRRPAAARLPGEGRLPASGVPAGRLPPAGAGLPAAGLPTAGLPAAVRAAASTAAAEQRAFLHGRMLGCPLLLLPPGRLLLTDPSVPGSTRLQVKQQAYGRAGTGPCYSSFVLRYRPLFFSFLFFFSLSLSLL

SEQ ID NO: 6106 - protein, 123 aa, Zea mays subsp. mays
  peptide (1)..(123): Ceres Seq. ID no. 12353844
IVHPYFRHNSQPEPPKPEAAGAPLTLLRLRSRKRKMSYYGQQPPVGVPPQQGYPGKDGYPPAGYPPAGYPPPAQGYPQQGYPQQGYPPQYAQPPPQQQQSSGPSFMEGCLAALCCCCLLDACF

SEQ ID NO: 6107 - protein, 88 aa, Zea mays subsp. mays
  peptide (1)..(88): Ceres Seq. ID no. 12353845
MSYYGQQPPVGVPPQQGYPGKDGYPPAGYPPAGYPPPAQGYPQQGYPQQGYPPQYAQPPPQQQQSSGPSFMEGCLAALCCCCLLDACF

SEQ ID NO: 6108 - DNA, 1341 bp, Zea mays subsp. mays
  misc_feature (1)..(1341): Ceres Seq. ID no. 12356334
  misc_feature (1)..(1341): Ortholog of  Ceres SEQ ID NO 12625092 as cited in SEQ ID NO 68848
atccctcccaactccagcgccgctaggggtcaaatcgaaaaatggcgttgctgagcccgcgcgtgccgcggctgccgccctccaccttcacctccgttgccggtgcccggtgctttggccctgccgcgaggtgccaggcgacggcggcgggcggcgtggcggccgcggggcccccgtcgtcggagctggaggccatccggtggggcagcgccaagctgcagggcgctcgcgacgagatggaggatgaggtcttgctccgccccggggctccctcctcgatggcttctccttcgccgccgtcttggatggacacgccggcttctccgccgtccagttcctcagggatgagctgtacaaggagtgcgcagctgcgttggacggcggcgcggtgctcagcactaagaatctcgacgctatcacggcctccatccagcgtgccttcgccgctgtcgacgccaagctctccacctggctcgagcaaacggacaaggacgactctggtgctacggccactgtcatgtttctcaggagcgatgtgcttgttgtctcgcacattggggactcttgcttggtgatatcacgtggtggaagatctgaagctttgactggctctcatcgaccgtatgggaacaacaaaacgtcccttgaagaggtcaagaggatcagagcagcaggtggatggattgttgatgggcgcatatgtggagacatatctgtatctcgtgcttttggggacataagatttaagacacaaaagaatgaaatgctggtgaaaggagttaaacaaggaaggtggactgataagttcatctcacgaatacaatttaaagatgatatagtaatctcgtcacctgatgtatctctggtagagcttggaccagacgtggaatttgttctgttggcaatggtctttgggactacataaaaagctctgaagctgtagcttttgtcagagatcaactccgtcagcatggtgatgtccagttggcctgcgaggcacttggtcagaaagctctggatcaacggtcccaagacaatattagcatagtcatagctgacttggggaggacaaactggaaggcgttgcccgatgaaaggccgaacttgttcttgtaactaagtcaagcagtcgcgactgtaggggttgtctcaataggaatttgggtctcgtcgttccttgggttacagtagaactagctactccgtccggatgtgtatattacctactgagtttacatctttctgctagcagtagcagctgcaaaatatatgtatattcgtatatagtgtgtgaattgatagggtaatctgtttgggtaatactgagtgaacgtgtgaagt

SEQ ID NO: 6109 - protein, 177 aa, Zea mays subsp. mays
  peptide (1)..(177): Ceres Seq. ID no. 12356335
MALLSPRVPRLPPSTFTSVAGARCFGPAARCQATAAGGVAAAGPPSSELEAIRWGSAKLQGARDEMEDEVLLRPGAPSSMASPSPPSWMDTPASPPSSSSGMSCTRSAQLRWTAARCSALRISTLSRPPSSVPSPLSTPSSPPGSSKRTRTTLVLRPLSCFSGAMCLLSRTLGTLAW

SEQ ID NO: 6110 - protein, 135 aa, Zea mays subsp. mays
  peptide (1)..(135): Ceres Seq. ID no. 12356336
MFLRSDVLVVSHIGDSCLVISRGGRSEALTGSHRPYGNNKTSLEEVKRIRAAGGWIVDGRICGDISVSRAFGDIRFKTQKNEMLVKGVKQGRWTDKFISRIQFKDDIVISSPDVSLVELGPDVEFVLLAMVFGTT

SEQ ID NO: 6111 - protein, 112 aa, Zea mays subsp. mays
  peptide (1)..(112): Ceres Seq. ID no. 12356337
MEDEVLLRPGAPSSMASPSPPSWMDTPASPPSSSSGMSCTRSAQLRWTAARCSALRISTLSRPPSSVPSPLSTPSSPPGSSKRTRTTLVLRPLSCFSGAMCLLSRTLGTLAW

SEQ ID NO: 6112 - DNA, 867 bp, Zea mays subsp. mays
  misc_feature (1)..(867): Ceres Seq. ID no. 12402556
  misc_feature (1)..(867): Ortholog of  Ceres SEQ ID NO 12611884 as cited in SEQ ID NO 51018
  misc_feature (1)..(867): Ortholog of  Ceres SEQ ID NO 12609093 as cited in SEQ ID NO 52008
  misc_feature (1)..(867): Ortholog of  Ceres SEQ ID NO 12609839 as cited in SEQ ID NO 52022
  misc_feature (1)..(867): Ortholog of  Ceres SEQ ID NO 13638885 as cited in SEQ ID NO 55803
  misc_feature (1)..(867): Ortholog of  Ceres SEQ ID NO 15172729 as cited in SEQ ID NO 56037
  misc_feature (1)..(867): Ortholog of  Ceres SEQ ID NO 14304209 as cited in SEQ ID NO 56460
  misc_feature (1)..(867): Ortholog of  Ceres SEQ ID NO 14301452 as cited in SEQ ID NO 60984
  misc_feature (1)..(867): Ortholog of  Ceres SEQ ID NO 12587429 as cited in SEQ ID NO 63113
  misc_feature (1)..(867): Ortholog of  Ceres SEQ ID NO 12615635 as cited in SEQ ID NO 63133
  misc_feature (1)..(867): Ortholog of  Ceres SEQ ID NO 12586351 as cited in SEQ ID NO 64028
  misc_feature (1)..(867): Ortholog of  Ceres SEQ ID NO 14301603 as cited in SEQ ID NO 67721
  misc_feature (1)..(867): Ortholog of  Ceres SEQ ID NO 13654441 as cited in SEQ ID NO 67814
  misc_feature (1)..(867): Ortholog of  Ceres SEQ ID NO 12635608 as cited in SEQ ID NO 0
  misc_feature (1)..(867): Ortholog of  Ceres SEQ ID NO 14309027 as cited in SEQ ID NO 0
  misc_feature (1)..(867): Ortholog of  Ceres SEQ ID NO 15177482 as cited in SEQ ID NO 0
actcgaagtcgaagccgcagcagctagctagctagcatggccgggaaagagcttacgctgctggggttatgggcgagcccgttcgtgctccgggcgcgcatcgcgctcagcctcaaaggcctcacctacgcatactccgaggagaacctcgacgacaagagcgagcttctcctcagctccaaccccgtgctcaagaaggtgcccgtgctcatccaccacggcaagcccgtctgcgagtcccagatcatcgtgcagtacgtcgacgaggctttccccgccgccgcacctaatttccttccatccgacccctacgaccgcgccattgctcgcttctgggcctcctacgtcgacgacaagttctacagcgcgtggatacccgtgttcaggggcaggacggcggaggagatggcggaggcggcgaggcaggccgtcgcggcgctggagacgctggagcaggcgttcagggagtgctccaaggggaaggccttcttcggaggggacagcgtggggctcgtcgacgtcgtgctcggcggccttgttgggtggctgtacgccaccgaggccatctgcggggtgaaggccctcgacgccggcaggacgccgctgctggcggcgtgggcggagcggttctgcgcgctggagggtgtcaaggggctgatcccggacgtggacaggcttctggagtataccaaggccaggcgggccgtatttggcctgccgccgctccgtccttaggcatagtggacatgtttcttttctttttttttcttttttaaaaaattatatgttctatgtttgtttgaaataaagtactgttatggtgttacacatgtattccaacgtcaactctacgtgctgctatttggc

SEQ ID NO: 6113 - protein, 232 aa, Zea mays subsp. mays
  peptide (1)..(232): Ceres Seq. ID no. 12402557
MAGKELTLLGLWASPFVLRARIALSLKGLTYAYSEENLDDKSELLLSSNPVLKKVPVLIHHGKPVCESQIIVQYVDEAFPAAAPNFLPSDPYDRAIARFWASYVDDKFYSAWIPVFRGRTAEEMAEAARQAVAALETLEQAFRECSKGKAFFGGDSVGLVDVVLGGLVGWLYATEAICGVKALDAGRTPLLAAWAERFCALEGVKGLIPDVDRLLEYTKARRAVFGLPPLRP

SEQ ID NO: 6114 - DNA, 771 bp, Zea mays subsp. mays
  misc_feature (1)..(771): Ceres Seq. ID no. 12343659
  misc_feature (1)..(771): Ortholog of  Ceres SEQ ID NO 13595022 as cited in SEQ ID NO 51963
  misc_feature (1)..(771): Ortholog of  Ceres SEQ ID NO 15178123 as cited in SEQ ID NO 52030
  misc_feature (1)..(771): Ortholog of  Ceres SEQ ID NO 14302532 as cited in SEQ ID NO 56531
  misc_feature (1)..(771): Ortholog of  Ceres SEQ ID NO 13598382 as cited in SEQ ID NO 62325
  misc_feature (1)..(771): Ortholog of  Ceres SEQ ID NO 15173967 as cited in SEQ ID NO 63578
  misc_feature (1)..(771): Ortholog of  Ceres SEQ ID NO 13591023 as cited in SEQ ID NO 67961
  misc_feature (1)..(771): Ortholog of  Ceres SEQ ID NO 12637935 as cited in SEQ ID NO 0
acctgcgcattttgtaaaggtacgaggagctaggtgaggcaccaccaccaaccgggctccgactccgagttcatcacgcacgcatggaaggctcggcggcacaggcgccggggaagaccgtcctgagggtggtggcgatctccggctcgctgcgcagggcgtcggccaacaccggcctcatccgcgccgccgcggagatctgcagggagtcgatcccggggctggaggtggagcacgtggacatctcggagctgccgctgctgaacaccgacctggagggcccgggccccggcgcgttcccggcggccgtcgaggcgttccgcggcaaggtgcgcgccgccgactgcttcctgttcgcgtcgcccgagtacaactactccatctcgggcccgctgaagaacgcgctggactgggggtcgcgcccgcccaactgctggggcgacagggccgccgccatcctcagcgcgtcgggcgggtcggggggcagccgctcgcagtaccacgtccgccaggtcggcgttttcctcgacctccacttcgtcaacaagcccgaggtgttcaccagggcgcaccagccgcccagaaagttcgaccacgacggcaacctcgtcgacccggacaccaaggaccaggtcaccaaggtgctcctggcgctgcaggctctcgcgctcaggctgcagctggggaagctcgctgttgctgcacactcttcttgaacgtcgtcgtcgtcgggggtgcactaaactacactacacatcgtcgccgagctcc

SEQ ID NO: 6115 - protein, 210 aa, Zea mays subsp. mays
  peptide (1)..(210): Ceres Seq. ID no. 12343660
MEGSAAQAPGKTVLRVVAISGSLRRASANTGLIRAAAEICRESIPGLEVEHVDISELPLLNTDLEGPGPGAFPAAVEAFRGKVRAADCFLFASPEYNYSISGPLKNALDWGSRPPNCWGDRAAAILSASGGSGGSRSQYHVRQVGVFLDLHFVNKPEVFTRAHQPPRKFDHDGNLVDPDTKDQVTKVLLALQALALRLQLGKLAVAAHSS

SEQ ID NO: 6116 - DNA, 1509 bp, Zea mays subsp. mays
  misc_feature (1)..(1509): Ceres Seq. ID no. 12373608
  misc_feature (1)..(1509): Ortholog of  Ceres SEQ ID NO 13661504 as cited in SEQ ID NO 61294
  misc_feature (1)..(1509): Ortholog of  Ceres SEQ ID NO 12615311 as cited in SEQ ID NO 62517
  misc_feature (1)..(1509): Ortholog of  Ceres SEQ ID NO 12617197 as cited in SEQ ID NO 63406
  misc_feature (1)..(1509): Ortholog of  Ceres SEQ ID NO 13597804 as cited in SEQ ID NO 64182
  misc_feature (1)..(1509): Ortholog of  Ceres SEQ ID NO 13598597 as cited in SEQ ID NO 65496
  misc_feature (1)..(1509): Ortholog of  Ceres SEQ ID NO 13596227 as cited in SEQ ID NO 68750
  misc_feature (1)..(1509): Ortholog of  Ceres SEQ ID NO 15179068 as cited in SEQ ID NO 0
gcacgagaccattacctagaacatcctaatcgaaaattttgcaatccgtatcatcatcttggcctcgtcaatccaccaccaccgtcgtcgctgagctcctcctccggcttcgcttcgcttcgctgtcttgcctcctcctcggtcgaagaagaagaagaaaacatgtgtccgggatccgtggagtcgtcgtcggcggcggcggcgggcaagagcgtgtgcgtgatggacgccgcggggccgctgggccacgcgctcgtggaccgcctcctccggcgcgggtacacagtccacgccgccacgtacgcccgcgacggggaggagggcgcggctgccgccgcgctgctcggccacctgtcgcgcgccgccgacgcgtgcaggcaccggctgaagctgttccgcgccgacccgttcgactaccacgccatcgccgacgccgtgcggggctgcgccggcgtcttctgcatgttcaacacgcccgaggatcaggcccaatgcgatgagtcgacggtggagacggaggtgcgcgcggcgcacaacgtgctggaggcgtgcgcgcagacggacgccatggagcgggtcgtcttcacctcctccgtcaccgccgtcgtctggagcggcgccggcgccggcgtcggcgcccacagggaggaggtcgccgacgagaggagctggagcgacctcgccttctgcaggaagttcaagctgtggcacgccctggccaagacgctgtcggagaagacggcgtgggcgctggccatggaccggggcgtcgacatggtggccatcaacgccggcctgctgctgtccgcccccgggcccgggctcgggctcaccgccgcgcacccctacctcaagggcgcccccgacatgtacgacggcggcgtcctcgccaccgtcgacgtcggcttcctggccgacgcgcacgtcgccgcctacgagtcccccaccgcctacggccgctacctctgcttcagcgacgccgtctgccgtcccgaggacgccgtcaagctcgcccagatgctctcgccggccgcgccacgctcgccgccgccaagcgacgaactgaaggtgataccacagaggatccagggcaagaaactgaacaagctcatgctggagttcgccagcggggtatacggggagctggactaggaaggaactgccaggccacagatgatgcgatgcgactagggctgttgtattcttttgtacgtagtactatttgtagttttcgcccccctcacaaaaaaaaggagggaaatctgtttggttggccaaaatgtgccatacgctcgctgtacatggccaaacacgccacgtgtgtagcccctgccagcagcaggggtgggtggggagagcatttcagtgatcggttgccaaagaaataccatatcgtatctaggttcgtgagttacatcccatgcatgtgttacgtgacgcttatattgaactctgacaaacttgtagcgcacaattacaaacatgattacggaagaatcgtttcagggt

SEQ ID NO: 6117 - protein, 383 aa, Zea mays subsp. mays
  peptide (1)..(383): Ceres Seq. ID no. 12373609
ARDHYLEHPNRKFCNPYHHLGLVNPPPPSSLSSSSGFASLRCLASSSVEEEEENMCPGSVESSSAAAAGKSVCVMDAAGPLGHALVDRLLRRGYTVHAATYARDGEEGAAAAALLGHLSRAADACRHRLKLFRADPFDYHAIADAVRGCAGVFCMFNTPEDQAQCDESTVETEVRAAHNVLEACAQTDAMERVVFTSSVTAVVWSGAGAGVGAHREEVADERSWSDLAFCRKFKLWHALAKTLSEKTAWALAMDRGVDMVAINAGLLLSAPGPGLGLTAAHPYLKGAPDMYDGGVLATVDVGFLADAHVAAYESPTAYGRYLCFSDAVCRPEDAVKLAQMLSPAAPRSPPPSDELKVIPQRIQGKKLNKLMLEFASGVYGELD

SEQ ID NO: 6118 - protein, 329 aa, Zea mays subsp. mays
  peptide (1)..(329): Ceres Seq. ID no. 12373610
MCPGSVESSSAAAAGKSVCVMDAAGPLGHALVDRLLRRGYTVHAATYARDGEEGAAAAALLGHLSRAADACRHRLKLFRADPFDYHAIADAVRGCAGVFCMFNTPEDQAQCDESTVETEVRAAHNVLEACAQTDAMERVVFTSSVTAVVWSGAGAGVGAHREEVADERSWSDLAFCRKFKLWHALAKTLSEKTAWALAMDRGVDMVAINAGLLLSAPGPGLGLTAAHPYLKGAPDMYDGGVLATVDVGFLADAHVAAYESPTAYGRYLCFSDAVCRPEDAVKLAQMLSPAAPRSPPPSDELKVIPQRIQGKKLNKLMLEFASGVYGELD

SEQ ID NO: 6119 - protein, 309 aa, Zea mays subsp. mays
  peptide (1)..(309): Ceres Seq. ID no. 12373611
MDAAGPLGHALVDRLLRRGYTVHAATYARDGEEGAAAAALLGHLSRAADACRHRLKLFRADPFDYHAIADAVRGCAGVFCMFNTPEDQAQCDESTVETEVRAAHNVLEACAQTDAMERVVFTSSVTAVVWSGAGAGVGAHREEVADERSWSDLAFCRKFKLWHALAKTLSEKTAWALAMDRGVDMVAINAGLLLSAPGPGLGLTAAHPYLKGAPDMYDGGVLATVDVGFLADAHVAAYESPTAYGRYLCFSDAVCRPEDAVKLAQMLSPAAPRSPPPSDELKVIPQRIQGKKLNKLMLEFASGVYGELD

SEQ ID NO: 6120 - DNA, 1574 bp, Zea mays subsp. mays
  misc_feature (1)..(1574): Ceres Seq. ID no. 12367619
  misc_feature (1)..(1574): Ortholog of  Ceres SEQ ID NO 14315440 as cited in SEQ ID NO 57161
agaggcacagtgacagacagagagagagcgcgcgcggggggagcccagcacagcacctacactagctagccaccaccaccaccaccaccgaccgaatcgggtgcgcgcggcgcgctgctcgtcagctccggccggccgcccggccgctttataaagccacccacccagccccgcccgatcgccatcgccatacccccgcctccgtccacggacacacacccgccttgccagccggcaccctcccggcctcccccacctgtgtcctccggcctcgccgccgcaaaacccgccgcgcaggccggttgctccgattgggagtgccaatcggagccaacagcgagggaagcacatgctgccgttcgtcctagagttcctcattgatgtcgcctgtgatcagtgagatcctcctctcggggtttatgatcaactccacactccggcgccgcacccacctggtccagtccttctccgtcgtcttcctctactggttctatgtcttctcatgaactactcgcccccatcatagccacgcccctcctctcccactcctcctcctcctctttcccttccatctagtagcatctaccgtcctcctcttctctccgtgtcagtctctgccttcgtcgtcgccgtttcagtcgtttcctaaaccttctttagcttgcatgcacttccctactgctgctagcaaagacctttattagtagtgtcaattaagttacgaaagaagaagaaagaaagaaaatttcgaggccgagaaaaaagacggctttgatctctctgctagtgtggtgtggtagtgtgtgcttctagtaagtaagcgagccagggatcaagaagcagagagctgctttgtctcttttgtctcttgcaagaatggcttcctccagcgggagcgggagctcgggctccctctcggcggcaacggcggccctggccgccgcggcgggcacggaggaggagctgcgcgcgctcatggagcagcgccgcgcgaagcggatgctgtccaaccgcgagtccgcgcggcggtcgcggatgcgcaagcagcgccacctcgacgagctgaccgcgcaggcggcgcacctgcgccgcgagaacgcgcacgtggccaccgcgctcggcctcaccgcgcagggcctcctcgccgtggacgccgagaacgccgtcctccgcacccaggccgccgagctcgccgcgcgcctcggctccctcaacgacatcctcgcctgcatgaacaccaacgccgtcggcgccgtcgccgtcttcctcacagccgccgccgccgccgccgccgcttcctccgacccctgcctcgccttcgacggcgccaccgccctggacgacctcctcagatcctgccccgagaacatgttccagtaccagctctgctagctccagaccgcgcgaagtcaccatggcagcgcaaaacaccttcttttcttttcttttgttttttttttttttttcttcttcttcttctggtgtttcaggtttagtaatctgctagtgagatggaagaactgaggtcagatcagacgtggtggtgactagccatgaaagtgaactttactgtt

SEQ ID NO: 6121 - protein, 171 aa, Zea mays subsp. mays
  peptide (1)..(171): Ceres Seq. ID no. 12367620
MASSSGSGSSGSLSAATAALAAAAGTEEELRALMEQRRAKRMLSNRESARRSRMRKQRHLDELTAQAAHLRRENAHVATALGLTAQGLLAVDAENAVLRTQAAELAARLGSLNDILACMNTNAVGAVAVFLTAAAAAAAASSDPCLAFDGATALDDLLRSCPENMFQYQLC

SEQ ID NO: 6122 - protein, 138 aa, Zea mays subsp. mays
  peptide (1)..(138): Ceres Seq. ID no. 12367621
MEQRRAKRMLSNRESARRSRMRKQRHLDELTAQAAHLRRENAHVATALGLTAQGLLAVDAENAVLRTQAAELAARLGSLNDILACMNTNAVGAVAVFLTAAAAAAAASSDPCLAFDGATALDDLLRSCPENMFQYQLC

SEQ ID NO: 6123 - protein, 130 aa, Zea mays subsp. mays
  peptide (1)..(130): Ceres Seq. ID no. 12367622
MLSNRESARRSRMRKQRHLDELTAQAAHLRRENAHVATALGLTAQGLLAVDAENAVLRTQAAELAARLGSLNDILACMNTNAVGAVAVFLTAAAAAAAASSDPCLAFDGATALDDLLRSCPENMFQYQLC

SEQ ID NO: 6124 - DNA, 1466 bp, Zea mays subsp. mays
  misc_feature (1)..(1466): Ceres Seq. ID no. 13577847
  misc_feature (1)..(1466): Ortholog of  Ceres SEQ ID NO 15168580 as cited in SEQ ID NO 60279
atgtaaaaccgtccgacgcgagccccacctccgcgctcgcacgcggaaggagagggacgagcgagccaccgtcaccgagcgcggttacaagaaaatccaatctctcccccacgctcgtttcgactcgcgccatggaggcgcaggcgcaggacaatagggcggaggatggggacggcgcgcggcaacacgtagccggcggcgtcgcggcgacggggatggctatgggcgcgatccccatgcacgggttcatggtcccgaagccagagccggtggagttcttcggcgggatggccgtggtgcggagcaagccgccgccgcggaaccgcgaccggcacaccaaggtggaggggcgggggcggcggatccgcatgcccgcggcgtgcgcggccaggatcttccagctgacgcgggagctagggcacaagtccgacggcgagaccatccggtggctgctgcagcagtcggagcccgccatcatcgccgccaccggcaccggcacggtcccggcgatcgcgaccacggtcgacggcgtgctccgcatccccacgcagtcctcgtcgtcctccagcccctcgtccctcaccaccgtggtcgacggcgacgaggcgtccgccaagcgccgccgcaagctgcagccgacgcgagcggccgccggcgcgtccccgctcgccaccgccgcgcccgcggcgtactacccggtcctcgccgacccgctcctgcagggcaccggtggagcggccatctcggtgccgagcggcctcgcccccatcgccgcgtcgggcgcccctcaagggctcgtcccggtcttcgcggtccctgcggccggcagccccggcggcggcaaccgcatgattccgcaggccaccgccgtgtggatggtgccccagcctggcgccgcggccgcccagcccacgcaattctgggccatccagcccgcgccgcagctcatcaacctcggcggcgcgcaggccgccgtgttccccgcggcggtgaacgtcgccgacttccagggccagcagcccatctctagcttgtctcacaacagcaactcggagcatctgcacctggggtccgggtcccacgagcagcagcgcggcggtcgcagcgacgtcaaccatccggaggaggaagaagacgacgacgacgacgacgagccggtgtccgactccagcccagaagagtaacgcaccnccgtacccccagaaagtccaaccccaaagcttaggttccttttgctctaatttaatcgccccccctcgttttcccccttttcgcaatcctccttatgatgaactacatgatgctttctgtcgtagctcacgttcagttcagtgacccccagtgttagtggtagagagaagaagatgatgatnaaagaggtagtggaactgtanaagcagcgtgtaatgcaaatcaaaacgagcagctgatttgttattgagttaattaattgacgaccttttgcc

SEQ ID NO: 6125 - protein, 393 aa, Zea mays subsp. mays
  peptide (1)..(393): Ceres Seq. ID no. 13577848
VKPSDASPTSALARGRRGTSEPPSPSAVTRKSNLSPTLVSTRAMEAQAQDNRAEDGDGARQHVAGGVAATGMAMGAIPMHGFMVPKPEPVEFFGGMAVVRSKPPPRNRDRHTKVEGRGRRIRMPAACAARIFQLTRELGHKSDGETIRWLLQQSEPAIIAATGTGTVPAIATTVDGVLRIPTQSSSSSSPSSLTTVVDGDEASAKRRRKLQPTRAAAGASPLATAAPAAYYPVLADPLLQGTGGAAISVPSGLAPIAASGAPQGLVPVFAVPAAGSPGGGNRMIPQATAVWMVPQPGAAAAQPTQFWAIQPAPQLINLGGAQAAVFPAAVNVADFQGQQPISSLSHNSNSEHLHLGSGSHEQQRGGRSDVNHPEEEEDDDDDDEPVSDSSPEE

SEQ ID NO: 6126 - protein, 350 aa, Zea mays subsp. mays
  peptide (1)..(350): Ceres Seq. ID no. 13577849
MEAQAQDNRAEDGDGARQHVAGGVAATGMAMGAIPMHGFMVPKPEPVEFFGGMAVVRSKPPPRNRDRHTKVEGRGRRIRMPAACAARIFQLTRELGHKSDGETIRWLLQQSEPAIIAATGTGTVPAIATTVDGVLRIPTQSSSSSSPSSLTTVVDGDEASAKRRRKLQPTRAAAGASPLATAAPAAYYPVLADPLLQGTGGAAISVPSGLAPIAASGAPQGLVPVFAVPAAGSPGGGNRMIPQATAVWMVPQPGAAAAQPTQFWAIQPAPQLINLGGAQAAVFPAAVNVADFQGQQPISSLSHNSNSEHLHLGSGSHEQQRGGRSDVNHPEEEEDDDDDDEPVSDSSPEE

SEQ ID NO: 6127 - protein, 322 aa, Zea mays subsp. mays
  peptide (1)..(322): Ceres Seq. ID no. 13577850
MAMGAIPMHGFMVPKPEPVEFFGGMAVVRSKPPPRNRDRHTKVEGRGRRIRMPAACAARIFQLTRELGHKSDGETIRWLLQQSEPAIIAATGTGTVPAIATTVDGVLRIPTQSSSSSSPSSLTTVVDGDEASAKRRRKLQPTRAAAGASPLATAAPAAYYPVLADPLLQGTGGAAISVPSGLAPIAASGAPQGLVPVFAVPAAGSPGGGNRMIPQATAVWMVPQPGAAAAQPTQFWAIQPAPQLINLGGAQAAVFPAAVNVADFQGQQPISSLSHNSNSEHLHLGSGSHEQQRGGRSDVNHPEEEEDDDDDDEPVSDSSPEE

SEQ ID NO: 6128 - DNA, 1633 bp, Zea mays subsp. mays
  misc_feature (1)..(1633): Ceres Seq. ID no. 12373222
  misc_feature (1)..(1633): Ortholog of  Ceres SEQ ID NO 14315063 as cited in SEQ ID NO 52256
  misc_feature (1)..(1633): Ortholog of  Ceres SEQ ID NO 14310736 as cited in SEQ ID NO 52901
  misc_feature (1)..(1633): Ortholog of  Ceres SEQ ID NO 15172325 as cited in SEQ ID NO 54668
  misc_feature (1)..(1633): Ortholog of  Ceres SEQ ID NO 13594345 as cited in SEQ ID NO 58043
  misc_feature (1)..(1633): Ortholog of  Ceres SEQ ID NO 14308594 as cited in SEQ ID NO 60384
  misc_feature (1)..(1633): Ortholog of  Ceres SEQ ID NO 14302832 as cited in SEQ ID NO 64926
  misc_feature (1)..(1633): Ortholog of  Ceres SEQ ID NO 13662880 as cited in SEQ ID NO 65422
  misc_feature (1)..(1633): Ortholog of  Ceres SEQ ID NO 14302071 as cited in SEQ ID NO 66585
  misc_feature (1)..(1633): Ortholog of  Ceres SEQ ID NO 12779098 as cited in SEQ ID NO 67698
  misc_feature (1)..(1633): Ortholog of  Ceres SEQ ID NO 13596089 as cited in SEQ ID NO 68373
atcaagcgtgcaaggtctcaatctcgcggtaatggcgaggccacacgtcgtggttgtgccgtacccatgctccggcaacatcaacccagcgctgcagatcgccaggctgctccaccgccacggcgtctacgtcaccttcgtcaacaccgagcacaaccaccggcgcgtgcaggccaccgagggcgccggagccgtgcgcggcggggaggggttccgcttcgaggcaatcccggacggcctgtccgaggccgagcggggcaagcaggactacgggcgcagcctggctgtgtccacgagcacgcgctgcgctgcgccgctcagggacctcatcgcgcggctcaacggcacgccgggcgtgccgccggtcacctgcgtgctgcccaccatgctgatgagcttcgcgctgggcgtggcgcgggagctcgggatcccgaccatgtcgttctggacggccagcgcggcctcgctgatgacgcacatgaggctccgcgagctgcaggaaagagggtacgtgccactcaaggatgagagtttcttgacgaacggctacctcgagacgacggtcatcgactggatccccggggtgccgccgatccgcctcggcgacttctcgagcttcctccgcaccaccgacccggacgacttcggtctgcgcttcaacgagtcggaggcgaacagctgcgccaaggccggcgccctcatcctcaacaccttagacggcctcgaggccgacgtgctcgccgcgctgcgcgccgagtacccgcgcgtgtacaccgtcgggcccctgggcctgctcctcagccaggacgacgaccgagacagcagcgcctccgccagcggcagcaccgagtcgaccggcctgagcctgtggaagaaggacgccgagtgcctcgcctggctggacgcgcaagagcggggctccgtcgtgtacgtcaacttcggcagccacacggtggtgacgccggagcagctgaacgagttcgcgtggggcctcgcggcgagcggccaccggttcctctggtccatgagggacaacctcgtccgcggcggcggcggcgccggcgccggcctggacgcgatgccctcgaccttcaaggctgagacggcggggcggtgccacgtggccgcgtggtgtccccaggagcaggtgctgcggcacccggccgtcggctgcttcctgacccacagcggatggaactcgacgtgcgagagtctggccgccggcgtgcccatggtgtgctggccgggcttctcggaccagtacaccaactgcaagtacagctgcgaggtctggggtgtcggcgtccggctggaggcaacggtggagagggagcaggtcgccatgcacgtcaggaaggtgatggcaagcgaggagatgcggaagagcgcggccaagtggaaggaggaggcggaggctgcggccggccccggcggttcgtcacgcgagaacctgctgagcatggtgagagcgctcagccccgcacccaactcgtcagatgcagaagagcccaaagataagtagtcacactagaacggaatctaatgaagcaattgttcatgatcgacgccagtaaagtttgtgttcagttgattgattttctgtgagtaaattggagtagcggtcctcagccgg

SEQ ID NO: 6129 - protein, 506 aa, Zea mays subsp. mays
  peptide (1)..(506): Ceres Seq. ID no. 12373223
SSVQGLNLAVMARPHVVVVPYPCSGNINPALQIARLLHRHGVYVTFVNTEHNHRRVQATEGAGAVRGGEGFRFEAIPDGLSEAERGKQDYGRSLAVSTSTRCAAPLRDLIARLNGTPGVPPVTCVLPTMLMSFALGVARELGIPTMSFWTASAASLMTHMRLRELQERGYVPLKDESFLTNGYLETTVIDWIPGVPPIRLGDFSSFLRTTDPDDFGLRFNESEANSCAKAGALILNTLDGLEADVLAALRAEYPRVYTVGPLGLLLSQDDDRDSSASASGSTESTGLSLWKKDAECLAWLDAQERGSVVYVNFGSHTVVTPEQLNEFAWGLAASGHRFLWSMRDNLVRGGGGAGAGLDAMPSTFKAETAGRCHVAAWCPQEQVLRHPAVGCFLTHSGWNSTCESLAAGVPMVCWPGFSDQYTNCKYSCEVWGVGVRLEATVEREQVAMHVRKVMASEEMRKSAAKWKEEAEAAAGPGGSSRENLLSMVRALSPAPNSSDAEEPKDK

SEQ ID NO: 6130 - protein, 496 aa, Zea mays subsp. mays
  peptide (1)..(496): Ceres Seq. ID no. 12373224
MARPHVVVVPYPCSGNINPALQIARLLHRHGVYVTFVNTEHNHRRVQATEGAGAVRGGEGFRFEAIPDGLSEAERGKQDYGRSLAVSTSTRCAAPLRDLIARLNGTPGVPPVTCVLPTMLMSFALGVARELGIPTMSFWTASAASLMTHMRLRELQERGYVPLKDESFLTNGYLETTVIDWIPGVPPIRLGDFSSFLRTTDPDDFGLRFNESEANSCAKAGALILNTLDGLEADVLAALRAEYPRVYTVGPLGLLLSQDDDRDSSASASGSTESTGLSLWKKDAECLAWLDAQERGSVVYVNFGSHTVVTPEQLNEFAWGLAASGHRFLWSMRDNLVRGGGGAGAGLDAMPSTFKAETAGRCHVAAWCPQEQVLRHPAVGCFLTHSGWNSTCESLAAGVPMVCWPGFSDQYTNCKYSCEVWGVGVRLEATVEREQVAMHVRKVMASEEMRKSAAKWKEEAEAAAGPGGSSRENLLSMVRALSPAPNSSDAEEPKDK

SEQ ID NO: 6131 - protein, 378 aa, Zea mays subsp. mays
  peptide (1)..(378): Ceres Seq. ID no. 12373225
MLMSFALGVARELGIPTMSFWTASAASLMTHMRLRELQERGYVPLKDESFLTNGYLETTVIDWIPGVPPIRLGDFSSFLRTTDPDDFGLRFNESEANSCAKAGALILNTLDGLEADVLAALRAEYPRVYTVGPLGLLLSQDDDRDSSASASGSTESTGLSLWKKDAECLAWLDAQERGSVVYVNFGSHTVVTPEQLNEFAWGLAASGHRFLWSMRDNLVRGGGGAGAGLDAMPSTFKAETAGRCHVAAWCPQEQVLRHPAVGCFLTHSGWNSTCESLAAGVPMVCWPGFSDQYTNCKYSCEVWGVGVRLEATVEREQVAMHVRKVMASEEMRKSAAKWKEEAEAAAGPGGSSRENLLSMVRALSPAPNSSDAEEPKDK

SEQ ID NO: 6132 - DNA, 1318 bp, Zea mays subsp. mays
  misc_feature (1)..(1318): Ceres Seq. ID no. 12349119
  misc_feature (1)..(1318): Ortholog of  Ceres SEQ ID NO 14316404 as cited in SEQ ID NO 57641
  misc_feature (1)..(1318): Ortholog of  Ceres SEQ ID NO 14308575 as cited in SEQ ID NO 58782
  misc_feature (1)..(1318): Ortholog of  Ceres SEQ ID NO 12611159 as cited in SEQ ID NO 59821
  misc_feature (1)..(1318): Ortholog of  Ceres SEQ ID NO 15180029 as cited in SEQ ID NO 0
gagacgcacacgggcagtgacacgcgcgcataccgacggacttggtagctgctcaccagctatccagatcattggctcattgctgcttccattccattccccccctcggcatcggccgcgcccgcccgtgtcgggcggaggcggacgcgcgcgggaatgggacgccacgcggcctccggcggcggcgtgcagcagaagctgcgcaagggcctctggtcgcccgaggaagacgagaagctctacaaccacatcatccgctacggggtcgggtgctggagctccgtgcccaagctcgcagggctgcagaggtgcggcaagagctgccggcttcggtggatcaactacctacgccccgacctgaagcggggcagcttctcgcagcaggaggaggacgcgatcgtcggcctccaccagatcctggggaacaggtggtcgcagatcgcgtcgcacttgccgggccggacggataacgagatcaagaacttctggaacagctgcctcaagaagaagctgcgtcagcgcggcatcgaccccagcacccacaagcccgcggtctccgccaacgtgccggcggcatcggagcagccggcgtcgaaggaccgcaagccgtttgccacagccgccgctgatggcggctccgacatgaagcaccagcaggtgttcgacccgttcccgctgaccgacagcttcggcggcggcttcggcgccgcactgtacggccacacgggcggcaagcaggacgcggccgcgttcgtggactacagcagcgtgctggacgtgtcggagaacctgggctacggcggcgagagctccagcaacagcagcaactggaactgcgcgccggaggtgcacaacaatgcggtcgacggcgacgcgccgctgcactgggcctccgagagcaaggccacgcccttcgccggctacggcggcgaggagcaatcactcctcgggcacaggttctcgctgccctgccacggccagcaggagcagagccctccgcgttttgacttcgacatcggccggggcgccgtggtcggcgagttcagcctcgagttcttctgaaggtccagcttgggaatttcagcaatctagataccgcgtagcgcgtatatatatactgtgtattaaaggcatttcacacggaacaacaattgagagatcgtgcttcgttaatttcctctagtcgaccttactccttaacaatgtcttgcgtttcttttgttttttttatgttttatgtatgtctaaaataaaggcatagacatatatatgtaaacacggtgtagtgtaatagctatacattaaagtttttgtatgc

SEQ ID NO: 6133 - protein, 301 aa, Zea mays subsp. mays
  peptide (1)..(301): Ceres Seq. ID no. 12349120
MGRHAASGGGVQQKLRKGLWSPEEDEKLYNHIIRYGVGCWSSVPKLAGLQRCGKSCRLRWINYLRPDLKRGSFSQQEEDAIVGLHQILGNRWSQIASHLPGRTDNEIKNFWNSCLKKKLRQRGIDPSTHKPAVSANVPAASEQPASKDRKPFATAAADGGSDMKHQQVFDPFPLTDSFGGGFGAALYGHTGGKQDAAAFVDYSSVLDVSENLGYGGESSSNSSNWNCAPEVHNNAVDGDAPLHWASESKATPFAGYGGEEQSLLGHRFSLPCHGQQEQSPPRFDFDIGRGAVVGEFSLEFF

SEQ ID NO: 6134 - DNA, 1005 bp, Zea mays subsp. mays
  misc_feature (1)..(1005): Ceres Seq. ID no. 12401368
  misc_feature (1)..(1005): Ortholog of  Ceres SEQ ID NO 15173624 as cited in SEQ ID NO 60470
actcactcactcgcatcactgactgactggactgctgctcactccttccttcccctggcagagaatctgcagtgcttgccggccggccctgcagagcgcggggatctgcaggcatcatggtgcaatcaaagaagaagttccgcggcgtcaggcagcgccactggggctcctgggtctccgagatcaggcacccgctgcttaagaggagggtgtggctggctcaccttcgagacggcagaggaggcggcgcgggcgtacgacgaggccgccgtcctcatgagcggccgcaacgccaagaccaacttccccgtgccaaggagcggcaccggggagctgctggcccctgcagtgccggccgcacggggaggcgcgtggtggcggtggcggcggcaccagcctgtcgcagatcctcagcgccaagctccgcaggtgctgcaagacgccgtcgccgtcgctcacctgcctccgcctcgacccggagaagtcccacattggcgtctggcagaagcgcgccggcgcgcgcgccgactccagctgggtcatgaccgtcgagctcaacaaggacgcgccgccgccaccgtcctccggcgaggagccggcgcccagctacggcggcgcggccaccacgtccacgtccacgcccacgtcgtccactatcacggccggctcgcctccacctgagatgatggacgacgaggagagtgttgcgctgcagatgatcgaggagctgctgggatcacatgggatgatgctccaggtccagggtgcagcaggcagcctcgtcatctgaaggaaaccgcatggttcaacaagctattatgatatgatcaggacatcatcatcaggtcactgtcccagatcagaccaagcagttaagattgcatcatatatataatataggtacacctctattactacatcaagcttaggaaaaaaccatatagtaagatgaatcactactgtgtgaagctctgtaattatatatattaaaggcttttacttgtg

SEQ ID NO: 6135 - protein, 226 aa, Zea mays subsp. mays
  peptide (1)..(226): Ceres Seq. ID no. 12401369
THSLASLTDWTAAHSFLPLAENLQCLPAGPAERGDLQASWCNQRRSSAASGSATGAPGSPRSGTRCLRGGCGWLTFETAEEAARAYDEAAVLMSGRNAKTNFPVPRSGTGELLAPAVPAARGGAWWRWRRHQPVADPQRQAPQVLQDAVAVAHLPPPRPGEVPHWRLAEARRRARRLQLGHDRRAQQGRAAATVLRRGAGAQLRRRGHHVHVHAHVVHYHGRLAST

SEQ ID NO: 6136 - protein, 142 aa, Zea mays subsp. mays
  peptide (1)..(142): Ceres Seq. ID no. 12401370
MVQSKKKFRGVRQRHWGSWVSEIRHPLLKRRVWLAHLRDGRGGGAGVRRGRRPHERPQRQDQLPRAKERHRGAAGPCSAGRTGRRVVAVAAAPACRRSSAPSSAGAARRRRRRSPASASTRRSPTLASGRSAPARAPTPAGS

SEQ ID NO: 6137 - protein, 134 aa, Zea mays subsp. mays
  peptide (1)..(134): Ceres Seq. ID no. 12401371
MSGRNAKTNFPVPRSGTGELLAPAVPAARGGAWWRWRRHQPVADPQRQAPQVLQDAVAVAHLPPPRPGEVPHWRLAEARRRARRLQLGHDRRAQQGRAAATVLRRGAGAQLRRRGHHVHVHAHVVHYHGRLAST

SEQ ID NO: 6138 - DNA, 802 bp, Zea mays subsp. mays
  misc_feature (1)..(802): Ceres Seq. ID no. 12403537
  misc_feature (1)..(802): Ortholog of  Ceres SEQ ID NO 13595067 as cited in SEQ ID NO 55857
atacctgaaacttcactgcctttttgtcaggcacgctggtcaggaaatcagtagcctgttttggctgctgttgctaatcagttgggagagggggagatggccaggaggaacatcggagtcgcagtggacttctcgtcgtgcagcaaagcggctttgcggtgggcgtcgacgaaccttgcgaggaacggcgacaggctcatactcatccacgtgaacagctcctgccagaacgagcggggcgccgttcatctctgggagcagagcggttccccattgatccctctggccgagttttcagacgtcgccaggacatacggtgtgtcaccggacaaggagacgatcgagatcctcactcaagcggcaaatcatagagggatcgaagtctttgcaaaggtgttctacggcgacccggcaaagaagctgtacgaagcagccgacatggtcccgcttagctgcatggtggtcgggagcagaggactaagcacgctcaagagggctctgatggggagcgtgagcacgtatgttgtgaaccacgcggcctgccccgtgacggttgtgaaggagatggtgtagcgtgttgaacaccgctggttacaagcttcaccctagccagattgaataagcgtgcttgataagcactgatcaggggggatcttgctacttatacgacattttgtgcttgaaatttgggtaactaggaccgggcagaacatatctatgtcttgggctcatggcactgacatctgaacatatgccctaagtctgttgtaatcgcaaaatatttttgcttataaaatcagtt

SEQ ID NO: 6139 - protein, 158 aa, Zea mays subsp. mays
  peptide (1)..(158): Ceres Seq. ID no. 12403538
MARRNIGVAVDFSSCSKAALRWASTNLARNGDRLILIHVNSSCQNERGAVHLWEQSGSPLIPLAEFSDVARTYGVSPDKETIEILTQAANHRGIEVFAKVFYGDPAKKLYEAADMVPLSCMVVGSRGLSTLKRALMGSVSTYVVNHAACPVTVVKEMV

SEQ ID NO: 6140 - DNA, 832 bp, Zea mays subsp. mays; identical to SEQ ID NO: 4008
  misc_feature (1)..(832): Ceres Seq. ID no. 12366950
  misc_feature (1)..(832): Ortholog of  Ceres SEQ ID NO 13587131 as cited in SEQ ID NO 331
  misc_feature (1)..(832): Ortholog of  Ceres SEQ ID NO 13661176 as cited in SEQ ID NO 61114

SEQ ID NO: 6141 - protein, 161 aa, Zea mays subsp. mays; identical to SEQ ID NO: 1700
  peptide (1)..(161): Ceres Seq. ID no. 12366951

SEQ ID NO: 6142 - protein, 106 aa, Zea mays subsp. mays; identical to SEQ ID NO: 1701
  peptide (1)..(106): Ceres Seq. ID no. 12366952

SEQ ID NO: 6143 - DNA, 1256 bp, Zea mays subsp. mays
  misc_feature (1)..(1256): Ceres Seq. ID no. 12405546
  misc_feature (1)..(1256): Ortholog of  Ceres SEQ ID NO 14315989 as cited in SEQ ID NO 57571
aatcttcttcttcctccttcagtcacccggcctgtcgtgtcgatctcactctcagggtccggtccggtccggtgcatcatatatacccttggtcgatcgatcgaccagatagatacactagatagctaggattgcattgtgttccaccaaaagccagccacaacacatcgacatgatgcaggacttgttctcggtcccttcgtgtttctcggcgggcgagaagcttccggacgtcccggcgtccgctgcggccaccaccaggtccgggcagagcgcggcgacgctggtctaccgcgcgggaatcgccggccacgaccgcctggtgacggtgacgtggtgcaggaacctgctcacccacgggctgaccgtgtcgatcgaagggtcggcgggcggcggcaaggacaagagcggcggcggcagggagtggggcgacgccgacggtggcgcggcctcgtcctccaacaagggctgcagcaccgcctgcaaggtggagatgcagccgtggcacttttggcgcaagtacggcgccaagcagttccacgtcgacggcagggccgtggacgtggtctgggacctcaggagcgcgaggtactccgacgagcccgagccgctgtccgactactacgtcgccgtggtgtcggacgaggaggtggtcctcctcctcggcaacctcaagaaggaggcgttccggcgcaccgggtcccggccgtcgctgcgggacgccgcactggtgtgcaagaaggagcacgtctttagcaagaagcggttcctcaccaaggccaggttccacgacaggggcaagctgcacgacatcagcatcgagtgcagcagcagcaacctcggcggcggcggcgtcgacgtcgacatggtcatcaagatcgacggctacgtcaacgtcctcgtcaggcacctgcagtggaagttcaggggcaacgagtgcatctccatcaaccagctcaaggtgcaggtgtactgggacgcgcacgactggatctttggcacgggggtgaggaacgcgctgttcatcttcaagcccgagccgctgccgtccgccaccaatgagtactctgatttctgcctgtttctgtacgcatggaagcttgagtgagctaggattcctgttcctgcattatactggacacctcaccatatatgttatgaaccaataattcatacgtatcatgtaactgatggattattgggcgatggaagtgtatgcgaaatgaatgattggggccgttttccctttcccttcc

SEQ ID NO: 6144 - protein, 311 aa, Zea mays subsp. mays
  peptide (1)..(311): Ceres Seq. ID no. 12405547
MMQDLFSVPSCFSAGEKLPDVPASAAATTRSGQSAATLVYRAGIAGHDRLVTVTWCRNLLTHGLTVSIEGSAGGGKDKSGGGREWGDADGGAASSSNKGCSTACKVEMQPWHFWRKYGAKQFHVDGRAVDVVWDLRSARYSDEPEPLSDYYVAVVSDEEVVLLLGNLKKEAFRRTGSRPSLRDAALVCKKEHVFSKKRFLTKARFHDRGKLHDISIECSSSNLGGGGVDVDMVIKIDGYVNVLVRHLQWKFRGNECISINQLKVQVYWDAHDWIFGTGVRNALFIFKPEPLPSATNEYSDFCLFLYAWKLE

SEQ ID NO: 6145 - protein, 310 aa, Zea mays subsp. mays
  peptide (1)..(310): Ceres Seq. ID no. 12405548
MQDLFSVPSCFSAGEKLPDVPASAAATTRSGQSAATLVYRAGIAGHDRLVTVTWCRNLLTHGLTVSIEGSAGGGKDKSGGGREWGDADGGAASSSNKGCSTACKVEMQPWHFWRKYGAKQFHVDGRAVDVVWDLRSARYSDEPEPLSDYYVAVVSDEEVVLLLGNLKKEAFRRTGSRPSLRDAALVCKKEHVFSKKRFLTKARFHDRGKLHDISIECSSSNLGGGGVDVDMVIKIDGYVNVLVRHLQWKFRGNECISINQLKVQVYWDAHDWIFGTGVRNALFIFKPEPLPSATNEYSDFCLFLYAWKLE

SEQ ID NO: 6146 - protein, 204 aa, Zea mays subsp. mays
  peptide (1)..(204): Ceres Seq. ID no. 12405549
MQPWHFWRKYGAKQFHVDGRAVDVVWDLRSARYSDEPEPLSDYYVAVVSDEEVVLLLGNLKKEAFRRTGSRPSLRDAALVCKKEHVFSKKRFLTKARFHDRGKLHDISIECSSSNLGGGGVDVDMVIKIDGYVNVLVRHLQWKFRGNECISINQLKVQVYWDAHDWIFGTGVRNALFIFKPEPLPSATNEYSDFCLFLYAWKLE

SEQ ID NO: 6147 - DNA, 1386 bp, Zea mays subsp. mays
  misc_feature (1)..(1386): Ceres Seq. ID no. 12373219
  misc_feature (1)..(1386): Ortholog of  Ceres SEQ ID NO 14303487 as cited in SEQ ID NO 54521
  misc_feature (1)..(1386): Ortholog of  Ceres SEQ ID NO 14316302 as cited in SEQ ID NO 55232
  misc_feature (1)..(1386): Ortholog of  Ceres SEQ ID NO 14308274 as cited in SEQ ID NO 55597
  misc_feature (1)..(1386): Ortholog of  Ceres SEQ ID NO 13659710 as cited in SEQ ID NO 60808
gcagcggattgcggagtggcattgggttggcagcacgcccctgcacacggtgacacgggccacggcgcggcgcggcgcggcacggggagcgagcgccgagcgagagcaagcaaccgctgtccgccgggccggccacggcgctgccccctgcttcgcgccttcgccggtgcgctcacgcctcacgcaggtgcatgcatcgacctacggtatcctagtctgggatcagaaaagaacacagcaacaacaaagaagaaaggcgcgagcgatggacggtgacgccggaccagagcaacacgggtgcgtgcactacaggaggggatgcaagataagggcgccgtgctgcggcgaggtatttggttgcaggcactgccacaacgaagccaaggactcgctggaggtcagcgtccacgaccgccacgtgcttccccgtcacgacatcaagctggttatctgctctctctgcaacaaagaacaggatgtaagttccctgacgaagcagggacagtgttcttcggccactgttggtgttacctgccacacaccacatgaaaaaaaaacccatctcgtctgtcgacaggtgcagcaagactgtgcgaactgcggagcatgtctcggcaaatacttctgcgcgaaatgcaacctcttcgacgacgatgtgtcgaagaaccaatttcactgcgatgggtgcggcatatgcaggactggtggcgctgagaatttctatcactgtggcagatgtggatgctgctacaccactccgctgaaggattctcaccgctgcgtggacggagctatgcatcacaactgccctgtctgcatggagtatctattcgactcgatgaaagctatcagcgtgctccactgcggacacaccatccacctggaatgcctttacgagatgagagcgcaccagcagttttcatgcccggtgtgcctgaggtctgcctgcaacatgtccgacatctggcaaaagctggatcagcaggttgcagcgtccccgatgccagcgatctaccagaagaagatggtatggatcctttgcaacgactgtggcgtgacgtccaacgtgcagttccacatcttggcgcacaagtgccctggatgcagctcttacaacacccggcagacgaggggcgatccagccgcatgctctagagtctgagagcaaataaaactgcagtactgcactgcacataaactcgtggggttgtgcggtcgatcgataggtagcttgcagggaggaaattaaagactaccattgcgcatggacacgattggtgccggcagttgagtacgtgtattaggcctgtcatatgtagatgtatcatatgcaatgccttcacaaagaagaatttggcgcagcggacagggtttttttttgttgct

SEQ ID NO: 6148 - protein, 386 aa, Zea mays subsp. mays
  peptide (1)..(386): Ceres Seq. ID no. 12373220
QRIAEWHWVGSTPLHTVTRATARRGAARGASAEREQATAVRRAGHGAAPCFAPSPVRSRLTQVHASTYGILVWDQKRTQQQQRRKARAMDGDAGPEQHGCVHYRRGCKIRAPCCGEVFGCRHCHNEAKDSLEVSVHDRHVLPRHDIKLVICSLCNKEQDVSSLTKQGQCSSATVGVTCHTPHEKKTHLVCRQVQQDCANCGACLGKYFCAKCNLFDDDVSKNQFHCDGCGICRTGGAENFYHCGRCGCCYTTPLKDSHRCVDGAMHHNCPVCMEYLFDSMKAISVLHCGHTIHLECLYEMRAHQQFSCPVCLRSACNMSDIWQKLDQQVAASPMPAIYQKKMVWILCNDCGVTSNVQFHILAHKCPGCSSYNTRQTRGDPAACSRV

SEQ ID NO: 6149 - protein, 298 aa, Zea mays subsp. mays
  peptide (1)..(298): Ceres Seq. ID no. 12373221
MDGDAGPEQHGCVHYRRGCKIRAPCCGEVFGCRHCHNEAKDSLEVSVHDRHVLPRHDIKLVICSLCNKEQDVSSLTKQGQCSSATVGVTCHTPHEKKTHLVCRQVQQDCANCGACLGKYFCAKCNLFDDDVSKNQFHCDGCGICRTGGAENFYHCGRCGCCYTTPLKDSHRCVDGAMHHNCPVCMEYLFDSMKAISVLHCGHTIHLECLYEMRAHQQFSCPVCLRSACNMSDIWQKLDQQVAASPMPAIYQKKMVWILCNDCGVTSNVQFHILAHKCPGCSSYNTRQTRGDPAACSRV

SEQ ID NO: 6150 - DNA, 1845 bp, Zea mays subsp. mays; identical to SEQ ID NO: 4056
  misc_feature (1)..(1845): Ceres Seq. ID no. 13492086
  misc_feature (1)..(1845): Ortholog of  Ceres SEQ ID NO 13648081 as cited in SEQ ID NO 165
  misc_feature (1)..(1845): Ortholog of  Ceres SEQ ID NO 15224803 as cited in SEQ ID NO 56572
  misc_feature (1)..(1845): Ortholog of  Ceres SEQ ID NO 14308598 as cited in SEQ ID NO 60416
  misc_feature (1)..(1845): Ortholog of  Ceres SEQ ID NO 13502952 as cited in SEQ ID NO 62271
  misc_feature (1)..(1845): Ortholog of  Ceres SEQ ID NO 13502973 as cited in SEQ ID NO 68052
  misc_feature (1)..(1845): Ortholog of  Ceres SEQ ID NO 13596000 as cited in SEQ ID NO 68188
  misc_feature (1)..(1845): Ortholog of  Ceres SEQ ID NO 15179420 as cited in SEQ ID NO 0

SEQ ID NO: 6151 - protein, 469 aa, Zea mays subsp. mays; identical to SEQ ID NO: 4057
  peptide (1)..(469): Ceres Seq. ID no. 13492087

SEQ ID NO: 6152 - protein, 441 aa, Zea mays subsp. mays; identical to SEQ ID NO: 4058
  peptide (1)..(441): Ceres Seq. ID no. 13492088

SEQ ID NO: 6153 - protein, 425 aa, Zea mays subsp. mays; identical to SEQ ID NO: 4059
  peptide (1)..(425): Ceres Seq. ID no. 13492089

SEQ ID NO: 6154 - DNA, 1382 bp, Zea mays subsp. mays
  misc_feature (1)..(1382): Ceres Seq. ID no. 12409212
  misc_feature (1)..(1382): Ortholog of  Ceres SEQ ID NO 14310460 as cited in SEQ ID NO 55105
  misc_feature (1)..(1382): Ortholog of  Ceres SEQ ID NO 13597740 as cited in SEQ ID NO 64482
  misc_feature (1)..(1382): Ortholog of  Ceres SEQ ID NO 15179888 as cited in SEQ ID NO 66879
  misc_feature (1)..(1382): Ortholog of  Ceres SEQ ID NO 13596056 as cited in SEQ ID NO 68307
  misc_feature (1)..(1382): Ortholog of  Ceres SEQ ID NO 12388689 as cited in SEQ ID NO 0
aaagtggaagtggaatcgagtcaaatcgaccacttctctggcaagcccgcaggccgcagcccctcctccccccaagagccgccgaggctgctccccctagcaaacccgccatggccgagcgcctcgcagcatccgccgccaccctccgcgcctcggccgccaccaccccgttcgcccgccgcgcggcgccggccaaccgcgccttcttctcgccttcgctagctcgcgcgcgcgtcgctctccgcgccgcgccctctccgctcccgcagaaggcgagggtagtgaggtgcgcggctgtggcgatggcgtctgacgcggctcaggtgaaggccgcacgcgaggacatcagggagcttctcaggacgactcactgccaccccatcctggtccgtctaggatggcatgatgctggtacgtatgacaagaatattgaggagtggccacaacgaggtggagctaatggaagtttaagatttgatgttgagttgaaacatggagccaatgctggtctgataaatgctctaaagcttatccaaccaatcaaggacaagtaccctagtatcacttatgcagatttatttcagttggcaagtgctacagcaattgaggaagctggtggcccaaagattccaatgaaatacggacgagttgatgttacaggacctgagcagtgcccccctgaggggaaacttcctgatgctggcccaagttcacctgctgaccacttgagggaggtattctacagaatgggccttaatgacaaggaaattgttgccttgtctggagcacatacacttggaaggtccaggcctgaacggagtggctgggggaaaccagaaacaaaatatactaaaaatggtcctggtgcacctggttggcaatcatggacagttgaatggctgaggtttgataacagttacttcaaggatatcaaaagaaacgagatcaggatcttctggtcctacctacagatgctgctttatttgaggacccaaagttcaaggtctatgcggagaaatatgcagaggaccaagacgcattcttcagagactacgctgaggctcatgctaaactgagcgaattgggtgcgaagttccaaccaccgcagggattctctttggatgattagtgcggcaccagaaccctaaaccctctccttgaaaaggatcaagagggagcatacaattcattgttcttctcatatcatcgtacaagatggactggtccccctttttcatgatgctatatggagtcttctaatttagctagatttctgaaccgagcttgcaaataaaaaagaaccgacacagtggcactacataattttcagagccattgggagaactgacacagtgctatcagatttggttttatcccttcct

SEQ ID NO: 6155 - protein, 357 aa, Zea mays subsp. mays
  peptide (1)..(357): Ceres Seq. ID no. 12409213
SGSGIESNRPLLWQARRPQPLLPPRAAEAAPPSKPAMAERLAASAATLRASAATTPFARRAAPANRAFFSPSLARARVALRAAPSPLPQKARVVRCAAVAMASDAAQVKAAREDIRELLRTTHCHPILVRLGWHDAGTYDKNIEEWPQRGGANGSLRFDVELKHGANAGLINALKLIQPIKDKYPSITYADLFQLASATAIEEAGGPKIPMKYGRVDVTGPEQCPPEGKLPDAGPSSPADHLREVFYRMGLNDKEIVALSGAHTLGRSRPERSGWGKPETKYTKNGPGAPGWQSWTVEWLRFDNSYFKDIKRNEIRIFWSYLQMLLYLRTQSSRSMRRNMQRTKTHSSETTLRLMLN

SEQ ID NO: 6156 - protein, 321 aa, Zea mays subsp. mays
  peptide (1)..(321): Ceres Seq. ID no. 12409214
MAERLAASAATLRASAATTPFARRAAPANRAFFSPSLARARVALRAAPSPLPQKARVVRCAAVAMASDAAQVKAAREDIRELLRTTHCHPILVRLGWHDAGTYDKNIEEWPQRGGANGSLRFDVELKHGANAGLINALKLIQPIKDKYPSITYADLFQLASATAIEEAGGPKIPMKYGRVDVTGPEQCPPEGKLPDAGPSSPADHLREVFYRMGLNDKEIVALSGAHTLGRSRPERSGWGKPETKYTKNGPGAPGWQSWTVEWLRFDNSYFKDIKRNEIRIFWSYLQMLLYLRTQSSRSMRRNMQRTKTHSSETTLRLMLN

SEQ ID NO: 6157 - protein, 257 aa, Zea mays subsp. mays
  peptide (1)..(257): Ceres Seq. ID no. 12409215
MASDAAQVKAAREDIRELLRTTHCHPILVRLGWHDAGTYDKNIEEWPQRGGANGSLRFDVELKHGANAGLINALKLIQPIKDKYPSITYADLFQLASATAIEEAGGPKIPMKYGRVDVTGPEQCPPEGKLPDAGPSSPADHLREVFYRMGLNDKEIVALSGAHTLGRSRPERSGWGKPETKYTKNGPGAPGWQSWTVEWLRFDNSYFKDIKRNEIRIFWSYLQMLLYLRTQSSRSMRRNMQRTKTHSSETTLRLMLN

SEQ ID NO: 6158 - DNA, 1522 bp, Zea mays subsp. mays
  misc_feature (1)..(1522): Ceres Seq. ID no. 12409208
  misc_feature (1)..(1522): Ortholog of  Ceres SEQ ID NO 14314400 as cited in SEQ ID NO 57691
aaaaacctcgcaagcgaccccagtaatggcgaccaaggcgctatccgtctcctcgctcacctccacggcctttgcctccttttccttgccgcggccccgcaggccttcaccttcgcctcccctcctccgccttctcggccctcgcccccgcgcctccactctctccgccgccgctcccggcgacgaggacggcgtcgacaccgtggagcagctcctccacccacgcccgcctgagacctcagcccccgccggatcccgcggccggatcgaccgcctcatgaagctccagcgccgcgccgacggcgacgccgtgcccgggggccggaggaggtggttcccttacctggacgcgttccggcccgcggccgggggcgcggagctgtccagcggggaggtcatagaggtgctggagccgcacatcctagaggcgcggcgggaccggattcgacaagccgttggcaaccggagctacgccgtttgcctcgtggtggaaggcctctccgacttcggcaacgtctcggccgcgttccgctccgcggacgcgctcggcgtgcagtccgtgcacgtcatttccttgatagcagcaaaaggtgcagaggtatagagacaacaggcatgtgagcatgggtgctgagaaatggcttgacattgagatatggaactcacctgcagaatgtttcagtgcattaaaaaaacgcggttatcgcattgcgaccacttatttgggaactgattcggtttgtgtgtatgatatggattggtctcaaccaacagctattgttgtgggcaatgagcttaggggtataagtgatgatgctctagaattgtcagatttgcactgcagcattccaatgaaaggcatggtggattcgtttaatgtatctgttgcagctggaatcctcatgcaccatgctgtttgtgatagagtttcccgcctgggccatcacggtgatctcttgcctgaagaaaataggatattgcttgctgagttctatctgcgacacagagaaagcacggctactatagttcatgaatatgccaaaatgaaggcaggaaaaattatgaccagactttgaaaacatcctgagaagctgagtgacgtgtctgtcaatcaagtcttggattatctggtgcatttttctaacagaaaacgaggctattttttcctggagtttaccgctgatcccaccagattgctgggaagacgaggatccaagcccaatcattgagcagagctgttaacgattacgcatatggttttcagtgacgtggacttttgctcccaaaacagtcgcccgttaactatttttgtatgtttttgttaggatgaaagcttaatatgtttccacttgtttttcacaaacgttggcggtggttgggtttgggcggcaacgctccatgttctacagacggttacgaccggaagcttggtgtaaccgtaccagtataacctgtccttggagggttgagagcttgagatgtaaacgaactgcacttgtctacggcaggatgatgcgtctgt

SEQ ID NO: 6159 - protein, 200 aa, Zea mays subsp. mays
  peptide (1)..(200): Ceres Seq. ID no. 12409209
KTSQATPVMATKALSVSSLTSTAFASFSLPRPRRPSPSPPLLRLLGPRPRASTLSAAAPGDEDGVDTVEQLLHPRPPETSAPAGSRGRIDRLMKLQRRADGDAVPGGRRRWFPYLDAFRPAAGGAELSSGEVIEVLEPHILEARRDRIRQAVGNRSYAVCLVVEGLSDFGNVSAAFRSADALGVQSVHVISLIAAKGAEV

SEQ ID NO: 6160 - protein, 192 aa, Zea mays subsp. mays
  peptide (1)..(192): Ceres Seq. ID no. 12409210
MATKALSVSSLTSTAFASFSLPRPRRPSPSPPLLRLLGPRPRASTLSAAAPGDEDGVDTVEQLLHPRPPETSAPAGSRGRIDRLMKLQRRADGDAVPGGRRRWFPYLDAFRPAAGGAELSSGEVIEVLEPHILEARRDRIRQAVGNRSYAVCLVVEGLSDFGNVSAAFRSADALGVQSVHVISLIAAKGAEV

SEQ ID NO: 6161 - protein, 150 aa, Zea mays subsp. mays
  peptide (1)..(150): Ceres Seq. ID no. 12409211
MGAEKWLDIEIWNSPAECFSALKKRGYRIATTYLGTDSVCVYDMDWSQPTAIVVGNELRGISDDALELSDLHCSIPMKGMVDSFNVSVAAGILMHHAVCDRVSRLGHHGDLLPEENRILLAEFYLRHRESTATIVHEYAKMKAGKIMTRL

SEQ ID NO: 6162 - DNA, 924 bp, Zea mays subsp. mays
  misc_feature (1)..(924): Ceres Seq. ID no. 12340827
  misc_feature (1)..(924): Ortholog of  Ceres SEQ ID NO 14306286 as cited in SEQ ID NO 56909
acccagggcagagtcgcagggtgacggggagagcccatcatggcgccgcagcagccgtgaagcacaagagcttttctgcagcacgacggctttgtcctctctcctttaaagcggactgctctcctcaattgtcagtcagtagcatccaattgattgttctatcctcttctctgttctcacccccttgcaagcaacaatcgttcaccgatcgatccagtgcgtcctgcatggaaactgccgccgtcgccgccgccggtgccgggcgccgcatcatggtggccgtggacgagggcgaggagagcctgcacgcgctcaactggtgcctcgccaacgtcgtctccccggcaggaggcgacacgctggtgctcgtccacgcccgccgcccgcgcccggtctacgccgccatggacagcgcagggtacatgatgacctcggacgtgctggcgagcgtcgagaggcacgccaacgcggtctcggcggcggcggtcgacaaggccaagcgcgtctgcgcggaccacccgcacgtcaaggtggagacgatggtggagagcggggacccgcgggacgtcatctgcgacgccgccaacaagatggccgcggacctgctcgtcatgggcagccatggttacggcttcatccagagggcgttcttgggcagcgtcagcaaccactgcgcgcagaactgcaaatgcccggtcctcattgtcaagaggcccaaggagtagaaaggctcctcgcatgtacgctgcagcttagccaataatgtttcatgggcgaccatataggcatatatgtacacacttcacatcccattgcatggcagtgtcttcccttccctagttcaacaactagctttctgctggaataaggtgttcagacaaatcttcttgcatttggtactcttgtttagagagaagcgttccg

SEQ ID NO: 6163 - protein, 240 aa, Zea mays subsp. mays
  peptide (1)..(240): Ceres Seq. ID no. 12340828
PGQSRRVTGRAHHGAAAAVKHKSFSAARRLCPLSFKADCSPQLSVSSIQLIVLSSSLFSPPCKQQSFTDRSSASCMETAAVAAAGAGRRIMVAVDEGEESLHALNWCLANVVSPAGGDTLVLVHARRPRPVYAAMDSAGYMMTSDVLASVERHANAVSAAAVDKAKRVCADHPHVKVETMVESGDPRDVICDAANKMAADLLVMGSHGYGFIQRAFLGSVSNHCAQNCKCPVLIVKRPKE

SEQ ID NO: 6164 - protein, 165 aa, Zea mays subsp. mays
  peptide (1)..(165): Ceres Seq. ID no. 12340829
METAAVAAAGAGRRIMVAVDEGEESLHALNWCLANVVSPAGGDTLVLVHARRPRPVYAAMDSAGYMMTSDVLASVERHANAVSAAAVDKAKRVCADHPHVKVETMVESGDPRDVICDAANKMAADLLVMGSHGYGFIQRAFLGSVSNHCAQNCKCPVLIVKRPKE

SEQ ID NO: 6165 - protein, 150 aa, Zea mays subsp. mays
  peptide (1)..(150): Ceres Seq. ID no. 12340830
MVAVDEGEESLHALNWCLANVVSPAGGDTLVLVHARRPRPVYAAMDSAGYMMTSDVLASVERHANAVSAAAVDKAKRVCADHPHVKVETMVESGDPRDVICDAANKMAADLLVMGSHGYGFIQRAFLGSVSNHCAQNCKCPVLIVKRPKE

SEQ ID NO: 6166 - DNA, 2074 bp, Zea mays subsp. mays
  misc_feature (1)..(2074): Ceres Seq. ID no. 12409204
  misc_feature (1)..(2074): Ortholog of  Ceres SEQ ID NO 15171739 as cited in SEQ ID NO 57134
cggaacgcgtacaggcgccagctgctggctctgtcgcggcggatccggctcctcggccccttcgccgaggagctgcgggaggcacgccggggggtccgcggagcaggaggagcaggagcgggcgctggcgcctctcgccgacgcgctggagaaggcactcgacctgctccagctcggccgcgacggcagcaggatattcctggtccttgatagggatgaagtaatgaagaagttccatgaatcaattgctcagctggagcaagccctgtgcgattttccatatgataaactggatatatctgatgaagctagagagcaggttgagttagtgcatgcacagctcaaaagagccaaagagcgggtcgacatgcccgatgacgagttctacaacgaattatgttcgctgtataacaagagccacgacccaagtgctgagttggatatccttgggagattgtcggagaagttacacctgacgaccatcgctgatctcacgcaagaatcacttgctttgcacgagatggtggcatctggtggtggcaacgatcctggagaacacattgagaaaatgtcgatgctgctgaagaagatcaaggactttgtgcagactcagaaccctgaaacgggcccgctggtgactgccaagccaatgggttccaacgggaagccaagacctgtaaacgttcctgacgagttccggtgcccaatctctcttgagctgatgaaagacccggttatcgttgctactggccagacatacgagcgggcattgatcgagaaatggctagcttccgggcaccatacctgtccaagcactcaacaaaggatgccaaacacgacgctgacaccgaactatgttctcagaagccttatcacgcagtggtgtgaggccaacgggatcgatccaccgaagcgcccgacgcagcagcctgacagacctacatcttcatgctcttcgagcgagcgcgccagcatcgacgctctcctctccaagctatgctccgcagatcccgaggaacagagatcggctgccgcagagctccggctcctagcgaagcggaacgcgaacaaccggatctgcatcgccgaggccggtgccatccccttgctactgagcctcctgtcttcgtctgacctgcagacgcaggagcacgccgtgacggcgcttctgaacctctccatacacgaggacaacaaggcgagcatcatactgtccggcgctgtcccgggcatagttcacgtcctgaagaacgggagcatggaggcacgggagaacgctgcggccacactcttcagcctgtcggtggtggacgaatacaaggtcacgatcgggggcacaggagccatccctgccctcgtggtcttgctgagcgagggcaggcagcgcgggaagaaggacgcggcggctgccctgttcaacctgtgcatctaccaggggaacaagggccgcgccatacgggctggcctcgtgccactcgtcatggggctcgtgacgaaccccaccggagctctgctggacgaggccatggcgatcctgtcgatactgtccagccaccccgagggcaaggccgcgatcggggcggcggagcccgtccccgtcctcgtggagatgatcgcgggtgggtcgccgaggaacagggagaacgctgccgccgtgatgctgcacctgtccgccagcgtgcggcagtccgcgcatctggctccggcgcaggagtgcggcatcatggccccgctgcgggagctggcactgaatggcacggggagggggaagagaaaggccgtgcagctgctcgagcggatgagcaggttcctggtccagcagcaggaggacgcggtggatccacgtgtgcaggagctggaggagatcgagcgccagcttgccgcctttggacctggcgttacggaggctgatgtccttcaacagttgggagctctttaacctatgggacatttttcactatgatactactatactacatagaaaagttctagcggcggactttattatcagtaaaatctcaattcttgctactgaatgttagcgtgggtttcggatttcaagatttttatggtc

SEQ ID NO: 6167 - protein, 645 aa, Zea mays subsp. mays
  peptide (1)..(645): Ceres Seq. ID no. 12409205
GTRTGASCWLCRGGSGSSAPSPRSCGRHAGGSAEQEEQERALAPLADALEKALDLLQLGRDGSRIFLVLDRDEVMKKFHESIAQLEQALCDFPYDKLDISDEAREQVELVHAQLKRAKERVDMPDDEFYNELCSLYNKSHDPSAELDILGRLSEKLHLTTIADLTQESLALHEMVASGGGNDPGEHIEKMSMLLKKIKDFVQTQNPETGPLVTAKPMGSNGKPRPVNVPDEFRCPISLELMKDPVIVATGQTYERALIEKWLASGHHTCPSTQQRMPNTTLTPNYVLRSLITQWCEANGIDPPKRPTQQPDRPTSSCSSSERASIDALLSKLCSADPEEQRSAAAELRLLAKRNANNRICIAEAGAIPLLLSLLSSSDLQTQEHAVTALLNLSIHEDNKASIILSGAVPGIVHVLKNGSMEARENAAATLFSLSVVDEYKVTIGGTGAIPALVVLLSEGRQRGKKDAAAALFNLCIYQGNKGRAIRAGLVPLVMGLVTNPTGALLDEAMAILSILSSHPEGKAAIGAAEPVPVLVEMIAGGSPRNRENAAAVMLHLSASVRQSAHLAPAQECGIMAPLRELALNGTGRGKRKAVQLLERMSRFLVQQQEDAVDPRVQELEEIERQLAAFGPGVTEADVLQQLGAL

SEQ ID NO: 6168 - protein, 571 aa, Zea mays subsp. mays
  peptide (1)..(571): Ceres Seq. ID no. 12409206
MKKFHESIAQLEQALCDFPYDKLDISDEAREQVELVHAQLKRAKERVDMPDDEFYNELCSLYNKSHDPSAELDILGRLSEKLHLTTIADLTQESLALHEMVASGGGNDPGEHIEKMSMLLKKIKDFVQTQNPETGPLVTAKPMGSNGKPRPVNVPDEFRCPISLELMKDPVIVATGQTYERALIEKWLASGHHTCPSTQQRMPNTTLTPNYVLRSLITQWCEANGIDPPKRPTQQPDRPTSSCSSSERASIDALLSKLCSADPEEQRSAAAELRLLAKRNANNRICIAEAGAIPLLLSLLSSSDLQTQEHAVTALLNLSIHEDNKASIILSGAVPGIVHVLKNGSMEARENAAATLFSLSVVDEYKVTIGGTGAIPALVVLLSEGRQRGKKDAAAALFNLCIYQGNKGRAIRAGLVPLVMGLVTNPTGALLDEAMAILSILSSHPEGKAAIGAAEPVPVLVEMIAGGSPRNRENAAAVMLHLSASVRQSAHLAPAQECGIMAPLRELALNGTGRGKRKAVQLLERMSRFLVQQQEDAVDPRVQELEEIERQLAAFGPGVTEADVLQQLGAL

SEQ ID NO: 6169 - protein, 523 aa, Zea mays subsp. mays
  peptide (1)..(523): Ceres Seq. ID no. 12409207
MPDDEFYNELCSLYNKSHDPSAELDILGRLSEKLHLTTIADLTQESLALHEMVASGGGNDPGEHIEKMSMLLKKIKDFVQTQNPETGPLVTAKPMGSNGKPRPVNVPDEFRCPISLELMKDPVIVATGQTYERALIEKWLASGHHTCPSTQQRMPNTTLTPNYVLRSLITQWCEANGIDPPKRPTQQPDRPTSSCSSSERASIDALLSKLCSADPEEQRSAAAELRLLAKRNANNRICIAEAGAIPLLLSLLSSSDLQTQEHAVTALLNLSIHEDNKASIILSGAVPGIVHVLKNGSMEARENAAATLFSLSVVDEYKVTIGGTGAIPALVVLLSEGRQRGKKDAAAALFNLCIYQGNKGRAIRAGLVPLVMGLVTNPTGALLDEAMAILSILSSHPEGKAAIGAAEPVPVLVEMIAGGSPRNRENAAAVMLHLSASVRQSAHLAPAQECGIMAPLRELALNGTGRGKRKAVQLLERMSRFLVQQQEDAVDPRVQELEEIERQLAAFGPGVTEADVLQQLGAL

SEQ ID NO: 6170 - DNA, 1237 bp, Zea mays subsp. mays
  misc_feature (1)..(1237): Ceres Seq. ID no. 12349150
  misc_feature (1)..(1237): Ortholog of  Ceres SEQ ID NO 14316043 as cited in SEQ ID NO 68538
  misc_feature (1)..(1237): Ortholog of  Ceres SEQ ID NO 14309361 as cited in SEQ ID NO 0
atccctgtctctcgctttccctaacccacaccagaataccagatcgagcaccgatctagggttgcacctcttctgctagccggctggcgaggagccgttcggcatctggacgcggccaagggagatgaagctcgcggggctcaagtctgtggacggcgcccacgaggagtccatctgggcggcggcgtgggcgcccgccgctgaccaccgccccacggcggtgctcctcactggcgcgctcgacgagaccgtccgcgcttggctccccgacgacctcgctgccttggggtcccccacacggggccacgcgctcggagtcgtctccctcgccgcccaccccgccggctcgctcgccgccgccgtgtcgctcgacagcttcatccgcgtctttgacgtcgacacgggggcatccgtcgccacgctggaggcgccgccgtccgagatttggggcgtccagttccatcccaagggtaatgctctggccgcagccggtggtggcagtggatcagtgaagctgtgggacacggagaagtggaaggcgatcaccagcctcgccgtcccacgcccggagggagctcgccccgacaagacaggcagcggcaagttcgtcctgtcagtcgcctggagccccgacggaaggctcctagcatgcgggtccatggacggcacgatcgccgtctacgacgcggtccgcatgaagttcctgcaccacctggagggccaccacatgcccggtgcggtccatggtgttctccccggtggacccgcacgtgcttttcacggcctgcgacgactgccacgtccacatctacgacgccagggagaagggcctcgtcggggccatgtcgggccacgcgagctgggtgctgagcatcgacgcgagccccgacggcctggcggtggccacggggtcgagcgaccgcaccgtccggctctgggacctcaacatgaggacctcggtgcagaccatgagcaaccactccgatcaggtgtgggccgtggccttcaggccaccaggcggtgccggagtccgagcagggcgtctggctagcgcgtcggatgacaagagcgtctccctgtacgattactcgtaggtttttgtttccttataaaccgttgcaaatgcctctgttgtaccgaccagagatttgaattcgggcatggtggttggaagaattgttgtacgcagcacagtagtcgaggtgttaaattgcaaggaaagagtttatttcgtgtt

SEQ ID NO: 6171 - protein, 308 aa, Zea mays subsp. mays
  peptide (1)..(308): Ceres Seq. ID no. 12349151
MKLAGLKSVDGAHEESIWAAAWAPAADHRPTAVLLTGALDETVRAWLPDDLAALGSPTRGHALGVVSLAAHPAGSLAAAVSLDSFIRVFDVDTGASVATLEAPPSEIWGVQFHPKGNALAAAGGGSGSVKLWDTEKWKAITSLAVPRPEGARPDKTGSGKFVLSVAWSPDGRLLACGSMDGTIAVYDAVRMKFLHHLEGHHMPGAVHGVLPGGPARAFHGLRRLPRPHLRRQGEGPRRGHVGPRELGAEHRREPRRPGGGHGVERPHRPALGPQHEDLGADHEQPLRSGVGRGLQATRRCRSPSRASG

SEQ ID NO: 6172 - DNA, 1106 bp, Zea mays subsp. mays
  misc_feature (1)..(1106): Ceres Seq. ID no. 13493222
  misc_feature (1)..(1106): Ortholog of  Ceres SEQ ID NO 13592768 as cited in SEQ ID NO 20317
  misc_feature (1)..(1106): Ortholog of  Ceres SEQ ID NO 14303656 as cited in SEQ ID NO 61363
aacggaggtgctttgagaaatattgagaaagagtatgaagatttcaacagaattttatcttctcagactatagacccattgagagcaatggctatgggtggacccctggaagatgctcgtggtcttgcacagcgctatagcaggatgagacatgaagctgagatcctctctactgaaattgctagaagaaaggcacgggtaagagaagctccaattgctgagcacactacaaagcttcagcaatcagaagctagaatgatagagcacaaagcaagcatggccgtgttagggaaggaagcagcagctgcacttgcagctgtcgagtctcaacagcaacgagtgacccttcagaggctggttggcacggcggaagcagaaaagttattccatctgagattagctgctatacttgatgacgttgaggcagagatgtcctctgagaagcaaaggagagaatctgcaccacctatcatatcttcacataagcgtgctgagaaagctcagtacttccttgctgaggtaatgcataatttcaatggaaccacggagaaggaactgagcttaattgttggcgattatgttgttgttcgtcagattgctcccaacggctgggcggaaggagaatgccgagggaaggctggctggtttccggctgcctatgttgagaggcgcgagaatatccccccgaataaagttttccctcaagtataagatcataagaggggtcatctgtttccactgataagcagtttggtttggcattgaggagctgcaaggctgtatctaacttctgattggtttgatgctccgtatggcgtatcttgtgcatcctatgttcttgtggtggtctagacttggaataagatatgtcggcacgtgctctgcgcctgtgcctgcgcgcacattgatgaagatgtcgctttgcatgtgtccgcagtgtgctactgcttgcggcagcgtaggtcatgttgaatgagctttcctttactgacagatttcgagtgtaaattggttcttgcacttttttttcgttagggtgtatcagtagttctgtacaatatgtttttaatgagaccattcggccatcagagctttgatctgtctcc

SEQ ID NO: 6173 - protein, 236 aa, Zea mays subsp. mays
  peptide (1)..(236): Ceres Seq. ID no. 13493223
NGGALRNIEKEYEDFNRILSSQTIDPLRAMAMGGPLEDARGLAQRYSRMRHEAEILSTEIARRKARVREAPIAEHTTKLQQSEARMIEHKASMAVLGKEAAAALAAVESQQQRVTLQRLVGTAEAEKLFHLRLAAILDDVEAEMSSEKQRRESAPPIISSHKRAEKAQYFLAEVMHNFNGTTEKELSLIVGDYVVVRQIAPNGWAEGECRGKAGWFPAAYVERRENIPPNKVFPQV

SEQ ID NO: 6174 - protein, 207 aa, Zea mays subsp. mays
  peptide (1)..(207): Ceres Seq. ID no. 13493224
MAMGGPLEDARGLAQRYSRMRHEAEILSTEIARRKARVREAPIAEHTTKLQQSEARMIEHKASMAVLGKEAAAALAAVESQQQRVTLQRLVGTAEAEKLFHLRLAAILDDVEAEMSSEKQRRESAPPIISSHKRAEKAQYFLAEVMHNFNGTTEKELSLIVGDYVVVRQIAPNGWAEGECRGKAGWFPAAYVERRENIPPNKVFPQV

SEQ ID NO: 6175 - protein, 205 aa, Zea mays subsp. mays
  peptide (1)..(205): Ceres Seq. ID no. 13493225
MGGPLEDARGLAQRYSRMRHEAEILSTEIARRKARVREAPIAEHTTKLQQSEARMIEHKASMAVLGKEAAAALAAVESQQQRVTLQRLVGTAEAEKLFHLRLAAILDDVEAEMSSEKQRRESAPPIISSHKRAEKAQYFLAEVMHNFNGTTEKELSLIVGDYVVVRQIAPNGWAEGECRGKAGWFPAAYVERRENIPPNKVFPQV

SEQ ID NO: 6176 - DNA, 1506 bp, Zea mays subsp. mays
  misc_feature (1)..(1506): Ceres Seq. ID no. 12386913
  misc_feature (1)..(1506): Ortholog of  Ceres SEQ ID NO 15177012 as cited in SEQ ID NO 56256
  misc_feature (1)..(1506): Ortholog of  Ceres SEQ ID NO 14314300 as cited in SEQ ID NO 57386
  misc_feature (1)..(1506): Ortholog of  Ceres SEQ ID NO 14311993 as cited in SEQ ID NO 60371
  misc_feature (1)..(1506): Ortholog of  Ceres SEQ ID NO 13596509 as cited in SEQ ID NO 62004
actacataggtgccggactcgtcccagcgaagaaccggacgagcgagcaagaggcctcctcctcaagcttcgaatcctccccttccgcgctttccctccccctcctcctcctcccctttccagtccccaccccagcgaagcttccaaagccgccccaaccccaacggccgcccggcctgatcgagcagacagctgccgcggccctccccgccccgcacgcgacctcggagccatggagaagtacgagctgctgaaggacatcggcgccggcaacttcggcgtggcgcggctcatgcggaacaaggagaccaaggagctggtcgccatgaagtacatcccccggggccaaaagatcgacgagaatgtggcgagggagatcatcaaccaccgctcgctgcgccaccccaacatcatccggttcaaggaggtggtgctgacgccgacgcacctggcgatcgtgatggagtacgccgccggcggcgagctgttcgaccggatctgcaacgccgggaggttcagcgaggacgaggcgaggtacttcttccagcagctgatttgtggcgtcagctactgccactccatgcaaatctgccaccgagacttgaagctggagaacacgctgctggacggcagcccggcgcctcgcctcaagatctgcgacttcggttactccaagtcgtcgctgctgcactcgaagcccaagtcgacggtcggcacgccgggcgtacatcgcccccgaggtgctctcccgccggggaatacgacggcaagacagccgatgtgtggtcctgtggagtcactctttatgtgatgctggtcggtggttacccttttgaggacccagacgacccaaagaatttcagaaagacgatcgggaggatcatgtcaatccaatacaaaataccagagtatgtgcacgtgtcgcaagactgcaaggagctgctttcaaggatctttgttgcaaactctgcaaagagaataacgatcagggagatcaggaaccacccctggttcctgaagaacctgcccagagagctcacggaggctgcgcaggccatgtactacaagaaagacaacagcgccccgacctactccgtccagtccgtggaggagatcatgaagatcgtggagaaggcgcggacgccgcctccttcctccacccctgtggctggcttcggttgggcggaggaggacgagcaggaggacagcaaggaaccagacgaggaacacgaggacggcgaggacgagtacgagaagcaggtgaagcaagtccacgccagcggggagtttcatctcagctgctgatggttttcgccggcctgctagtctgtggtaccagccgatgatggacctgctagtctgtggtcttgtttccaagttttctttcattttttctttcttttgctgtggtgccgcaagactgcaacagttgtaaattattgaagggggttccagcgttgcccttgtattgactgattcaaactagcatggggaacatgattatgg

SEQ ID NO: 6177 - protein, 269 aa, Zea mays subsp. mays
  peptide (1)..(269): Ceres Seq. ID no. 12386914
LHRCRTRPSEEPDERARGLLLKLRILPFRAFPPPPPPPLSSPHPSEASKAAPTPTAARPDRADSCRGPPRPARDLGAMEKYELLKDIGAGNFGVARLMRNKETKELVAMKYIPRGQKIDENVAREIINHRSLRHPNIIRFKEVVLTPTHLAIVMEYAAGGELFDRICNAGRFSEDEARYFFQQLICGVSYCHSMQICHRDLKLENTLLDGSPAPRLKICDFGYSKSSLLHSKPKSTVGTPGVHRPRGALPPGNTTARQPMCGPVESLFM

SEQ ID NO: 6178 - protein, 192 aa, Zea mays subsp. mays
  peptide (1)..(192): Ceres Seq. ID no. 12386915
MEKYELLKDIGAGNFGVARLMRNKETKELVAMKYIPRGQKIDENVAREIINHRSLRHPNIIRFKEVVLTPTHLAIVMEYAAGGELFDRICNAGRFSEDEARYFFQQLICGVSYCHSMQICHRDLKLENTLLDGSPAPRLKICDFGYSKSSLLHSKPKSTVGTPGVHRPRGALPPGNTTARQPMCGPVESLFM

SEQ ID NO: 6179 - protein, 172 aa, Zea mays subsp. mays
  peptide (1)..(172): Ceres Seq. ID no. 12386916
MRNKETKELVAMKYIPRGQKIDENVAREIINHRSLRHPNIIRFKEVVLTPTHLAIVMEYAAGGELFDRICNAGRFSEDEARYFFQQLICGVSYCHSMQICHRDLKLENTLLDGSPAPRLKICDFGYSKSSLLHSKPKSTVGTPGVHRPRGALPPGNTTARQPMCGPVESLFM

SEQ ID NO: 6180 - DNA, 1336 bp, Zea mays subsp. mays
  misc_feature (1)..(1336): Ceres Seq. ID no. 12365588
  misc_feature (1)..(1336): Ortholog of  Ceres SEQ ID NO 14302757 as cited in SEQ ID NO 56631
  misc_feature (1)..(1336): Ortholog of  Ceres SEQ ID NO 13662567 as cited in SEQ ID NO 62884
aaaaaaccctagcccgacccctcctcctccacctgcgccaccgcccaccatgagctccgccgccgcgccagctgccgtcggcagcggcaaggagcttgccaacccgcccgccgacgggatcaccaacctccgcttctccaaccacagcaacaacctcctcgtctcctcatgggacaagacggtgcggctctacgacgccgacgccaacgtgctcaagggggagttcatgcaccccggggccgtcctcgactgctgcttccacgacgactcctcgggctttagcgccggagccgaccacaccgtgcggaggttggtatttagctcgtccaaggaagatgttttggggcggcatgatggtccagttcgttgcgtggaatactcttatgctgcaggtcaagtcatcaccggcagctgggataaaactgtaaaatgctgggatccaagaggagttagtggaccagagcgcacccttgttgggacatatgctcaacctgaacgtgtatattctctttcgttagtaggaaataggttggttgttgcaacagctggaagacatgtaaatatttatgatctgcgcaatatgtctcaacctgagcaaaaaagagactcttctttgaaatatcaaacacgatgtgttcgatgttttcccaacggaacaggatatgctcttagttctgttgaagggcgagtttctatggaattctttgatctatctgagtctgctcaatctaaaaagtatgctttcaagtgtcatcggaaatctgaggccggcagggacaccgtctatcctgtcaatgcaattgctttccatcccatatatggaacatttgccaccggagggtgtgatggatttgtgaatgtgtgggatggcattaacaagaaaagactatatcagtactcgaagtacgcatcaagcatcgctgctctatcattcagtaaggatgggcatctgcttgctgtggcatccagctacacttatgaagagggagaaaaaacgcatgagcctgacgctatatttatccggacagtgaatgaagtcgaggtgaagccgaagcccaaggcactggcagccccccagtagtgctgtgacctgttctggaggctagatgacccgtacttctctgcgttgatgtcaattacattagttgaccgagtgcttgtttgtgttgaaagagctgaaacgcctgtttcttaatctggaaccctcttctcccgttttacttgtccgtggaaacatttcatgttccagctggttgtatattccgaaacagaccatgtttaagttcattcggttcttcgttgacttaagttatttatcaaatatttaagtatcgtg

SEQ ID NO: 6181 - protein, 359 aa, Zea mays subsp. mays
  peptide (1)..(359): Ceres Seq. ID no. 12365589
KNPSPTPPPPPAPPPTMSSAAAPAAVGSGKELANPPADGITNLRFSNHSNNLLVSSWDKTVRLYDADANVLKGEFMHPGAVLDCCFHDDSSGFSAGADHTVRRLVFSSSKEDVLGRHDGPVRCVEYSYAAGQVITGSWDKTVKCWDPRGVSGPERTLVGTYAQPERVYSLSLVGNRLVVATAGRHVNIYDLRNMSQPEQKRDSSLKYQTRCVRCFPNGTGYALSSVEGRVSMEFFDLSESAQSKKYAFKCHRKSEAGRDTVYPVNAIAFHPIYGTFATGGCDGFVNVWDGINKKRLYQYSKYASSIAALSFSKDGHLLAVASSYTYEEGEKTHEPDAIFIRTVNEVEVKPKPKALAAPQ

SEQ ID NO: 6182 - protein, 343 aa, Zea mays subsp. mays; identical to SEQ ID NO: 4727
  peptide (1)..(343): Ceres Seq. ID no. 12365590

SEQ ID NO: 6183 - protein, 284 aa, Zea mays subsp. mays; identical to SEQ ID NO: 4728
  peptide (1)..(284): Ceres Seq. ID no. 12365591

SEQ ID NO: 6184 - DNA, 814 bp, Zea mays subsp. mays
  misc_feature (1)..(814): Ceres Seq. ID no. 12594699
  misc_feature (1)..(814): Ortholog of  Ceres SEQ ID NO 12609797 as cited in SEQ ID NO 51954
  misc_feature (1)..(814): Ortholog of  Ceres SEQ ID NO 13583509 as cited in SEQ ID NO 62253
aacaacaagacagagagatacccgatcgccaccgccgaccggactcccctcaaaggcggccacagcacagcgagcatgggagaccggcatcagcatgggcctggcagcggcgtggaggacccggcgacgctggtgcggcggggtgcagacccgcgcgcccaactcgacgcaggtggtggggttcctgacgctgctcgtctctggcgccgtgctgctgctgctgacgggggtgacgctgacgggcgccgtggtggcgctcgtcttcctgggccccatcgcgctgctcaccagccccatctgggtgcccgtcgccgtcgtgatctccgccatcgtcgccgccgcgctccccgtggccacctggatgtaccgctacttcacgggccgccaccccgtgggcgccgaccgggtggactacgcgcgcagccggatcgccgacaccgccagccacgtcaaggactacgcgcgcgagtacggcggatacctgcgcacccgcgccaaggacgccgcgcccggcgcgtaggcgcgcgccgcccggcgtgcatgtgctgcaacccccgtccgtggtgccgctagctataggtcatcgctgctgtcgtcgtcgtcgtcttagttcctcttgcattgcgtgtgcgtactctgctccaatcatcccccgcccgtgtcgtcaagcaatttctggtcctcttgcttgctttctctaggagatgctgttcatttcgatctcttggcgcaatttgatctttcgcttggtgtaattaggtcattagttaaatcataagagagactcgtgttcgtggtctttctcacaaccttg

SEQ ID NO: 6185 - protein, 190 aa, Zea mays subsp. mays
  peptide (1)..(190): Ceres Seq. ID no. 12594700
NNKTERYPIATADRTPLKGGHSTASMGDRHQHGPGSGVEDPATLVRRGADPRAQLDAGGGVPDAARLWRRAAAADGGDADGRRGGARLPGPHRAAHQPHLGARRRRDLRHRRRRAPRGHLDVPLLHGPPPRGRRPGGLRAQPDRRHRQPRQGLRARVRRIPAHPRQGRRARRVGARRPACMCCNPRPWCR

SEQ ID NO: 6186 - protein, 172 aa, Zea mays subsp. mays
  peptide (1)..(172): Ceres Seq. ID no. 12594701
TTRQRDTRSPPPTGLPSKAATAQRAWETGISMGLAAAWRTRRRWCGGVQTRAPNSTQVVGFLTLLVSGAVLLLLTGVTLTGAVVALVFLGPIALLTSPIWVPVAVVISAIVAAALPVATWMYRYFTGRHPVGADRVDYARSRIADTASHVKDYAREYGGYLRTRAKDAAPGA

SEQ ID NO: 6187 - protein, 165 aa, Zea mays subsp. mays
  peptide (1)..(165): Ceres Seq. ID no. 12594702
MGDRHQHGPGSGVEDPATLVRRGADPRAQLDAGGGVPDAARLWRRAAAADGGDADGRRGGARLPGPHRAAHQPHLGARRRRDLRHRRRRAPRGHLDVPLLHGPPPRGRRPGGLRAQPDRRHRQPRQGLRARVRRIPAHPRQGRRARRVGARRPACMCCNPRPWCR

SEQ ID NO: 6188 - protein, 141 aa, Zea mays subsp. mays
  peptide (1)..(141): Ceres Seq. ID no. 12594703
MGLAAAWRTRRRWCGGVQTRAPNSTQVVGFLTLLVSGAVLLLLTGVTLTGAVVALVFLGPIALLTSPIWVPVAVVISAIVAAALPVATWMYRYFTGRHPVGADRVDYARSRIADTASHVKDYAREYGGYLRTRAKDAAPGA

SEQ ID NO: 6189 - DNA, 971 bp, Zea mays subsp. mays
  misc_feature (1)..(971): Ceres Seq. ID no. 12363847
  misc_feature (1)..(971): Ortholog of  Ceres SEQ ID NO 15168856 as cited in SEQ ID NO 56354
attccatccccgctgccccatccggccatcccacagcgaatctcccaaaccccggctccctcgattcccaatcccacccctgccacgaagagatcagatgacggcgagctgctgctgatcgagtgcagtggaatcggaggcgatgcgggctagccggccggcggtgcaccctgtggaagcggcccctccgccgccggccgcggcggcggaggggccggaggcccaggtggagggtgccgcgcacccgcgcggggtgcggatgaaggatccgcctggggcaccagggacacctgcggggcttggtctacgccttgcgcaggccttcttcgcagccgctgcgctcgccgtcatggcgtccaccaacgacttcccgtccgtctctgccttcagctaccttgtcgcagcagccattttgcagtgcttgtggagccttttgctagcctttgtcgacatttatgcacttcttgtcaagcgatcgttgagaaatgcccgagctgtatgtatatttactatcggagatgggatcacaggtacaataaccttgggcgcggcatgtgcttcagcaggaatcactgttctcatcggtaatgatctcaacatatgtgcagagaatcactgtgcaagtttcgagaccgccacagcattggcttttataagctggtttgcgctggcgccatcctgtatcttgaatttctggtcgatggcctccagatgataaatataggatgttataaaacatagtatttttgaatggtttctggacaaggtcgctgcttatggtagcagcaaagcaacgcggtgccgtaaagctaattgtaatacccagaaattgttgaatggctgtggaatgtagcacgtgtcgaattgtctgtacaaaatacggagaggccttctttggatctgaaaaaggcttctgaatcttgccagtccttcctttttacgttaacatgtttctcctgtgtggtttgttg

SEQ ID NO: 6190 - protein, 190 aa, Zea mays subsp. mays
  peptide (1)..(190): Ceres Seq. ID no. 12363848
MRASRPAVHPVEAAPPPPAAAAEGPEAQVEGAAHPRGVRMKDPPGAPGTPAGLGLRLAQAFFAAAALAVMASTNDFPSVSAFSYLVAAAILQCLWSLLLAFVDIYALLVKRSLRNARAVCIFTIGDGITGTITLGAACASAGITVLIGNDLNICAENHCASFETATALAFISWFALAPSCILNFWSMASR

SEQ ID NO: 6191 - protein, 151 aa, Zea mays subsp. mays
  peptide (1)..(151): Ceres Seq. ID no. 12363849
MKDPPGAPGTPAGLGLRLAQAFFAAAALAVMASTNDFPSVSAFSYLVAAAILQCLWSLLLAFVDIYALLVKRSLRNARAVCIFTIGDGITGTITLGAACASAGITVLIGNDLNICAENHCASFETATALAFISWFALAPSCILNFWSMASR

SEQ ID NO: 6192 - protein, 121 aa, Zea mays subsp. mays
  peptide (1)..(121): Ceres Seq. ID no. 12363850
MASTNDFPSVSAFSYLVAAAILQCLWSLLLAFVDIYALLVKRSLRNARAVCIFTIGDGITGTITLGAACASAGITVLIGNDLNICAENHCASFETATALAFISWFALAPSCILNFWSMASR

SEQ ID NO: 6193 - DNA, 1548 bp, Zea mays subsp. mays
  misc_feature (1)..(1548): Ceres Seq. ID no. 12358336
  misc_feature (1)..(1548): Ortholog of  Ceres SEQ ID NO 13655992 as cited in SEQ ID NO 65504
  misc_feature (1)..(1548): Ortholog of  Ceres SEQ ID NO 13587581 as cited in SEQ ID NO 0
acggaccagcagatcgcgcgcgggagtgagagggcgacagggcgtggccgcgaggtgggcatgggatcggagggacgggtctggaatggcgcgggcgtggccgccggcagcggctatggcggcatcgtcgaggcgaaagcgaccaccgcggcgcccgcggacgttcccacgtcggcggcctccgtcgacatctcgctgccgctcccggagatgtcgcctcacatcataggtctctgcaaggagttggtcaaagggtggtcgtcgattgacagctcgcgcttctccatcgagaccgtgtctgggggcatcaccaatctattgctcaaggtttctgtcaaaggaaacaatggcaatgagtcttctgttactgttcggttgtatggaccaaatacagacttggtgattgatcggaaaagggaattgcaggcgataccgtatctctcagctgcagggttcggggctcggctgcttggaatgtttgaaaatggagtagttcagtcattcatctatgctcgaacactgtcacctgcagacatgaaagaacctaaaatagcagctgaaattgccaaggagctacgcaaatttcatcaagtagatataccagggtctaaagaaccacaattgtggaatgatatattcaagtttttgaagaaagctgcagcattgaagtttgaggataatgagcagcaaaagagatatgtaaagatctcatttagagaaatacaagatgaagttaaagaacttaaggatctcttggacattctgcatgcacctgtggtttatgcacacaatgacttgctttcaggaaatctgatgctcaatgatttggaagggaagctatattttattgattttgagtatgggtcatacagctaccgtgggtatgacattgcaaatcatttcaatgagtatgcaggatttgactgtgactataatttgtacccagataaagatgcccagtatcacttctttaggaattatctgcaccctgatagacctagtgaggtgcaggcacaagatatggaagtactttatgtggaaacaaacactttcagactagcatcgcacatttactgggcattatgggctcttattcaggcaaaggtatccccaattgactttgactatcttggatacttcttcttacggtatggtgagtacaagaaacaaagggactcctgcttcgccttggcacaaagtttcctctccgggctaagaaatggctagagcctgagaatctggtcaagggtttgcactgttgtacgcatactcggggcgggtacgcgttgtgatcatcgtctgctactcagaaactctactatagtggtggtagcagcctcattttgttgtatctgatggtagtttcgtcatcgcctgataggaaagtctcatgatcgccctcgggaacgcagggtggcgagatctgtacttatatttgtaataaacacaatccggatgggttctgtcctgtgcaatttgttgtgcgcataagcattccgtgtttttatacattattgtgaggaattgcataagtttttttgtttttcg

SEQ ID NO: 6194 - protein, 408 aa, Zea mays subsp. mays
  peptide (1)..(408): Ceres Seq. ID no. 12358337
TDQQIARGSERATGRGREVGMGSEGRVWNGAGVAAGSGYGGIVEAKATTAAPADVPTSAASVDISLPLPEMSPHIIGLCKELVKGWSSIDSSRFSIETVSGGITNLLLKVSVKGNNGNESSVTVRLYGPNTDLVIDRKRELQAIPYLSAAGFGARLLGMFENGVVQSFIYARTLSPADMKEPKIAAEIAKELRKFHQVDIPGSKEPQLWNDIFKFLKKAAALKFEDNEQQKRYVKISFREIQDEVKELKDLLDILHAPVVYAHNDLLSGNLMLNDLEGKLYFIDFEYGSYSYRGYDIANHFNEYAGFDCDYNLYPDKDAQYHFFRNYLHPDRPSEVQAQDMEVLYVETNTFRLASHIYWALWALIQAKVSPIDFDYLGYFFLRYGEYKKQRDSCFALAQSFLSGLRNG

SEQ ID NO: 6195 - protein, 388 aa, Zea mays subsp. mays
  peptide (1)..(388): Ceres Seq. ID no. 12358338
MGSEGRVWNGAGVAAGSGYGGIVEAKATTAAPADVPTSAASVDISLPLPEMSPHIIGLCKELVKGWSSIDSSRFSIETVSGGITNLLLKVSVKGNNGNESSVTVRLYGPNTDLVIDRKRELQAIPYLSAAGFGARLLGMFENGVVQSFIYARTLSPADMKEPKIAAEIAKELRKFHQVDIPGSKEPQLWNDIFKFLKKAAALKFEDNEQQKRYVKISFREIQDEVKELKDLLDILHAPVVYAHNDLLSGNLMLNDLEGKLYFIDFEYGSYSYRGYDIANHFNEYAGFDCDYNLYPDKDAQYHFFRNYLHPDRPSEVQAQDMEVLYVETNTFRLASHIYWALWALIQAKVSPIDFDYLGYFFLRYGEYKKQRDSCFALAQSFLSGLRNG

SEQ ID NO: 6196 - protein, 338 aa, Zea mays subsp. mays
  peptide (1)..(338): Ceres Seq. ID no. 12358339
MSPHIIGLCKELVKGWSSIDSSRFSIETVSGGITNLLLKVSVKGNNGNESSVTVRLYGPNTDLVIDRKRELQAIPYLSAAGFGARLLGMFENGVVQSFIYARTLSPADMKEPKIAAEIAKELRKFHQVDIPGSKEPQLWNDIFKFLKKAAALKFEDNEQQKRYVKISFREIQDEVKELKDLLDILHAPVVYAHNDLLSGNLMLNDLEGKLYFIDFEYGSYSYRGYDIANHFNEYAGFDCDYNLYPDKDAQYHFFRNYLHPDRPSEVQAQDMEVLYVETNTFRLASHIYWALWALIQAKVSPIDFDYLGYFFLRYGEYKKQRDSCFALAQSFLSGLRNG

SEQ ID NO: 6197 - DNA, 1681 bp, Zea mays subsp. mays
  misc_feature (1)..(1681): Ceres Seq. ID no. 12349121
  misc_feature (1)..(1681): Ortholog of  Ceres SEQ ID NO 14314464 as cited in SEQ ID NO 52405
  misc_feature (1)..(1681): Ortholog of  Ceres SEQ ID NO 15177592 as cited in SEQ ID NO 58436
  misc_feature (1)..(1681): Ortholog of  Ceres SEQ ID NO 13655251 as cited in SEQ ID NO 62888
  misc_feature (1)..(1681): Ortholog of  Ceres SEQ ID NO 13597194 as cited in SEQ ID NO 63661
  misc_feature (1)..(1681): Ortholog of  Ceres SEQ ID NO 14302883 as cited in SEQ ID NO 66384
  misc_feature (1)..(1681): Ortholog of  Ceres SEQ ID NO 13662855 as cited in SEQ ID NO 69059
ctgcacttttctaccaccgaaggcgagggcgagggggccaaagacgagcgctttttcgtgcccgcctgcctgcctgctggtcattgccgctgctcacgagcctcccgccccgtgccgccctgccctctacggctctgccccaacgagccccaggggagccaggaaaaggagccgtcaaaagccgccgccgaggagagcgcgcaggtcaggcatggcatcaaccgttaccttcaacccagtgagcgcccaagctgcgctgatccaaaagccaaggaaccttggagccataagctatgctggcttaaagatgccggcatctgttagctctggctcagagtcgtcattcctgggctggaatgcatcccttcgggcagctgttactccaaggattgtgcccaaggcaaagtctggatctcagatatctccacaggcatcttacaaggtggcagtgctgggtgctgccggtggcatcggtcaacccttgggcctgttggttaagatgtctcctcttgtccgagctgcatctgtatgatattgctaatgtcaagggagttgctgcagatctcagccactgcaacacgcctgctcaggttcttgacttcactggaccctcagagttagccaactgcttgaaaggtgtggatgtcgttgtcatccctgccggggtcccaaggaagcctgggatgactcgcgatgacctttttaacatcaacgcaagcatcgtcaagacacttgttgaggctgttgcagacagttgcccagaggcgttcatccatatcatcagcaacccggtgaattccacggtgccaattgcagctgaggttctgaagcagaagggtgtctacaatcccaagaagctttttggggttaccaccttggatgttgtcagggccaacacatttgtggcgcagaagaagaaccttaagctcatcgatgttgatgtcccagttgttggtggccatgctggaatcacaattctgccactgttatcgaagacgaggccatctgtcaccttcacagatgaggaaactgaggagctgacaaagaggatacagaatgccgggacagaggtggtggatgccaaggctggtgctgggtctgctaccctgtccatggcctatgccgctgctagattcgttgagtcgtctctccgtgcgctggctggcgatccggatgtttatgagtgcacatttgttcagtctgagataactgacctgccattcttcgcatcaagagtcaagttgggcaagaacggtgttgagtctgtcatttctgccgacctccagggagtgactgagtatgaggccaaggcacttgaggcgctgaaggccgagttgaaggcaagcattgagaagggtattgctttcgtgaacaaacagcgggaagctgctgcatctgtttgaggcgaagcaagtgaaacggaaggaacaatcgtcttgaatggcttttaagttttgcagcctagagtttttttgttgtcggcatgtaggaagatgttccagatggttgctgtttgtttctaattgctacatgggggctgaacatccatcccccaagttatcgccggtttctgaaccaggccttatttacacataaattttgccccttctgtatcgtggtccagtttgtagcttgttggagtctacaaactacaaagaggctaataaaccacttttatttg

SEQ ID NO: 6198 - protein, 348 aa, Zea mays subsp. mays
  peptide (1)..(348): Ceres Seq. ID no. 12349122
MHPFGQLLLQGLCPRQSLDLRYLHRHLTRWQCWVLPVASVNPWACWLRCLLLSELHLYDIANVKGVAADLSHCNTPAQVLDFTGPSELANCLKGVDVVVIPAGVPRKPGMTRDDLFNINASIVKTLVEAVADSCPEAFIHIISNPVNSTVPIAAEVLKQKGVYNPKKLFGVTTLDVVRANTFVAQKKNLKLIDVDVPVVGGHAGITILPLLSKTRPSVTFTDEETEELTKRIQNAGTEVVDAKAGAGSATLSMAYAAARFVESSLRALAGDPDVYECTFVQSEITDLPFFASRVKLGKNGVESVISADLQGVTEYEAKALEALKAELKASIEKGIAFVNKQREAAASV

SEQ ID NO: 6199 - protein, 239 aa, Zea mays subsp. mays
  peptide (1)..(239): Ceres Seq. ID no. 12349123
MTRDDLFNINASIVKTLVEAVADSCPEAFIHIISNPVNSTVPIAAEVLKQKGVYNPKKLFGVTTLDVVRANTFVAQKKNLKLIDVDVPVVGGHAGITILPLLSKTRPSVTFTDEETEELTKRIQNAGTEVVDAKAGAGSATLSMAYAAARFVESSLRALAGDPDVYECTFVQSEITDLPFFASRVKLGKNGVESVISADLQGVTEYEAKALEALKAELKASIEKGIAFVNKQREAAASV

SEQ ID NO: 6200 - protein, 176 aa, Zea mays subsp. mays
  peptide (1)..(176): Ceres Seq. ID no. 12349124
CTFLPPKARARGPKTSAFSCPPACLLVIAAAHEPPAPCRPALYGSAPTSPRGARKRSRQKPPPRRARRSGMASTVTFNPVSAQAALIQKPRNLGAISYAGLKMPASVSSGSESSFLGWNASLRAAVTPRIVPKAKSGSQISPQASYKVAVLGAAGGIGQPLGLLVKMSPLVRAASV

SEQ ID NO: 6201 - DNA, 878 bp, Zea mays subsp. mays
  misc_feature (1)..(878): Ceres Seq. ID no. 12402552
  misc_feature (1)..(878): Ortholog of  Ceres SEQ ID NO 13596116 as cited in SEQ ID NO 62213
atctcccacctcgatccctgcactgcaagcaacaaagttctactctgtccatctagctcccaagaaaccaatccgtaccagcgctatccggccggccatggcggcggcgcgccggctctccctgcccctcgtcctgctggtcgtcctggccgtcgccgggcgcgcggcggcgcaggactacgacttcttctacctcgtgctgcagtggccgggggcctactgcgacaccaagcagagctgctgctaccccaagtccggcaagccggcggcggacttcgggatccacggcctctggcccaaccgcgacgacggcacgtacccgcagaactgcagccccgacaacgccttcaacccgtcgaaggtgagcgacctgctgagcagcctccgcgccaagtggccgacgctggcgtgcccgtccaacgacgggctgcgcttctggggccacgagtgggagaagcacggcacctgcgcagccgacgtcttcgacgagcacggctacttccaggccgcgctgcgcctccgcgaccagctgggagtcctcggcgcgctcacctccgccggcgtcaagcccgacggcggctactacacgctgagccagatcaagggcgccatccgccagggcaccggcttcgagccctacgtggagtgcaaccgcgacgaggccggcaacagccagctctaccagctctacttctgcgtcgacgccgccggcgacagcttcgtcgactgccccgtcctccccagcggcaggccctgcggcaaccggatcgagttcccggctttctaagctaactcactcttcacgtcagttgctgcaatatactgctagtccttttgcttgcattctatgcaagaggataatggaatgttcattcccc

SEQ ID NO: 6202 - protein, 263 aa, Zea mays subsp. mays
  peptide (1)..(263): Ceres Seq. ID no. 12402553
ISHLDPCTASNKVLLCPSSSQETNPYQRYPAGHGGGAPALPAPRPAGRPGRRRARGGAGLRLLLPRAAVAGGLLRHQAELLLPQVRQAGGGLRDPRPLAQPRRRHVPAELQPRQRLQPVEGERPAEQPPRQVADAGVPVQRRAALLGPRVGEARHLRSRRLRRARLLPGRAAPPRPAGSPRRAHLRRRQARRRLLHAEPDQGRHPPGHRLRALRGVQPRRGRQQPALPALLLRRRRRRQLRRLPRPPQRQALRQPDRVPGFLS

SEQ ID NO: 6203 - protein, 261 aa, Zea mays subsp. mays
  peptide (1)..(261): Ceres Seq. ID no. 12402554
SPTSIPALQATKFYSVHLAPKKPIRTSAIRPAMAAARRLSLPLVLLVVLAVAGRAAAQDYDFFYLVLQWPGAYCDTKQSCCYPKSGKPAADFGIHGLWPNRDDGTYPQNCSPDNAFNPSKVSDLLSSLRAKWPTLACPSNDGLRFWGHEWEKHGTCAADVFDEHGYFQAALRLRDQLGVLGALTSAGVKPDGGYYTLSQIKGAIRQGTGFEPYVECNRDEAGNSQLYQLYFCVDAAGDSFVDCPVLPSGRPCGNRIEFPAF

SEQ ID NO: 6204 - protein, 229 aa, Zea mays subsp. mays
  peptide (1)..(229): Ceres Seq. ID no. 12402555
MAAARRLSLPLVLLVVLAVAGRAAAQDYDFFYLVLQWPGAYCDTKQSCCYPKSGKPAADFGIHGLWPNRDDGTYPQNCSPDNAFNPSKVSDLLSSLRAKWPTLACPSNDGLRFWGHEWEKHGTCAADVFDEHGYFQAALRLRDQLGVLGALTSAGVKPDGGYYTLSQIKGAIRQGTGFEPYVECNRDEAGNSQLYQLYFCVDAAGDSFVDCPVLPSGRPCGNRIEFPAF

SEQ ID NO: 6205 - DNA, 1082 bp, Zea mays subsp. mays
  misc_feature (1)..(1082): Ceres Seq. ID no. 12401972
  misc_feature (1)..(1082): Ortholog of  Ceres SEQ ID NO 13595919 as cited in SEQ ID NO 67751
ccatcagcgatccttctctcttgagtgtcctcccatctcatccaatccatccccgccaccacaggcaaaggcaacccaaaaggagccgccatgggctcccgctacgaggtggaggtgacggtggggtcggcgagcaacctgaagaacgtcaactggcgcaacggcgacctccggccctacgccgtgctgtgggtggacgacgggcccaagtgctccacccgcgtcgaccccgacaacggcgaggaccccgtgtgggacgagaaggtggtggtccccgtcccgcccgcctccgccgcgcgcctgggcgacgccgtcctccacatcgacgtcgtccacgccgccggcgacgacgccgacgccgtcaagccgctcgtgggctccgcgcgcctcccgctccgcgacgtcctcgatgacgccggcggcgtcggcggcgccagggtctcgcgcacgctcaggctgaagcggccctcgggccgcccgcagggccggctcnaggcccgcgtcgccgtccgcgaggccgcgccgccgccgcgctactacgacccgaacccgtacccggcgcccgcgtacgggaaccccgnnnncgccnncgacccgtactacgcggcgccgccggcgtacggcggacangccgccgtacgccgcgccgccggtggggtacccggccnacgctcctcctcctacggcggtggttatggctacggagctgctgctccgacggcgtacggcgctgaggctgctccactacctgcccagcagcagaagagcagcaagatggggatggggacggggctggccgtgggcgccgcggcggggctgctgggcggcctcgcgctggcggaaggggcgagctacgtggaggacaagttcgaggatcgcgtcgccgagagggtggaggaggagacgttcggcgacggagattacgatgacgattactagaatgaagcaggtcggagaggagatcatgatcatgcatacggaaccgaaatccaggcaacaagtcgaagtcgagtagctcaaatgtattcaaataataagtgagatcaccccagtcgagaaaaaaaatcaaaacttgaaccatg

SEQ ID NO: 6206 - protein, 282 aa, Zea mays subsp. mays
  peptide (1)..(282): Ceres Seq. ID no. 12401973
  misc_feature (135)..(135): Xaa is any aa, unknown or other
  misc_feature (164)..(164): Xaa is any aa, unknown or other
  misc_feature (165)..(165): Xaa is any aa, unknown or other
  misc_feature (167)..(167): Xaa is any aa, unknown or other
  misc_feature (180)..(180): Xaa is any aa, unknown or other
  misc_feature (193)..(193): Xaa is any aa, unknown or other
MGSRYEVEVTVGSASNLKNVNWRNGDLRPYAVLWVDDGPKCSTRVDPDNGEDPVWDEKVVVPVPPASAARLGDAVLHIDVVHAAGDDADAVKPLVGSARLPLRDVLDDAGGVGGARVSRTLRLKRPSGRPQGRLXARVAVREAAPPPRYYDPNPYPAPAYGNPXXAXDPYYAAPPAYGGXAAVRRAAGGVPGXRSSSYGGGYGYGAAAPTAYGAEAAPLPAQQQKSSKMGMGTGLAVGAAAGLLGGLALAEGASYVEDKFEDRVAERVEEETFGDGDYDDDY

SEQ ID NO: 6207 - DNA, 1060 bp, Zea mays subsp. mays
  misc_feature (1)..(1060): Ceres Seq. ID no. 12350534
  misc_feature (1)..(1060): Ortholog of  Ceres SEQ ID NO 14304124 as cited in SEQ ID NO 56378
  misc_feature (1)..(1060): Ortholog of  Ceres SEQ ID NO 12585331 as cited in SEQ ID NO 62912
  misc_feature (1)..(1060): Ortholog of  Ceres SEQ ID NO 13654964 as cited in SEQ ID NO 63176
gcaaaccgcgtctcgcgcgaagaatccgcatttccccttccccgcaccgcaccgcaccgcacccaacccccgtcggagagagagatggcatcggtggcggagatgcagcccctcgcgccggcggggtaccgccgcgcgccggagatgaaggagaaggtggaggcgtcggtggtggacctggaggccgggaccggggagacgctgtacccggggatctcgcgcggggagagcgccctccgatggggcttcgtccgcaaggtctacggcatcctcgctgcgcagctgctcctcaccaccgccgtctccgccctcaccgttctccaccccaccctcaacgccacgctctccgactccccgggcctcgcgctcgtgctcgccgtcctgcccttcatcctgatgatcccattgtaccattatcagcacaagcacccacacaatttcgttttcctgggtctgttcacgttgtgcttgagcttcagcatcggcgtggcttgtgctaacacccaaggaaaaatcgttctggaggctttagtgctgacggctggcgtggtggtttctctgactgcgtatgctttctgggcgtcaaagaagggcaaggaatttgggtacctggggcctatcctgtcttccgcgcttactatcctcgtcctaactagctttcttcaggttttcttcccactgggacccgtgtcggtgggcttgttcggtggtctaggggctctggtcttctcaggcttcatcctgtacgacaccgagaacctgatcaagcgccacacctacgacgagtacatctgggcgtcggttgggctgtacctcgacatcctgaacctgttcctctccatcctgaacatgctcaggagcatgcaatccgacaactagcctcttgatcgaacacggtatacccccatggtaaatgcggtcctgtgctctggttgttagaggacgggatcgacgtgcgacatatgtattgtgtgagcccactcgtgtcaacactgcaaacaattgtggtcatgtcaccttgtatgttcttggtcacttttcaaacaattgtaagtacctc

SEQ ID NO: 6208 - protein, 292 aa, Zea mays subsp. mays
  peptide (1)..(292): Ceres Seq. ID no. 12350535
ANRVSREESAFPLPRTAPHRTQPPSEREMASVAEMQPLAPAGYRRAPEMKEKVEASVVDLEAGTGETLYPGISRGESALRWGFVRKVYGILAAQLLLTTAVSALTVLHPTLNATLSDSPGLALVLAVLPFILMIPLYHYQHKHPHNFVFLGLFTLCLSFSIGVACANTQGKIVLEALVLTAGVVVSLTAYAFWASKKGKEFGYLGPILSSALTILVLTSFLQVFFPLGPVSVGLFGGLGALVFSGFILYDTENLIKRHTYDEYIWASVGLYLDILNLFLSILNMLRSMQSDN

SEQ ID NO: 6209 - protein, 264 aa, Zea mays subsp. mays; identical to SEQ ID NO: 5153
  peptide (1)..(264): Ceres Seq. ID no. 12350536

SEQ ID NO: 6210 - protein, 258 aa, Zea mays subsp. mays; identical to SEQ ID NO: 5154
  peptide (1)..(258): Ceres Seq. ID no. 12350537

SEQ ID NO: 6211 - DNA, 1251 bp, Zea mays subsp. mays
  misc_feature (1)..(1251): Ceres Seq. ID no. 12402548
  misc_feature (1)..(1251): Ortholog of  Ceres SEQ ID NO 12474685 as cited in SEQ ID NO 88
  misc_feature (1)..(1251): Ortholog of  Ceres SEQ ID NO 13638574 as cited in SEQ ID NO 51223
  misc_feature (1)..(1251): Ortholog of  Ceres SEQ ID NO 14311531 as cited in SEQ ID NO 51466
  misc_feature (1)..(1251): Ortholog of  Ceres SEQ ID NO 15170465 as cited in SEQ ID NO 52798
  misc_feature (1)..(1251): Ortholog of  Ceres SEQ ID NO 12610790 as cited in SEQ ID NO 56123
  misc_feature (1)..(1251): Ortholog of  Ceres SEQ ID NO 13655636 as cited in SEQ ID NO 63519
  misc_feature (1)..(1251): Ortholog of  Ceres SEQ ID NO 13655896 as cited in SEQ ID NO 64970
  misc_feature (1)..(1251): Ortholog of  Ceres SEQ ID NO 12627322 as cited in SEQ ID NO 67162
aatctagcatcagcgcgcggggtctgagagcagagcggcagggcgccatggcggcatcggtggcgctgagcagcgggcaccggatgccggcggtggggctgggcgtgtggcggatggagaaggcggacatccgcggcctcatccacacagcgctccgcgtcggctaccgccacctggactgcgccgctgactaccagaacgaagctgaagttggtgacgcgctcgcagaggcattccagaccggactcgtcaagcgggaggacctgttcatcacaaccaagctgtggaactcagaccatgggcatgtgcttgaagcctgcaaggacagcctgaagaagctgcagctagactatctcgacctctacctcatccatttcccagtagccactcggcacaccggagtcggcacgacttctagcgctctgggtgacgatggcgtgctggacatcgacaccactatctccctggaaacgacatggcacgcgatggaagagcttgtttccatggggctggtgcgcagcattggaatcagcaactacgacatcttcctcaccagagactgcctggcctacgccaagataaagccggcggtgaaccagatcgagacgcacccctacttccagcgcgactcacttgtcaagttctgccagaagcacgggatctgcgtgaccgcgcacaccccgctgggtggctccaccgccaacgccgagtggttcgggacggtctcgtgcctggacgaccctgtcatcaagagcttggctgataagtacggcaagacgccggcgcagctcgtcctccgctggggtctgcagcgggacacggtggtgatccccaagacctccaaggtggagaggctgcaggagaactttgacgtcttcggtttcgacatctccggcgaggacatggagaggatgaaggccatcgaccggaagtaccggactaaccagcctgccaagttctggggcatcgacctctatgcttagcttttagttcggttgcgttgcgtcgcgtactcgcgtgctgcgtctctcggcccccccagacaagacagcatcaataatgaggataccctcagacggcatcagtcaaagtcatgaggatctcagacagcatcttccatcacatgtgacggtgtgaggttgatggtagggtttggtatccccacgtgtccctctctctttcagctcagctaatcatcaccatgtagactacgcagtgtttgcctccgattatttactgtttttcttcctt

SEQ ID NO: 6212 - protein, 326 aa, Zea mays subsp. mays
  peptide (1)..(326): Ceres Seq. ID no. 12402549
SSISARGLRAERQGAMAASVALSSGHRMPAVGLGVWRMEKADIRGLIHTALRVGYRHLDCAADYQNEAEVGDALAEAFQTGLVKREDLFITTKLWNSDHGHVLEACKDSLKKLQLDYLDLYLIHFPVATRHTGVGTTSSALGDDGVLDIDTTISLETTWHAMEELVSMGLVRSIGISNYDIFLTRDCLAYAKIKPAVNQIETHPYFQRDSLVKFCQKHGICVTAHTPLGGSTANAEWFGTVSCLDDPVIKSLADKYGKTPAQLVLRWGLQRDTVVIPKTSKVERLQENFDVFGFDISGEDMERMKAIDRKYRTNQPAKFWGIDLYA

SEQ ID NO: 6213 - protein, 311 aa, Zea mays subsp. mays
  peptide (1)..(311): Ceres Seq. ID no. 12402550
MAASVALSSGHRMPAVGLGVWRMEKADIRGLIHTALRVGYRHLDCAADYQNEAEVGDALAEAFQTGLVKREDLFITTKLWNSDHGHVLEACKDSLKKLQLDYLDLYLIHFPVATRHTGVGTTSSALGDDGVLDIDTTISLETTWHAMEELVSMGLVRSIGISNYDIFLTRDCLAYAKIKPAVNQIETHPYFQRDSLVKFCQKHGICVTAHTPLGGSTANAEWFGTVSCLDDPVIKSLADKYGKTPAQLVLRWGLQRDTVVIPKTSKVERLQENFDVFGFDISGEDMERMKAIDRKYRTNQPAKFWGIDLYA

SEQ ID NO: 6214 - protein, 299 aa, Zea mays subsp. mays
  peptide (1)..(299): Ceres Seq. ID no. 12402551
MPAVGLGVWRMEKADIRGLIHTALRVGYRHLDCAADYQNEAEVGDALAEAFQTGLVKREDLFITTKLWNSDHGHVLEACKDSLKKLQLDYLDLYLIHFPVATRHTGVGTTSSALGDDGVLDIDTTISLETTWHAMEELVSMGLVRSIGISNYDIFLTRDCLAYAKIKPAVNQIETHPYFQRDSLVKFCQKHGICVTAHTPLGGSTANAEWFGTVSCLDDPVIKSLADKYGKTPAQLVLRWGLQRDTVVIPKTSKVERLQENFDVFGFDISGEDMERMKAIDRKYRTNQPAKFWGIDLYA

SEQ ID NO: 6215 - DNA, 629 bp, Zea mays subsp. mays
  misc_feature (1)..(629): Ceres Seq. ID no. 12372485
  misc_feature (1)..(629): Ortholog of  Ceres SEQ ID NO 15179739 as cited in SEQ ID NO 62016
atgatggtgtcaagctttgggatcttcggaaattaagaaattttaggaccttctctccctatgattcagatacgccaacaaatactgtggaatttgattttagtggaaactatcttgccattggtggttcagatataagggtctaccaagtagctaatgttaaggccgaatggaatctcatcaagacattaccagatttatctggaacagggaaagtaacttcggtaaagttcggagcagatgctaagtacatagccgtaggttctatggaccgcaatctacggatatttggcctccctggagacgaccaaatggaggaatcaaccacagcggcagagtgaggaaaatccatggttatcagcattcattgtctatttggccactgtcgagaggtaatccacggagacacaccgctggcgcccgtgacacttggcctgtttggttacttgctaaaaattgctacacatttttgtgccacacttgtttaagcacacttgtttaaggtgtttaaggttatacgctcaaattccgcgtcacagcttgtttgtcactcataagagaatattgcctgtaaaatgagagtctgaacgacttgcccgtaaaatgagatggaaaatcagttagctgct

SEQ ID NO: 6216 - protein, 112 aa, Zea mays subsp. mays
  peptide (1)..(112): Ceres Seq. ID no. 12372486
DGVKLWDLRKLRNFRTFSPYDSDTPTNTVEFDFSGNYLAIGGSDIRVYQVANVKAEWNLIKTLPDLSGTGKVTSVKFGADAKYIAVGSMDRNLRIFGLPGDDQMEESTTAAE

SEQ ID NO: 6217 - DNA, 888 bp, Zea mays subsp. mays
  misc_feature (1)..(888): Ceres Seq. ID no. 12402297
  misc_feature (1)..(888): Ortholog of  Ceres SEQ ID NO 12584695 as cited in SEQ ID NO 62263
acaaaataagttctgcggcggcgatggcgctctcctcctcccggccgaagcacctcctgcgccccctcctgcggggtttccacgcctcagcgcgggccctggcgcgggtggagccgcacgagttctccaagcccagcgagtacctgggcagctgggagcccgcggcggagcctcgggaggcgtgggcgcggctggaccggctgcgcaaggggtacgcgagcgaggtgcgggagctgcggcggcagtacgcctacgaggtgcagctgttgcaggccgagcggcagcggaaggccgacgccagagccgaggccgcccgcgccgccaaccaggagcgcaaggccgccaagctcgccgccgcccagacgcgcgccgccgagcgccgcgcgttcgaggaggacttccgccagaccctcatgaaagaaagagctgagaagctggagagctggcggaagaaggagaagcgcaaagaggagaagaaggcaataaagaaggagctcctgcgcaggaagagcagcatgtggctttctgaagataagattgaagaacaaatacaaactgctatcatgcaaaccactcctctatgaggttggttctgcgaggaaagctgataatagtagcttgcgaatcatgaggaggggggtggacatcacatggacgtgctcgtcgttacctgtgagaagctaataagaacggacctggtatttggcgtggaaaaggccgtgtgtttatttagttagacttgatcacaccaaaagctgtgcctggagagatggctgaatctgctgtgccttcctttttcacgatccatttgttgttctcgtctgcttaaactcttggcgtgatctggacggaacatatttttggcaattttcttgacgaagaatgacc

SEQ ID NO: 6218 - protein, 193 aa, Zea mays subsp. mays
  peptide (1)..(193): Ceres Seq. ID no. 12402298
KISSAAAMALSSSRPKHLLRPLLRGFHASARALARVEPHEFSKPSEYLGSWEPAAEPREAWARLDRLRKGYASEVRELRRQYAYEVQLLQAERQRKADARAEAARAANQERKAAKLAAAQTRAAERRAFEEDFRQTLMKERAEKLESWRKKEKRKEEKKAIKKELLRRKSSMWLSEDKIEEQIQTAIMQTTPL

SEQ ID NO: 6219 - protein, 186 aa, Zea mays subsp. mays
  peptide (1)..(186): Ceres Seq. ID no. 12402299
MALSSSRPKHLLRPLLRGFHASARALARVEPHEFSKPSEYLGSWEPAAEPREAWARLDRLRKGYASEVRELRRQYAYEVQLLQAERQRKADARAEAARAANQERKAAKLAAAQTRAAERRAFEEDFRQTLMKERAEKLESWRKKEKRKEEKKAIKKELLRRKSSMWLSEDKIEEQIQTAIMQTTPL

SEQ ID NO: 6220 - protein, 142 aa, Zea mays subsp. mays
  peptide (1)..(142): Ceres Seq. ID no. 12402300
QNKFCGGDGALLLPAEAPPAPPPAGFPRLSAGPGAGGAARVLQAQRVPGQLGARGGASGGVGAAGPAAQGVRERGAGAAAAVRLRGAAVAGRAAAEGRRQSRGRPRRQPGAQGRQARRRPDARRRAPRVRGGLPPDPHERKS

SEQ ID NO: 6221 - DNA, 1401 bp, Zea mays subsp. mays
  misc_feature (1)..(1401): Ceres Seq. ID no. 12409176
  misc_feature (1)..(1401): Ortholog of  Ceres SEQ ID NO 15224803 as cited in SEQ ID NO 56572
  misc_feature (1)..(1401): Ortholog of  Ceres SEQ ID NO 13502952 as cited in SEQ ID NO 62271
  misc_feature (1)..(1401): Ortholog of  Ceres SEQ ID NO 13502973 as cited in SEQ ID NO 68052
  misc_feature (1)..(1401): Ortholog of  Ceres SEQ ID NO 13596000 as cited in SEQ ID NO 68188
aaccaccaccatagatcgatccttgagttgacgaaaacatacacagctgctagctaatcctgccgtgagtgcaatgcatgcgaagatgacgaagcccgcagccatcgttgttgctgctatcgccgtcctctccgtcagcctgctggctggggtcgtcgtgccttgcccttgcgcggcccagcggcgacttctccatcgtgggctactcagaggaggacctgtcgtcgcacgagagcctggcggagctgttcgagcgctggctgtcccgccaccgcagggcgtacgccagcctggaggagaagctccggcggttccaggtgttcaaggacaacctgcaccacatcgacgagaccaaccgcaaggtgagcagctactggctgggcctcaacgagttcgccgacctcacgcacgacgagttcaaggccacctacctcggcctacggagcagtgttggcgatggtggtagtggtatcgatgacgacgacgagccggaggaggaggagggctacgagggtgtggacggggcgagcctccccaagtcggtggactggcggagcaagggcgcggtgacgggggtaaagaaccagggccagtgcggcagctgctgggccttctccacggtggccgccgtcgagggcatcaaccagatcgtcacgggcaacctcacggcgctgtcggagcaggagctcatcgactgcgacacggacggcaacaacggctgcaacggcggcctcatggactacgccttctcctacatcgcacacaacggcggcctccacacggaggaggcctacccgtacctcatggaggaaggcacctgccagcgcagcagcagcagcgagaagaagtggccgggatcgtcggaggacgccaacgacgatgccgcggtggtcaccatctccgggtacgaggacgtgccgaggaacaacgagcaggcgctgctcaaagcgctggcgcaacagcccgtcagcgtcgccatcgaggcctccggcaggaacttccagttctacagcggcggcgtcttcgatgggccctgcggcacgcagctggaccacggggtagcggccgtcggctacgggacggcggccaagggccatgactacatcatcgtcaagaactcgtgggggcccagctggggcgagaaggggtacatccgcatgaggaggggcaccggcaagcgccagggcctctgcggcatcaacaagatggcctcctacccaaccaagaactgaactcagatcatcgattcatcgtcaagcagcagctggctgattactcccactgctggcgctccacgcttcactagttcttcgtcgttctccttcacttccattgttttcaagattggacgatctttcgttgtttgaaatgaaataataatgatgatggaattagtgttcc

SEQ ID NO: 6222 - protein, 165 aa, Zea mays subsp. mays
  peptide (1)..(165): Ceres Seq. ID no. 12409177
MDYAFSYIAHNGGLHTEEAYPYLMEEGTCQRSSSSEKKWPGSSEDANDDAAVVTISGYEDVPRNNEQALLKALAQQPVSVAIEASGRNFQFYSGGVFDGPCGTQLDHGVAAVGYGTAAKGHDYIIVKNSWGPSWGEKGYIRMRRGTGKRQGLCGINKMASYPTKN

SEQ ID NO: 6223 - protein, 142 aa, Zea mays subsp. mays
  peptide (1)..(142): Ceres Seq. ID no. 12409178
MEEGTCQRSSSSEKKWPGSSEDANDDAAVVTISGYEDVPRNNEQALLKALAQQPVSVAIEASGRNFQFYSGGVFDGPCGTQLDHGVAAVGYGTAAKGHDYIIVKNSWGPSWGEKGYIRMRRGTGKRQGLCGINKMASYPTKN

SEQ ID NO: 6224 - protein, 130 aa, Zea mays subsp. mays
  peptide (1)..(130): Ceres Seq. ID no. 12409179
MHAKMTKPAAIVVAAIAVLSVSLLAGVVVPCPCAAQRRLLHRGLLRGGPVVAREPGGAVRALAVPPPQGVRQPGGEAPAVPGVQGQPAPHRRDQPQGEQLLAGPQRVRRPHARRVQGHLPRPTEQCWRWW

SEQ ID NO: 6225 - DNA, 912 bp, Zea mays subsp. mays
  misc_feature (1)..(912): Ceres Seq. ID no. 12414036
  misc_feature (1)..(912): Ortholog of  Ceres SEQ ID NO 13660597 as cited in SEQ ID NO 67655
gcacgagaccattacctagaacatcctaatcgaaaaatcagccctcacgcatgtggcacgcgatgggccggatctgaggttgagtgtgcgatcccgttggcatatcgacaaagtttggtgggtcccaccgcagatcccggcccggtaggtactagttccgccgtcccccctccctagtctccggggaggaccgtctcggccgcgagagtgcgctcgtcgactccactcagctctctcgctccctctcctcccccaaggccccagagacaggcagccggcgaggcccgccgccgcgaagcaatggatttcaaggggttctgggagtccagattcgggggcaagaaggaacccgagccggagcagaacgggcacgccaacggggtccagaaccagaagaggacctccgatctggcggtctacgagcagttcgagcagcaggccaggcagacccaggtccgagccgccgcgattcgcgacggagacgctgatgtcataagccccttctaccttcatttgagtcagctgaaatgcgtaatctcgcagagacattgttgagggatattattcgcgggagcccagatgtgaaatgggagagcatcaaaggactggaaaatgcaaaacgccttctaaaagaggctgttgtcatgcccataaagtacccaaaatacttcactggtctcctttctccatggaaaggcatcttactttttggccccccagggacaggaaagacaatgctggcaaaagcggtcgctactgagtgcaaaaccaccttcttcaacatttcagcatcatcaattgtcagcaaatggcgtggagattcagagaagcttgtcaaagttctgtttgagcttgctaggcatcatgcaccatccacaatattccttgatgaaatagatgctatcatcagcc

SEQ ID NO: 6226 - protein, 128 aa, Zea mays subsp. mays
  peptide (1)..(128): Ceres Seq. ID no. 12414037
MRNLAETLLRDIIRGSPDVKWESIKGLENAKRLLKEAVVMPIKYPKYFTGLLSPWKGILLFGPPGTGKTMLAKAVATECKTTFFNISASSIVSKWRGDSEKLVKVLFELARHHAPSTIFLDEIDAIIS

SEQ ID NO: 6227 - protein, 89 aa, Zea mays subsp. mays
  peptide (1)..(89): Ceres Seq. ID no. 12414038
MPIKYPKYFTGLLSPWKGILLFGPPGTGKTMLAKAVATECKTTFFNISASSIVSKWRGDSEKLVKVLFELARHHAPSTIFLDEIDAIIS

SEQ ID NO: 6228 - protein, 84 aa, Zea mays subsp. mays
  peptide (1)..(84): Ceres Seq. ID no. 12414039
MDFKGFWESRFGGKKEPEPEQNGHANGVQNQKRTSDLAVYEQFEQQARQTQVRAAAIRDGDADVISPFYLHLSQLKCVISQRHC

SEQ ID NO: 6229 - DNA, 1621 bp, Zea mays subsp. mays
  misc_feature (1)..(1621): Ceres Seq. ID no. 12384203
  misc_feature (1)..(1621): Ortholog of  Ceres SEQ ID NO 14310917 as cited in SEQ ID NO 53231
  misc_feature (1)..(1621): Ortholog of  Ceres SEQ ID NO 15175492 as cited in SEQ ID NO 56277
  misc_feature (1)..(1621): Ortholog of  Ceres SEQ ID NO 13582350 as cited in SEQ ID NO 56734
  misc_feature (1)..(1621): Ortholog of  Ceres SEQ ID NO 12578315 as cited in SEQ ID NO 62451
  misc_feature (1)..(1621): Ortholog of  Ceres SEQ ID NO 13597439 as cited in SEQ ID NO 64081
  misc_feature (1)..(1621): Ortholog of  Ceres SEQ ID NO 13597233 as cited in SEQ ID NO 64370
  misc_feature (1)..(1621): Ortholog of  Ceres SEQ ID NO 15226354 as cited in SEQ ID NO 0
gcacgagaccattacctagaacatcctaatcgaaaagcatacttgcagctcgcacatctcatggtgtcgcaggaacgacaagagccagctgtgcctagcagcagcagcagcagcgccaagcgcgcagccacgtccatggacgccagcccggccccgccgctcctcctccgcgcccccactcccagccccagcattgacctccccgctggcaaggacaaggccgacgcggcggccagcaaggccggcgcggccgtgttcgacctgcgccgggagcccaagatccccgcgccattcctgtggccgcaggaagaggcgcggccgtcctcggccgcggagctggaggtgccgatggtggacgtgggcgtgctgcgcaatggcgaccgcgcggggctgcggcgcgccgcggcgcaggtggccgcggcgtgcgcgacgcacgggttcttccaggtgtgcgggcacggcgtggacgcggcgctggggcgcgccgcgctggacggcgccagcgacttcttccggctgccgctcgccgagaancagcgcgcccggcgcgtccccggcaccgtgtccgggtacaagagcgcgcacgccgaccggttcgcggccaagctcccctggaaggagaccctgncgttcggctaccacgacggcgccgcnncnnctgtcgtcgtggactacttngtcggcaccctcggccaggatttcgagccaatggggtgggtgtaccagaggtactgcgagnagatgaaggagctgtcgctgacgatcatggagctgctggagctgagcctgggcgtggagctgcgcggctactaccgggagttcttcgaggacagccggtccatcatgcggtgcaactactacccgccgtgcccggagccggagcgcacgctgggcacgggcccgcactgcgaccccacggcgctgaccatcctcctgcaggacgacgtgggcgggctggaggtgctggtggacggtgagtggcgccccgtccggcccgtcccgggcgccatggtcatcaacatcggcgacaccttcatggcgctgtcgaacgggaggtacaagagctgcctgcaccgcgcggtggtgaaccagcggcgggcgcggcggtcgctggccttcttcctgtgcccgcgcgaggaccgggtggtgcgcccgccggccagtgctgcgccgcggcgctacccggacttcacctgggccgacctcatgcgcttcacgcagcgccactaccgcgccgacacccgcacgctggacgccttcacccgctggctctcccacggcccggcccaggcggcggcgcctccctgcacctagcgagccgggccaaggccgtctctttcgccccacgtgcgcgcccagctgggcaggtgggcagacacgcggcccgcgggccccgcgccgccttgccattttttgacgctggccctactgctgtgctactagtgtacatatgcaagagtacatatatatatatatatacgtattttctatatattatatataaaagcaaggcggcccggtgcccttctcttgttttgtccacaactgtttgatcccattattctatggaccatggatacttcaatgtttgtactaagaccgtgaacgtgggattcttttc

SEQ ID NO: 6230 - protein, 437 aa, Zea mays subsp. mays
  peptide (1)..(437): Ceres Seq. ID no. 12384204
  misc_feature (178)..(178): Xaa is any aa, unknown or other
  misc_feature (210)..(210): Xaa is any aa, unknown or other
  misc_feature (218)..(218): Xaa is any aa, unknown or other
  misc_feature (219)..(219): Xaa is any aa, unknown or other
  misc_feature (220)..(220): Xaa is any aa, unknown or other
  misc_feature (226)..(226): Xaa is any aa, unknown or other
  misc_feature (247)..(247): Xaa is any aa, unknown or other
ARDHYLEHPNRKAYLQLAHLMVSQERQEPAVPSSSSSSAKRAATSMDASPAPPLLLRAPTPSPSIDLPAGKDKADAAASKAGAAVFDLRREPKIPAPFLWPQEEARPSSAAELEVPMVDVGVLRNGDRAGLRRAAAQVAAACATHGFFQVCGHGVDAALGRAALDGASDFFRLPLAEXQRARRVPGTVSGYKSAHADRFAAKLPWKETLXFGYHDGAXXXVVVDYXVGTLGQDFEPMGWVYQRYCEXMKELSLTIMELLELSLGVELRGYYREFFEDSRSIMRCNYYPPCPEPERTLGTGPHCDPTALTILLQDDVGGLEVLVDGEWRPVRPVPGAMVINIGDTFMALSNGRYKSCLHRAVVNQRRARRSLAFFLCPREDRVVRPPASAAPRRYPDFTWADLMRFTQRHYRADTRTLDAFTRWLSHGPAQAAAPPCT

SEQ ID NO: 6231 - protein, 417 aa, Zea mays subsp. mays
  peptide (1)..(417): Ceres Seq. ID no. 12384205
  misc_feature (158)..(158): Xaa is any aa, unknown or other
  misc_feature (190)..(190): Xaa is any aa, unknown or other
  misc_feature (198)..(198): Xaa is any aa, unknown or other
  misc_feature (199)..(199): Xaa is any aa, unknown or other
  misc_feature (200)..(200): Xaa is any aa, unknown or other
  misc_feature (206)..(206): Xaa is any aa, unknown or other
  misc_feature (227)..(227): Xaa is any aa, unknown or other
MVSQERQEPAVPSSSSSSAKRAATSMDASPAPPLLLRAPTPSPSIDLPAGKDKADAAASKAGAAVFDLRREPKIPAPFLWPQEEARPSSAAELEVPMVDVGVLRNGDRAGLRRAAAQVAAACATHGFFQVCGHGVDAALGRAALDGASDFFRLPLAEXQRARRVPGTVSGYKSAHADRFAAKLPWKETLXFGYHDGAXXXVVVDYXVGTLGQDFEPMGWVYQRYCEXMKELSLTIMELLELSLGVELRGYYREFFEDSRSIMRCNYYPPCPEPERTLGTGPHCDPTALTILLQDDVGGLEVLVDGEWRPVRPVPGAMVINIGDTFMALSNGRYKSCLHRAVVNQRRARRSLAFFLCPREDRVVRPPASAAPRRYPDFTWADLMRFTQRHYRADTRTLDAFTRWLSHGPAQAAAPPCT

SEQ ID NO: 6232 - protein, 392 aa, Zea mays subsp. mays
  peptide (1)..(392): Ceres Seq. ID no. 12384206
  misc_feature (133)..(133): Xaa is any aa, unknown or other
  misc_feature (165)..(165): Xaa is any aa, unknown or other
  misc_feature (173)..(173): Xaa is any aa, unknown or other
  misc_feature (174)..(174): Xaa is any aa, unknown or other
  misc_feature (175)..(175): Xaa is any aa, unknown or other
  misc_feature (181)..(181): Xaa is any aa, unknown or other
  misc_feature (202)..(202): Xaa is any aa, unknown or other
MDASPAPPLLLRAPTPSPSIDLPAGKDKADAAASKAGAAVFDLRREPKIPAPFLWPQEEARPSSAAELEVPMVDVGVLRNGDRAGLRRAAAQVAAACATHGFFQVCGHGVDAALGRAALDGASDFFRLPLAEXQRARRVPGTVSGYKSAHADRFAAKLPWKETLXFGYHDGAXXXVVVDYXVGTLGQDFEPMGWVYQRYCEXMKELSLTIMELLELSLGVELRGYYREFFEDSRSIMRCNYYPPCPEPERTLGTGPHCDPTALTILLQDDVGGLEVLVDGEWRPVRPVPGAMVINIGDTFMALSNGRYKSCLHRAVVNQRRARRSLAFFLCPREDRVVRPPASAAPRRYPDFTWADLMRFTQRHYRADTRTLDAFTRWLSHGPAQAAAPPCT

SEQ ID NO: 6233 - DNA, 1112 bp, Zea mays subsp. mays
  misc_feature (1)..(1112): Ceres Seq. ID no. 12379356
  misc_feature (1)..(1112): Ortholog of  Ceres SEQ ID NO 14307351 as cited in SEQ ID NO 54892
aacacgcatccgcagcactccctcctcggtccctcctctgcttcacacagaccagtgcgcgctcaattcccccctctagcgcctccaccgcaccaaaccggtccaacgggacctatgctctagcctcagagcaaaccaccgcctgaattgggcggcaattgggggaggattcgcggcaggcagggcgcggatccgttggcgggatgattgcggctgtcaacagagtgccggcgggctggggcgaggatgagatgtccgtgctgccgcggcacaccaaggtggtggtcaccggcaacaaccgcaccaagtcggtgctcgtgggattgcacggggtcgtgaagaaagccgtcggcctcggaggatggcattggctggtccttactaatggaatagaggtaaagctgcagcggaatgctttaagtgtgatagaacctccgactggcaacgaggatgatgataaatttgattgtgaaaacatgcagtggaatagttcagatatggcctccgatgatgcactatcaccaaagccacagcggtcacggagcaggcagcataggggtttccacagaaaatccatcagccgttcaatgtcatgtgactcccactccaagacgtctgtttcatcttcctcaagagctcacacgaaagttgacctaagcaagctagaactgactgcactgctgagatattggcgtcacttcaatctcgatgcatgtcctaatccatccagagagcagttagttgatgctgttcaaaggcacttcacagcccagcaattggatgagttgcaggtcattgtcggctttgtgcaagctgcaaagaggctaaagacgactatgaaagtggcctgactgtgaagcctgaacttcaactaacagattcaagagaggatgtagcatgtttgatgaatgttgccgtgctatgtaatatatatgcatgaagttctttagattcaggtggctaggttaatggacaactagactatgttagcctcatctgatgtagatatgcagtatcctgtctaaagatgtttcaacctctagctcagttctttcctgctgactggatgtggattgaaatgacaagtttaaaacaagttattttgtcatccc

SEQ ID NO: 6234 - protein, 215 aa, Zea mays subsp. mays
  peptide (1)..(215): Ceres Seq. ID no. 12379357
MIAAVNRVPAGWGEDEMSVLPRHTKVVVTGNNRTKSVLVGLHGVVKKAVGLGGWHWLVLTNGIEVKLQRNALSVIEPPTGNEDDDKFDCENMQWNSSDMASDDALSPKPQRSRSRQHRGFHRKSISRSMSCDSHSKTSVSSSSRAHTKVDLSKLELTALLRYWRHFNLDACPNPSREQLVDAVQRHFTAQQLDELQVIVGFVQAAKRLKTTMKVA

SEQ ID NO: 6235 - protein, 199 aa, Zea mays subsp. mays
  peptide (1)..(199): Ceres Seq. ID no. 12379358
MSVLPRHTKVVVTGNNRTKSVLVGLHGVVKKAVGLGGWHWLVLTNGIEVKLQRNALSVIEPPTGNEDDDKFDCENMQWNSSDMASDDALSPKPQRSRSRQHRGFHRKSISRSMSCDSHSKTSVSSSSRAHTKVDLSKLELTALLRYWRHFNLDACPNPSREQLVDAVQRHFTAQQLDELQVIVGFVQAAKRLKTTMKVA

SEQ ID NO: 6236 - protein, 124 aa, Zea mays subsp. mays
  peptide (1)..(124): Ceres Seq. ID no. 12379359
MQWNSSDMASDDALSPKPQRSRSRQHRGFHRKSISRSMSCDSHSKTSVSSSSRAHTKVDLSKLELTALLRYWRHFNLDACPNPSREQLVDAVQRHFTAQQLDELQVIVGFVQAAKRLKTTMKVA

SEQ ID NO: 6237 - DNA, 1012 bp, Zea mays subsp. mays
  misc_feature (1)..(1012): Ceres Seq. ID no. 12434780
  misc_feature (1)..(1012): Ortholog of  Ceres SEQ ID NO 15168977 as cited in SEQ ID NO 20587
gcacgagaccattacctagaacatcctaatcgaaaaagacttcgctcggtaagagtcctacctcaaggacgatagacatgttgaacagcctttgccgcgacaggaacaacatggtcttccttgtgagcgcaaagagccggatgactctgaacgaatggttcttaccatgtgagagccttggactagcagctgaacacggctgcttcctcaggctgagaagagacgcagaatgggagacatgcgttccggtgatagactgcagctggaagcagatcgcagagcctgtgatgaagacctataccgagactacggacgggtcgactattgaggacaaggagactgccatcgtgtggtgctacgaggacgccgatccagatttcggatcctgccaggccaaggagctccacgaccatctggagagcgtgcttgcaaacgagccggtctcagtgaaagctggacccaacctcgtcgaggtgaagccacagggcgtaagcaagggcctggtggcgaagcggatcctgtcgacgacgcaggagcggggcgacgccgacgacgacctgccggacttcgtgctgtgcgtgggcgacgaccggtccgacgaggacatgttcgaggtgatcgcggcggcggcggccgcgaggggcgtgtcctccctgcaggcggaggcggaggtgttcgcgtgcacggtggggcgcaagcccagcaaggccaagtactacctggacgaccccgcggacatcgtgcgcctcgtccagggcctcgccagcgtctccgacgacgaccagacgcacgccccaccgccgccgcctccctcggcggcgacgacggcggcggacaccgtgccgaggtgaaccgtgtcggcgtgcgggggtgcggtgcagttagctctaggcggcatgagaccttgtggttgtggtggaactagtggaagggaccgtcgctcgcgactgttcgcaggtggtgtacaaaatgctctaggaatgttgtggtctgggaatgtccttgttcgtgc

SEQ ID NO: 6238 - protein, 257 aa, Zea mays subsp. mays
  peptide (1)..(257): Ceres Seq. ID no. 12434781
MLNSLCRDRNNMVFLVSAKSRMTLNEWFLPCESLGLAAEHGCFLRLRRDAEWETCVPVIDCSWKQIAEPVMKTYTETTDGSTIEDKETAIVWCYEDADPDFGSCQAKELHDHLESVLANEPVSVKAGPNLVEVKPQGVSKGLVAKRILSTTQERGDADDDLPDFVLCVGDDRSDEDMFEVIAAAAAARGVSSLQAEAEVFACTVGRKPSKAKYYLDDPADIVRLVQGLASVSDDDQTHAPPPPPPSAATTAADTVPR

SEQ ID NO: 6239 - protein, 246 aa, Zea mays subsp. mays
  peptide (1)..(246): Ceres Seq. ID no. 12434782
MVFLVSAKSRMTLNEWFLPCESLGLAAEHGCFLRLRRDAEWETCVPVIDCSWKQIAEPVMKTYTETTDGSTIEDKETAIVWCYEDADPDFGSCQAKELHDHLESVLANEPVSVKAGPNLVEVKPQGVSKGLVAKRILSTTQERGDADDDLPDFVLCVGDDRSDEDMFEVIAAAAAARGVSSLQAEAEVFACTVGRKPSKAKYYLDDPADIVRLVQGLASVSDDDQTHAPPPPPPSAATTAADTVPR

SEQ ID NO: 6240 - protein, 236 aa, Zea mays subsp. mays
  peptide (1)..(236): Ceres Seq. ID no. 12434783
MTLNEWFLPCESLGLAAEHGCFLRLRRDAEWETCVPVIDCSWKQIAEPVMKTYTETTDGSTIEDKETAIVWCYEDADPDFGSCQAKELHDHLESVLANEPVSVKAGPNLVEVKPQGVSKGLVAKRILSTTQERGDADDDLPDFVLCVGDDRSDEDMFEVIAAAAAARGVSSLQAEAEVFACTVGRKPSKAKYYLDDPADIVRLVQGLASVSDDDQTHAPPPPPPSAATTAADTVPR

SEQ ID NO: 6241 - DNA, 610 bp, Zea mays subsp. mays
  misc_feature (1)..(610): Ceres Seq. ID no. 12594280
  misc_feature (1)..(610): Ortholog of  Ceres SEQ ID NO 15173480 as cited in SEQ ID NO 63586
cggtcagcgctgactagcaaggagccaagcaggacataatactgaagcaggctgcggctgcggctgcagcaacaagtcaaggaggttgaaggcgaattagagagaagaggaagatgttggcggcgacggatccgatgctgtggcacaaggtggccgccgtctccggggttgccgctttggggctcggcacctacggcgcgcacatgttccgccccaagaaccccgcgtacaaagaggtttggcacacggcgtccctgtaccatctcgtccacaccgcggcgctgctcggggcgcccatcaccaagcgccccaacgttttcggagggctcctcactgctggaattgtgctcttctctggaacgtgctacaccgtggcttatcttgaagacaggaagttttcttcaccggcaccattggggggctttgcgtttattgctgcttgggccagcctcctcttctgattaaattgtgcttttccaagaaaacaaaaaaagtcataaacctctctatatggtgttttatcaggttgtgaaaaatatacttgtaaagtgtatacagtggacagtatgcgcctctgtttaataattcaatctgtgattcctatgtttct

SEQ ID NO: 6242 - protein, 115 aa, Zea mays subsp. mays
  peptide (1)..(115): Ceres Seq. ID no. 12594281
MLAATDPMLWHKVAAVSGVAALGLGTYGAHMFRPKNPAYKEVWHTASLYHLVHTAALLGAPITKRPNVFGGLLTAGIVLFSGTCYTVAYLEDRKFSSPAPLGGFAFIAAWASLLF

SEQ ID NO: 6243 - protein, 108 aa, Zea mays subsp. mays
  peptide (1)..(108): Ceres Seq. ID no. 12594282
MLWHKVAAVSGVAALGLGTYGAHMFRPKNPAYKEVWHTASLYHLVHTAALLGAPITKRPNVFGGLLTAGIVLFSGTCYTVAYLEDRKFSSPAPLGGFAFIAAWASLLF

SEQ ID NO: 6244 - protein, 85 aa, Zea mays subsp. mays
  peptide (1)..(85): Ceres Seq. ID no. 12594283
MFRPKNPAYKEVWHTASLYHLVHTAALLGAPITKRPNVFGGLLTAGIVLFSGTCYTVAYLEDRKFSSPAPLGGFAFIAAWASLLF

SEQ ID NO: 6245 - DNA, 728 bp, Zea mays subsp. mays
  misc_feature (1)..(728): Ceres Seq. ID no. 12351303
  misc_feature (1)..(728): Ortholog of  Ceres SEQ ID NO 13599568 as cited in SEQ ID NO 509
  misc_feature (1)..(728): Ortholog of  Ceres SEQ ID NO 15172903 as cited in SEQ ID NO 51839
  misc_feature (1)..(728): Ortholog of  Ceres SEQ ID NO 15177108 as cited in SEQ ID NO 52015
  misc_feature (1)..(728): Ortholog of  Ceres SEQ ID NO 13638595 as cited in SEQ ID NO 52050
  misc_feature (1)..(728): Ortholog of  Ceres SEQ ID NO 13594748 as cited in SEQ ID NO 52114
  misc_feature (1)..(728): Ortholog of  Ceres SEQ ID NO 15170313 as cited in SEQ ID NO 59293
  misc_feature (1)..(728): Ortholog of  Ceres SEQ ID NO 12623490 as cited in SEQ ID NO 61136
  misc_feature (1)..(728): Ortholog of  Ceres SEQ ID NO 15173596 as cited in SEQ ID NO 63267
  misc_feature (1)..(728): Ortholog of  Ceres SEQ ID NO 12583993 as cited in SEQ ID NO 68098
  misc_feature (1)..(728): Ortholog of  Ceres SEQ ID NO 13654535 as cited in SEQ ID NO 68227
aaataattggccgctcagcgcttcgggtgaacgggttcccttgcaagcgtgaggcgaacgtgacggcggacgacttcttcttcggcgggctcgccgcggccgccgacgtgtactcgggcaacccgatggggtcggcggcgacggcggcggacgtgtcggtgctcccgggtctcaacaccctgggcgtgtccatggcgcgcacggacttcgcgccgtcgggcggcgtcagcccgccgcacgtgcacccgcgcgccacggagatcctcttcgtcgtggagggcaccctcgaggtgggcttcgtcacctcggcaaaccgcctcttcagccgcgccgtcggcaagggagaggtgttcgtgttcccccgcggcctcgtgcacttccagcgcatcgtcggggcggcgcccgccgtggcgatctcggctttcaacgcccagctgcctggcacgcagacggtcgccggggcactgttcggcgctgcgccggcggtgccgacggacgtgctggcgcgggcgttacagatcgacggtggagcgatcgagtacatcaagtccaagtttgcgcccaactagggcatgtctcgaattgcaaatgctcaggtgatcgaaaagagggtacgaacgaacataactactaaactaggtgtgtgcccgtgcgttgcaacgggaacgtataataccacggtaatttatgtacaaatgtgtgttatattgttatgaaaaaagttttgt

SEQ ID NO: 6246 - protein, 188 aa, Zea mays subsp. mays
  peptide (1)..(188): Ceres Seq. ID no. 12351304
IIGRSALRVNGFPCKREANVTADDFFFGGLAAAADVYSGNPMGSAATAADVSVLPGLNTLGVSMARTDFAPSGGVSPPHVHPRATEILFVVEGTLEVGFVTSANRLFSRAVGKGEVFVFPRGLVHFQRIVGAAPAVAISAFNAQLPGTQTVAGALFGAAPAVPTDVLARALQIDGGAIEYIKSKFAPN

SEQ ID NO: 6247 - protein, 147 aa, Zea mays subsp. mays
  peptide (1)..(147): Ceres Seq. ID no. 12351305
MGSAATAADVSVLPGLNTLGVSMARTDFAPSGGVSPPHVHPRATEILFVVEGTLEVGFVTSANRLFSRAVGKGEVFVFPRGLVHFQRIVGAAPAVAISAFNAQLPGTQTVAGALFGAAPAVPTDVLARALQIDGGAIEYIKSKFAPN

SEQ ID NO: 6248 - protein, 125 aa, Zea mays subsp. mays
  peptide (1)..(125): Ceres Seq. ID no. 12351306
MARTDFAPSGGVSPPHVHPRATEILFVVEGTLEVGFVTSANRLFSRAVGKGEVFVFPRGLVHFQRIVGAAPAVAISAFNAQLPGTQTVAGALFGAAPAVPTDVLARALQIDGGAIEYIKSKFAPN

SEQ ID NO: 6249 - DNA, 1053 bp, Zea mays subsp. mays
  misc_feature (1)..(1053): Ceres Seq. ID no. 12350538
  misc_feature (1)..(1053): Ortholog of  Ceres SEQ ID NO 13595414 as cited in SEQ ID NO 56539
  misc_feature (1)..(1053): Ortholog of  Ceres SEQ ID NO 14314396 as cited in SEQ ID NO 60048
acagagcgaaacaatccgcagagactcggaagtcggaaagaatccctcctgttcttcgtcaaccctccagaacctgctctctcttcctctacgagactacgaccgtgtaaggacatggccgtcgagcgcttgaagaccgggttcgagcagttcaaggccgacgtctacgacaagaagccggagctgttcgagccactcaaggcgcaccagtcgcccaagtacatggtgttcgcctgctccgactcccgcgtgtgcccgtcggtgaccctgggcctgcaccccggcgaggcctttgccgtccgcaacatcgccagcatggtgccgccctacgacaagaccaagtacgccggcgtcggctccgccatcgagtacgccgtctgcgccctcaaggtggaggtcatcgtggtcataggccacagccgctgcggcgggatcaaggcgctcctctccctcgaggacggcgcgcccgacaagttccacttcgtggaggaatgggtcagggtcggcgccccggcgaagtccaaggtgctggccgaccacgcctcggtgcctttcgaagaccaatgctccatcctggagaaggaggccgtcaacgtgtcccttgagaacctcaagtcctacccgttcgtcaaggaagggctggagaaagggaccctcaagctggtcggcggccattacgacttcgtcaatggaaagttcgagacatgggaaccctaagtgaccatacgtacaaatacgccccaccggacttatttgccgcgtggagtgcttaattatttgccgatatatatatacacatatacaggaaatgaccggtgagaactatactgttgtaataataatagcgaggaaaaaaatatttgcatccgggatataaaaaacacttctttacaaatagaagaaaaataaattactaagagattaatttataaatttgatatgtttttgtgggcctgcctctaggtagtagatgtgaggggctttaaaagagtgtttgtatcccgaatgcaaagaattttttccagaaaggaatacatgtgttctttgacttcg

SEQ ID NO: 6250 - protein, 238 aa, Zea mays subsp. mays
  peptide (1)..(238): Ceres Seq. ID no. 12350539
TERNNPQRLGSRKESLLFFVNPPEPALSSSTRLRPCKDMAVERLKTGFEQFKADVYDKKPELFEPLKAHQSPKYMVFACSDSRVCPSVTLGLHPGEAFAVRNIASMVPPYDKTKYAGVGSAIEYAVCALKVEVIVVIGHSRCGGIKALLSLEDGAPDKFHFVEEWVRVGAPAKSKVLADHASVPFEDQCSILEKEAVNVSLENLKSYPFVKEGLEKGTLKLVGGHYDFVNGKFETWEP

SEQ ID NO: 6251 - protein, 200 aa, Zea mays subsp. mays
  peptide (1)..(200): Ceres Seq. ID no. 12350540
MAVERLKTGFEQFKADVYDKKPELFEPLKAHQSPKYMVFACSDSRVCPSVTLGLHPGEAFAVRNIASMVPPYDKTKYAGVGSAIEYAVCALKVEVIVVIGHSRCGGIKALLSLEDGAPDKFHFVEEWVRVGAPAKSKVLADHASVPFEDQCSILEKEAVNVSLENLKSYPFVKEGLEKGTLKLVGGHYDFVNGKFETWEP

SEQ ID NO: 6252 - protein, 164 aa, Zea mays subsp. mays
  peptide (1)..(164): Ceres Seq. ID no. 12350541
MVFACSDSRVCPSVTLGLHPGEAFAVRNIASMVPPYDKTKYAGVGSAIEYAVCALKVEVIVVIGHSRCGGIKALLSLEDGAPDKFHFVEEWVRVGAPAKSKVLADHASVPFEDQCSILEKEAVNVSLENLKSYPFVKEGLEKGTLKLVGGHYDFVNGKFETWEP

SEQ ID NO: 6253 - DNA, 936 bp, Zea mays subsp. mays
  misc_feature (1)..(936): Ceres Seq. ID no. 12361812
  misc_feature (1)..(936): Ortholog of  Ceres SEQ ID NO 13600689 as cited in SEQ ID NO 0
  misc_feature (1)..(936): Ortholog of  Ceres SEQ ID NO 15178120 as cited in SEQ ID NO 0
atccaatccaaagaagcctcctgctgtccacctcattccccatccgtccccgtgggaagcggggcaaagcgacgtacgctaccctttgcgtgcgcgtagcatttaaccaagcaactcccaatccccactcctcccccaccatttcttccctctcgccttcccctccgccggcaatcccacgtccaatcagccgccgctccagccttccatccatccatcccgtagctgctctctattacgccagcgatcgagagaccaagaggagcaggagcgatggcgaggagctcgttcaagctggagcaccccttcgaaaggaggcaagctgaggctaaccgcatcagggagaagtaccccgatagaattcctgtcattgttgagaaggccgagaggagtgacatcccagacatcgacaagaaaaagtaccttgtccccgccgacctcacagtgggacagtttgtgtacgtggtgcggaagcgcatcaagctcagcgccgagaaggcgatcttcatcttcgtgaagaacaccctcccaccaacagctgccctgatgtctgccatctacgaggagaacaaggacgaggacgggttcctctacatgacctacagcggcgagaacacctttgggctgctatgagtggcgccgcgccgccgtggatcgacgtcggacaatgcccctcctcctgtaaatacttaaaaaaaaaataggcgtctcaagaatccgtgtacataataatctggcatgtcttgcatcaaaagcaactcgttgcgtccactgtctgttgaaactattgaagcgtactaaacatttaagcaactcgttgcgtccactgtcagctctgggttgcttcagaagttctgtcacctgctgcgtcctccgtgagcttgtcgatgtggcaaagtaacacagggtgcctgtggtcattccacccgtttaggt

SEQ ID NO: 6254 - protein, 119 aa, Zea mays subsp. mays
  peptide (1)..(119): Ceres Seq. ID no. 12361813
MARSSFKLEHPFERRQAEANRIREKYPDRIPVIVEKAERSDIPDIDKKKYLVPADLTVGQFVYVVRKRIKLSAEKAIFIFVKNTLPPTAALMSAIYEENKDEDGFLYMTYSGENTFGLL

SEQ ID NO: 6255 - protein, 107 aa, Zea mays subsp. mays
  peptide (1)..(107): Ceres Seq. ID no. 12361814
PIQRSLLLSTSFPIRPRGKRGKATYATLCVRVAFNQATPNPHSSPTISSLSPSPPPAIPRPISRRSSLPSIHPVAALYYASDRETKRSRSDGEELVQAGAPLRKEAS

SEQ ID NO: 6256 - DNA, 725 bp, Zea mays subsp. mays
  misc_feature (1)..(725): Ceres Seq. ID no. 13580161
  misc_feature (1)..(725): Ortholog of  Ceres SEQ ID NO 13595008 as cited in SEQ ID NO 56041
acaagctcgacggaactgtgactagaactagtagatccaatccaacactcgggacgaaattaaaggagacgacgcatcatccggccggcagnatccgcacggtcaccaccatgncggcgcaggagggcggcatgaggctggtgtcgcacccgatcgcngcgcacgacgggcggctgccgcggcagtacacggcggaggggcagggcgccaagaaggacatgtcgccgccgctggagtggtacggcgtgcccgagggcgngcggntgctagcgctgctggtgcaggacatcgacgccgaccccgtcgtgccgtggacgcactgggtggtggccaacatcccgcccgccaccaggggcctccccgaggggttctccggcgccgcgggaccggggccggggcgcgagctcggcggcctgcaggagggggtcaacgactggaagcagcccggctggcgcgggcccgtgccgccctcccacggccaccgcatccagttcaagctctacgcgctcgacgacgaggtgcacctcggcaacaaggtgaccagggataagctcatggaggcgatcgacgggcacgtgctggaagaagccgagctgatcgccgtgttccagggagtcgtcgccaacaactaacacactcggagatatctttgttggcgtgctttgtatttgcttgtgtggctaccatgtaattctgatcgaataaaagggaacttcacatgtgcc

SEQ ID NO: 6257 - protein, 209 aa, Zea mays subsp. mays
  peptide (1)..(209): Ceres Seq. ID no. 13580162
  misc_feature (30)..(30): Xaa is any aa, unknown or other
  misc_feature (38)..(38): Xaa is any aa, unknown or other
  misc_feature (52)..(52): Xaa is any aa, unknown or other
  misc_feature (86)..(86): Xaa is any aa, unknown or other
  misc_feature (88)..(88): Xaa is any aa, unknown or other
KLDGTVTRTSRSNPTLGTKLKETTHHPAGXIRTVTTMXAQEGGMRLVSHPIXAHDGRLPRQYTAEGQGAKKDMSPPLEWYGVPEGXRXLALLVQDIDADPVVPWTHWVVANIPPATRGLPEGFSGAAGPGPGRELGGLQEGVNDWKQPGWRGPVPPSHGHRIQFKLYALDDEVHLGNKVTRDKLMEAIDGHVLEEAELIAVFQGVVANN

SEQ ID NO: 6258 - protein, 173 aa, Zea mays subsp. mays
  peptide (1)..(173): Ceres Seq. ID no. 13580163
  misc_feature (2)..(2): Xaa is any aa, unknown or other
  misc_feature (16)..(16): Xaa is any aa, unknown or other
  misc_feature (50)..(50): Xaa is any aa, unknown or other
  misc_feature (52)..(52): Xaa is any aa, unknown or other
MXAQEGGMRLVSHPIXAHDGRLPRQYTAEGQGAKKDMSPPLEWYGVPEGXRXLALLVQDIDADPVVPWTHWVVANIPPATRGLPEGFSGAAGPGPGRELGGLQEGVNDWKQPGWRGPVPPSHGHRIQFKLYALDDEVHLGNKVTRDKLMEAIDGHVLEEAELIAVFQGVVANN

SEQ ID NO: 6259 - protein, 166 aa, Zea mays subsp. mays
  peptide (1)..(166): Ceres Seq. ID no. 13580164
  misc_feature (9)..(9): Xaa is any aa, unknown or other
  misc_feature (43)..(43): Xaa is any aa, unknown or other
  misc_feature (45)..(45): Xaa is any aa, unknown or other
MRLVSHPIXAHDGRLPRQYTAEGQGAKKDMSPPLEWYGVPEGXRXLALLVQDIDADPVVPWTHWVVANIPPATRGLPEGFSGAAGPGPGRELGGLQEGVNDWKQPGWRGPVPPSHGHRIQFKLYALDDEVHLGNKVTRDKLMEAIDGHVLEEAELIAVFQGVVANN

SEQ ID NO: 6260 - DNA, 653 bp, Zea mays subsp. mays
  misc_feature (1)..(653): Ceres Seq. ID no. 12401344
  misc_feature (1)..(653): Ortholog of  Ceres SEQ ID NO 14308099 as cited in SEQ ID NO 58651
  misc_feature (1)..(653): Ortholog of  Ceres SEQ ID NO 13596893 as cited in SEQ ID NO 62932
ttatgctgatacagttggagacttgggatatgcatcagagcttggaaactatgcagagtatagtggtgctcctaatgaggaggaggttctgaattattctagagttgttcttgattgtgcaactgctgatcctgatggccgcaagagagcccttctcattggaggtggcatagctaacttcactgatgttgctaccacattcaatggcatcatccgagccttaagggagaaggaatccaagttgaaggcttcaagaatgcacatttatgtccgccgaggtggtccaaattaccaatctggactggctaaaatgcgtaagcttggtgcagaactcggcgttccaattgaggtgtatgggccagaagcgactatgactggaatctgcaaacaagcaattgaatgcatcatggctgcagcgtaatcagagcgtagctctgggtagtttgggatctgcaaacacgcaattgaatgtgtcatggactcagcataaatgagagatggatagtagttgcattatatagttcacacatggtgtttctgttttttgtttcagatatgttgtagcgtgttgtttgaacgaaaccttcacagatcattactgcaaagaaattgctgtgtgttaaaataaattcaaagtctagttttgtgccttt

SEQ ID NO: 6261 - protein, 139 aa, Zea mays subsp. mays
  peptide (1)..(139): Ceres Seq. ID no. 12401345
YADTVGDLGYASELGNYAEYSGAPNEEEVLNYSRVVLDCATADPDGRKRALLIGGGIANFTDVATTFNGIIRALREKESKLKASRMHIYVRRGGPNYQSGLAKMRKLGAELGVPIEVYGPEATMTGICKQAIECIMAAA

SEQ ID NO: 6262 - DNA, 818 bp, Zea mays subsp. mays
  misc_feature (1)..(818): Ceres Seq. ID no. 12359956
  misc_feature (1)..(818): Ortholog of  Ceres SEQ ID NO 15172878 as cited in SEQ ID NO 51924
  misc_feature (1)..(818): Ortholog of  Ceres SEQ ID NO 13662000 as cited in SEQ ID NO 61553
ctgaccacaaatccgatccgtagccgcggtgcctcgctttcgagtacgagcggctactcccagcggctgcggcggcggcggcgatgagcgcggtgaacatcaccaacgtggcggtgctggataaccccaccgccttcctcaatcccttccagtttgagatctcctacgagtgcctcgtgcccctcgacgacgatctggagtggaagcttatatatgttggatcagctgaagatgaaaactacgatcaacagcttgagagcgtgcttgttggccctgtcaatgttgggacctaccgttttgtccttcaggctgacccaccggatccctcaaagatccgtgaggaagacataattggtgtgactgtgctgctattgacatgctcttacatgggccaggagttcatgagagtaggctactacgtgaacaatgattatgacgatgaacaattgagagaagagcctccagcaaaggtgctaattgaccgggtgcaaagaaatatcttggccgacaagccccgagtcaccaagttccctatcaacttccatcctgaacccagtacaggcccggggcagcagcagcagcagcaggaaccccagacgacctcgccagaaaaccacacaggcaatggcgaggccaatggtagcaagcctgaggctgaccaatgaacacagttggcttcagatattttgatgcgtgccccttacaggttgtgctgtaatattacaaacgggattagtggttgtgcattgccctgggatcctgaactctgttctgtaacttgagatgcaaatgctgggtacctggatgttttcttaggc

SEQ ID NO: 6263 - protein, 193 aa, Zea mays subsp. mays
  peptide (1)..(193): Ceres Seq. ID no. 12359957
MSAVNITNVAVLDNPTAFLNPFQFEISYECLVPLDDDLEWKLIYVGSAEDENYDQQLESVLVGPVNVGTYRFVLQADPPDPSKIREEDIIGVTVLLLTCSYMGQEFMRVGYYVNNDYDDEQLREEPPAKVLIDRVQRNILADKPRVTKFPINFHPEPSTGPGQQQQQQEPQTTSPENHTGNGEANGSKPEADQ

SEQ ID NO: 6264 - DNA, 1206 bp, Zea mays subsp. mays
  misc_feature (1)..(1206): Ceres Seq. ID no. 12340792
  misc_feature (1)..(1206): Ortholog of  Ceres SEQ ID NO 13596643 as cited in SEQ ID NO 62565
  misc_feature (1)..(1206): Ortholog of  Ceres SEQ ID NO 13597550 as cited in SEQ ID NO 65037
ctcgccggccttctcagaccacaaacattgcgcttgcggcttgccgcccagctatataagtactctcgggaataggcggtcactcatccatcccatctccatctcggagcaaaggcaatccagcaagagtcgctcctttcccttttcgggatacagccagcagaagcaatccggctaacaagtttcttcttcttcttcttctttcctgtcgcagggctcaccgaagtgacgatggcgtttgcggtctccgacgagctgctgggcaccttcgtgccgattgcggtgtactggctctactcggggctctacgtcgtcctggacgggctggggatggacgactacaggctccatcccaagggggaggaggccaggaacatcgtttccaggtggacggtcgtcaggggcgtccttgttcagcaggcgtttcaaatcgctgtctcccttcttctcttcacggttcttggtgatgataatgggactgtgaggaagcagcctctagctttggtaatggcattgcaatttatcattgcaatgtttgtcatggacacatggcagtacttcatgcacagatacatgcatatcaacagattcttgtacaagcacgtccactctaagcaccacactcttgtcgtcccctacgcctttggagctctttacaaccaccccctggaggggctcatcctggacaccgtcggcggcgcgctctcgttcctcatctctggcatgaccccaaggactggcattttcttcttctcgtttgcgaccatcaagaccgtcgatgaccactgtggtctgtggcttcctggaaacatcctccatgtattcttcagcaacaacagcgcttaccatgacatccaccatcagctctacgggaacaagtacaacttctcgcagcccttctttgtcatgtgggacaagatcctcggaacatacatgccttacactctggagacacgcaagggaggtgggtttgaggcacgcccggttaagctcgaccgagcacagcagatcaaggctgattaagcagcgtggtttctcctgtttgtctactacttcccctggtttttttttccttctgactgcatttgtactgtagaggtattttcctgtccatatagtaaaatcctttaggcagatgacatgttgtacccaaaagatgtagcaaatgaaacatcttgctaatgaagatccattggggtttgtttt

SEQ ID NO: 6265 - protein, 263 aa, Zea mays subsp. mays
  peptide (1)..(263): Ceres Seq. ID no. 12340793
MAFAVSDELLGTFVPIAVYWLYSGLYVVLDGLGMDDYRLHPKGEEARNIVSRWTVVRGVLVQQAFQIAVSLLLFTVLGDDNGTVRKQPLALVMALQFIIAMFVMDTWQYFMHRYMHINRFLYKHVHSKHHTLVVPYAFGALYNHPLEGLILDTVGGALSFLISGMTPRTGIFFFSFATIKTVDDHCGLWLPGNILHVFFSNNSAYHDIHHQLYGNKYNFSQPFFVMWDKILGTYMPYTLETRKGGGFEARPVKLDRAQQIKAD

SEQ ID NO: 6266 - protein, 230 aa, Zea mays subsp. mays
  peptide (1)..(230): Ceres Seq. ID no. 12340794
MDDYRLHPKGEEARNIVSRWTVVRGVLVQQAFQIAVSLLLFTVLGDDNGTVRKQPLALVMALQFIIAMFVMDTWQYFMHRYMHINRFLYKHVHSKHHTLVVPYAFGALYNHPLEGLILDTVGGALSFLISGMTPRTGIFFFSFATIKTVDDHCGLWLPGNILHVFFSNNSAYHDIHHQLYGNKYNFSQPFFVMWDKILGTYMPYTLETRKGGGFEARPVKLDRAQQIKAD

SEQ ID NO: 6267 - protein, 171 aa, Zea mays subsp. mays
  peptide (1)..(171): Ceres Seq. ID no. 12340795
MALQFIIAMFVMDTWQYFMHRYMHINRFLYKHVHSKHHTLVVPYAFGALYNHPLEGLILDTVGGALSFLISGMTPRTGIFFFSFATIKTVDDHCGLWLPGNILHVFFSNNSAYHDIHHQLYGNKYNFSQPFFVMWDKILGTYMPYTLETRKGGGFEARPVKLDRAQQIKAD

SEQ ID NO: 6268 - DNA, 1358 bp, Zea mays subsp. mays
  misc_feature (1)..(1358): Ceres Seq. ID no. 12352397
  misc_feature (1)..(1358): Ortholog of  Ceres SEQ ID NO 13592961 as cited in SEQ ID NO 20522
  misc_feature (1)..(1358): Ortholog of  Ceres SEQ ID NO 12583469 as cited in SEQ ID NO 51031
  misc_feature (1)..(1358): Ortholog of  Ceres SEQ ID NO 13596527 as cited in SEQ ID NO 62582
  misc_feature (1)..(1358): Ortholog of  Ceres SEQ ID NO 13597389 as cited in SEQ ID NO 63426
  misc_feature (1)..(1358): Ortholog of  Ceres SEQ ID NO 14303071 as cited in SEQ ID NO 67114
  misc_feature (1)..(1358): Ortholog of  Ceres SEQ ID NO 13595998 as cited in SEQ ID NO 68161
agtattctctgtcttttgtcttgagattaagaagtacagaaagcagtccttcgttgttcgtcaggaaaaagaacaatgcagcacgtaatcctttgcctgcaaatctctctgctactctccagcttctcctatttgatgcaagcccagtacacctcgatctttagcttcggcgactcctacaccgacaccggcaacaaggtcatcctctacggcccggcggcggcggatctgtggatcaacaagccgccgttcgggatgaccttcttcggccatccggccgggcgcctctccgacggcagactggtcatagatttcatcgcccaggcactagggctacctctccttccgccctcgctggcgaaggaccagagcttcaagcaaggcgcgaacttcgccgtggctggcgccacggcgctgaagacgagcactacaagcccagcgctctacccgcagctggccgtcgccggcgatgccgtgcctcctccgaacaacatctccctcgctgacgagctgggctggttcgacgccatgaaacccgcgctctgcggctcaccccaagcatgcaaggactacttcgcgaaggcgctgttcgtcgtgggcgagctgggctggaacgactacggggtcatggtggtcggcggcaaaagcgtcgccgaagcgcaatcctacgtgcctcagatcgtcgcaacaatcgtcgctgccacggagaagctgatcaacgacggcgccacgacggtcgtggtgtcggggatctcgccgatgggctgcgcgccggggaatctggtgctgctggcgagccaggacccggccgactatgagcccgacacggggtgcctcaagggaatgaacgagctatccagggaccacaacgcgcagctgagccaggcgctgacgacgctgggcggcaggtaccccggcgcgcgcgtcacctacgccgacctgtacggccccgtcatcgccttcgcggccgcgccggcgcgcttcggcttcgactccgcgctgagggactgctgcggcagtggcggcggcaagtacaacttcaacctgagcgccgcgtgcgggatgcccggcgtggccgcctgcccgaacccgtcggtgtacgtcaactgggacggcgtccacctcaccgaggcggcgtaccaccgcgtcgccgatggctggctcaggggaccctacgccaacccgcccattctcgccacggcgtagcgaactaggcgacgtggatgcgtgtattaattcaatttcttgcggccgggaatcacgtaaataatttgctgagttttctgtctgatcgtctgattcatgaaccacgtacaatttctctatataatacgtataattatattctgtgttcgtgc

SEQ ID NO: 6269 - protein, 376 aa, Zea mays subsp. mays
  peptide (1)..(376): Ceres Seq. ID no. 12352398
MQHVILCLQISLLLSSFSYLMQAQYTSIFSFGDSYTDTGNKVILYGPAAADLWINKPPFGMTFFGHPAGRLSDGRLVIDFIAQALGLPLLPPSLAKDQSFKQGANFAVAGATALKTSTTSPALYPQLAVAGDAVPPPNNISLADELGWFDAMKPALCGSPQACKDYFAKALFVVGELGWNDYGVMVVGGKSVAEAQSYVPQIVATIVAATEKLINDGATTVVVSGISPMGCAPGNLVLLASQDPADYEPDTGCLKGMNELSRDHNAQLSQALTTLGGRYPGARVTYADLYGPVIAFAAAPARFGFDSALRDCCGSGGGKYNFNLSAACGMPGVAACPNPSVYVNWDGVHLTEAAYHRVADGWLRGPYANPPILATA

SEQ ID NO: 6270 - protein, 356 aa, Zea mays subsp. mays
  peptide (1)..(356): Ceres Seq. ID no. 12352399
MQAQYTSIFSFGDSYTDTGNKVILYGPAAADLWINKPPFGMTFFGHPAGRLSDGRLVIDFIAQALGLPLLPPSLAKDQSFKQGANFAVAGATALKTSTTSPALYPQLAVAGDAVPPPNNISLADELGWFDAMKPALCGSPQACKDYFAKALFVVGELGWNDYGVMVVGGKSVAEAQSYVPQIVATIVAATEKLINDGATTVVVSGISPMGCAPGNLVLLASQDPADYEPDTGCLKGMNELSRDHNAQLSQALTTLGGRYPGARVTYADLYGPVIAFAAAPARFGFDSALRDCCGSGGGKYNFNLSAACGMPGVAACPNPSVYVNWDGVHLTEAAYHRVADGWLRGPYANPPILATA

SEQ ID NO: 6271 - protein, 316 aa, Zea mays subsp. mays
  peptide (1)..(316): Ceres Seq. ID no. 12352400
MTFFGHPAGRLSDGRLVIDFIAQALGLPLLPPSLAKDQSFKQGANFAVAGATALKTSTTSPALYPQLAVAGDAVPPPNNISLADELGWFDAMKPALCGSPQACKDYFAKALFVVGELGWNDYGVMVVGGKSVAEAQSYVPQIVATIVAATEKLINDGATTVVVSGISPMGCAPGNLVLLASQDPADYEPDTGCLKGMNELSRDHNAQLSQALTTLGGRYPGARVTYADLYGPVIAFAAAPARFGFDSALRDCCGSGGGKYNFNLSAACGMPGVAACPNPSVYVNWDGVHLTEAAYHRVADGWLRGPYANPPILATA

SEQ ID NO: 6272 - DNA, 984 bp, Zea mays subsp. mays
  misc_feature (1)..(984): Ceres Seq. ID no. 12362327
  misc_feature (1)..(984): Ortholog of  Ceres SEQ ID NO 12611293 as cited in SEQ ID NO 56191
  misc_feature (1)..(984): Ortholog of  Ceres SEQ ID NO 12583682 as cited in SEQ ID NO 56297
  misc_feature (1)..(984): Ortholog of  Ceres SEQ ID NO 15179225 as cited in SEQ ID NO 0
acggatgctataataactgcccctcaccaaacctcccagccagctctcactcactcacaagtcacacagccacacttgaaccgctgcccgcagcggagggagcttgcacgggccaacgcacacataacacaagctcgtcgtcgatggcgcggtgggctgcggtgctagcgctggccgcggccacggccatcgccgtggcgtccgtggcgggcggcgacatgaacgcggacaagacggagtgcgcggaccagctggtgggcctggcgccgtgcctgcagtacgtgcaggggcaggcccgcgcgccgccgcccgactgctgcggcggcctgcgccaggtgctggggaagagccccaagtgcctgtgcgtgctcgtcaaggacaaggacgaccccaacctgggcatcaagatcaacgccaccctcgcgctcgcgctccccaacgcctgcggcgccacccgcgccaacgtctcccactgcgctcagctcctgcatattcccccgggctccaaagacgccgccgtcttcagtcccggcagcgacaagggctccactgccgctccagccaaggacaactcgacggcgacgaccgactcccgcgcgctgcaggcgaccaccggacgcggcgtgtcctcctcggcggcgaccgccggtgctgcactcacggtgctgctcgccggctacctcctcctgctcgtgccagagctgtcgcctagctcgttctagaccctctgtcaagttgtgccaccagtaggatttgatatgttgttgttctttctagtacgtgacgtgacagacaatttgctgctggtgtccttgttgttgtagtagttgcactgcgtgttcctgttatgctatgggtacgagatgttagggcatgggttaagctaagctaaggcgatgggggatcagtaccttacctctcatctctggctgctgatcctttttgttcttggcactgctgttttatctgaacatttgatcagcc

SEQ ID NO: 6273 - protein, 239 aa, Zea mays subsp. mays
  peptide (1)..(239): Ceres Seq. ID no. 12362328
GCYNNCPSPNLPASSHSLTSHTATLEPLPAAEGACTGQRTHNTSSSSMARWAAVLALAAATAIAVASVAGGDMNADKTECADQLVGLAPCLQYVQGQARAPPPDCCGGLRQVLGKSPKCLCVLVKDKDDPNLGIKINATLALALPNACGATRANVSHCAQLLHIPPGSKDAAVFSPGSDKGSTAAPAKDNSTATTDSRALQATTGRGVSSSAATAGAALTVLLAGYLLLLVPELSPSSF

SEQ ID NO: 6274 - protein, 192 aa, Zea mays subsp. mays
  peptide (1)..(192): Ceres Seq. ID no. 12362329
MARWAAVLALAAATAIAVASVAGGDMNADKTECADQLVGLAPCLQYVQGQARAPPPDCCGGLRQVLGKSPKCLCVLVKDKDDPNLGIKINATLALALPNACGATRANVSHCAQLLHIPPGSKDAAVFSPGSDKGSTAAPAKDNSTATTDSRALQATTGRGVSSSAATAGAALTVLLAGYLLLLVPELSPSSF

SEQ ID NO: 6275 - protein, 167 aa, Zea mays subsp. mays
  peptide (1)..(167): Ceres Seq. ID no. 12362330
MNADKTECADQLVGLAPCLQYVQGQARAPPPDCCGGLRQVLGKSPKCLCVLVKDKDDPNLGIKINATLALALPNACGATRANVSHCAQLLHIPPGSKDAAVFSPGSDKGSTAAPAKDNSTATTDSRALQATTGRGVSSSAATAGAALTVLLAGYLLLLVPELSPSSF

SEQ ID NO: 6276 - DNA, 784 bp, Zea mays subsp. mays
  misc_feature (1)..(784): Ceres Seq. ID no. 12405529
  misc_feature (1)..(784): Ortholog of  Ceres SEQ ID NO 13598935 as cited in SEQ ID NO 1239
  misc_feature (1)..(784): Ortholog of  Ceres SEQ ID NO 13598171 as cited in SEQ ID NO 61357
accaaccactcccaccaccctctcaccgttgtccgttacatatccagcggccacccgttcctcttcctcgtccgcctccacgaccaccatccatcgccatggctggccccaccaccacgctcctcctcctgctgctgtgctccgctgggctcgcgtccggcgccacggcggctgacgacagcgggttcactaccttcaaggtatacttccacgacatcgtggcggggacgagcccgacggccatccgcatcgcgcagggggcggcgtccaacacctcgtccaccagcttcggcgcgatggtggccatcgacgacccgctgacgacgggccccacgcgcgccgcgggcaccgaggtgggccgcgcccagggcacctacacgttcgcggaccagcagacgttcggcctcctcatggtgatggacttcgtgttcacggccggggagcacaagggcagcacgctctccatcctcggccgcaacgaggtgctcagcgacgtccgcgagatgagcatcgtcggcggcagcggaaagttccgcatggcgcgtgggtacgtccaggcgcacaccatcgactccggcttcaaatccggcgagaccgtcgtccagtacaccgtcaacgtcagggcctagctacccgctcgatctaccttgcttgctcctccggcccatggccgactgcccgcccggcttcttgtgcgtcgatccatctccggatgctttgtacacaccttgtcgttcttcgatgttactacatgacatgtatttagtagactgcgatttcagac

SEQ ID NO: 6277 - protein, 208 aa, Zea mays subsp. mays
  peptide (1)..(208): Ceres Seq. ID no. 12405530
QPLPPPSHRCPLHIQRPPVPLPRPPPRPPSIAMAGPTTTLLLLLLCSAGLASGATAADDSGFTTFKVYFHDIVAGTSPTAIRIAQGAASNTSSTSFGAMVAIDDPLTTGPTRAAGTEVGRAQGTYTFADQQTFGLLMVMDFVFTAGEHKGSTLSILGRNEVLSDVREMSIVGGSGKFRMARGYVQAHTIDSGFKSGETVVQYTVNVRA

SEQ ID NO: 6278 - protein, 176 aa, Zea mays subsp. mays
  peptide (1)..(176): Ceres Seq. ID no. 12405531
MAGPTTTLLLLLLCSAGLASGATAADDSGFTTFKVYFHDIVAGTSPTAIRIAQGAASNTSSTSFGAMVAIDDPLTTGPTRAAGTEVGRAQGTYTFADQQTFGLLMVMDFVFTAGEHKGSTLSILGRNEVLSDVREMSIVGGSGKFRMARGYVQAHTIDSGFKSGETVVQYTVNVRA

SEQ ID NO: 6279 - protein, 110 aa, Zea mays subsp. mays
  peptide (1)..(110): Ceres Seq. ID no. 12405532
MVAIDDPLTTGPTRAAGTEVGRAQGTYTFADQQTFGLLMVMDFVFTAGEHKGSTLSILGRNEVLSDVREMSIVGGSGKFRMARGYVQAHTIDSGFKSGETVVQYTVNVRA

SEQ ID NO: 6280 - DNA, 1336 bp, Zea mays subsp. mays
  misc_feature (1)..(1336): Ceres Seq. ID no. 12409154
  misc_feature (1)..(1336): Ortholog of  Ceres SEQ ID NO 14303263 as cited in SEQ ID NO 1224
  misc_feature (1)..(1336): Ortholog of  Ceres SEQ ID NO 13593955 as cited in SEQ ID NO 54278
  misc_feature (1)..(1336): Ortholog of  Ceres SEQ ID NO 14314092 as cited in SEQ ID NO 62788
  misc_feature (1)..(1336): Ortholog of  Ceres SEQ ID NO 13655302 as cited in SEQ ID NO 63307
  misc_feature (1)..(1336): Ortholog of  Ceres SEQ ID NO 13597380 as cited in SEQ ID NO 64054
  misc_feature (1)..(1336): Ortholog of  Ceres SEQ ID NO 12625474 as cited in SEQ ID NO 64169
  misc_feature (1)..(1336): Ortholog of  Ceres SEQ ID NO 13597502 as cited in SEQ ID NO 64681
acattaattgtctcgtcctactgctagcaccagaccgctgtcttcttgagcacattgaggtcttcggatttctccgggggtggccgcgcgcagcaccggcaatgtcgtcatgcaagcggtacttgccgtgcttgatattgttgttgctgcacggaggacgaggtgcggtggccgggaaggtgtcggcaatcgtcgtgttcggcgactcttccgtggacacggggaacaacaatttcatcccgaccatcgcgcggagcaacttctggccgtacggccgcgactacgacgatggcctccccacgggccggttctccaatgggcgcctcgccaccgacttcatctccgaggccttcggcctgccgccgtccatccccgcctacctggacaacaactgcaccatcgaccagctcgccacaggagtctccttcgcctccgctgcgacaggcctcgataacgcgacggccggcgtcttgtccgtgatcacgctggacgagcagctcgcttacttcaaggagtacacggaccgcctcaagatcgccaagggcgaggcggcggcggaggagatcatcagcgaagcgctctacatctggagcatcggcaccaatgacttcatcgagaactactacaacttgccggagcggcggatgcagtatactgtgggcgagtacgaggcctacctgctgggactcgccgaggccgccatacgccgcgtgcacaccctcggcggccgcaaaatggacttcaccgggctcacgcccatgggctgcctccccgccgagcggatcggcaaccgcgacaaccccggggagtgcaacgagcagtacaacgctgttgccaggaccttcaacgccaagctgcaggagctcgtcctcaagcttaacaaggaactgctgggactgcagctcgtcttcgccgacacgtaccagctcctcgccaacgtcgtaaacaggccggccgactacggatttgacaatgctgtgcaaggttgttgtgggacggggcttttcgaggcaggttacttttgtagcttcagcacatcaatgctatgcgaaaatgccaacaagtatgtattctttgatgcgatccatcccacggagaagatgtacaaattgctcgccaataccgtcatcaacaccaccttgcatgtattcatgtgaaattatttgatcttcctaatagaaatgcggcatggacaggtctatacggccatgcctgtgtacaatctataatgcacatagacacacctaccgctcctccacatacaactttgattgttgaaaccatatcatatacaattataaattatagcacgtgtactataaattttatcttatag

SEQ ID NO: 6281 - protein, 384 aa, Zea mays subsp. mays
  peptide (1)..(384): Ceres Seq. ID no. 12409155
INCLVLLLAPDRCLLEHIEVFGFLRGWPRAAPAMSSCKRYLPCLILLLLHGGRGAVAGKVSAIVVFGDSSVDTGNNNFIPTIARSNFWPYGRDYDDGLPTGRFSNGRLATDFISEAFGLPPSIPAYLDNNCTIDQLATGVSFASAATGLDNATAGVLSVITLDEQLAYFKEYTDRLKIAKGEAAAEEIISEALYIWSIGTNDFIENYYNLPERRMQYTVGEYEAYLLGLAEAAIRRVHTLGGRKMDFTGLTPMGCLPAERIGNRDNPGECNEQYNAVARTFNAKLQELVLKLNKELLGLQLVFADTYQLLANVVNRPADYGFDNAVQGCCGTGLFEAGYFCSFSTSMLCENANKYVFFDAIHPTEKMYKLLANTVINTTLHVFM

SEQ ID NO: 6282 - protein, 351 aa, Zea mays subsp. mays
  peptide (1)..(351): Ceres Seq. ID no. 12409156
MSSCKRYLPCLILLLLHGGRGAVAGKVSAIVVFGDSSVDTGNNNFIPTIARSNFWPYGRDYDDGLPTGRFSNGRLATDFISEAFGLPPSIPAYLDNNCTIDQLATGVSFASAATGLDNATAGVLSVITLDEQLAYFKEYTDRLKIAKGEAAAEEIISEALYIWSIGTNDFIENYYNLPERRMQYTVGEYEAYLLGLAEAAIRRVHTLGGRKMDFTGLTPMGCLPAERIGNRDNPGECNEQYNAVARTFNAKLQELVLKLNKELLGLQLVFADTYQLLANVVNRPADYGFDNAVQGCCGTGLFEAGYFCSFSTSMLCENANKYVFFDAIHPTEKMYKLLANTVINTTLHVFM

SEQ ID NO: 6283 - DNA, 1325 bp, Zea mays subsp. mays
  misc_feature (1)..(1325): Ceres Seq. ID no. 12402203
  misc_feature (1)..(1325): Ortholog of  Ceres SEQ ID NO 15175496 as cited in SEQ ID NO 56127
  misc_feature (1)..(1325): Ortholog of  Ceres SEQ ID NO 15175700 as cited in SEQ ID NO 58584
  misc_feature (1)..(1325): Ortholog of  Ceres SEQ ID NO 13596474 as cited in SEQ ID NO 62169
  misc_feature (1)..(1325): Ortholog of  Ceres SEQ ID NO 13598714 as cited in SEQ ID NO 62656
  misc_feature (1)..(1325): Ortholog of  Ceres SEQ ID NO 13596969 as cited in SEQ ID NO 63375
  misc_feature (1)..(1325): Ortholog of  Ceres SEQ ID NO 13597519 as cited in SEQ ID NO 64759
  misc_feature (1)..(1325): Ortholog of  Ceres SEQ ID NO 13597870 as cited in SEQ ID NO 64982
  misc_feature (1)..(1325): Ortholog of  Ceres SEQ ID NO 13656123 as cited in SEQ ID NO 65212
  misc_feature (1)..(1325): Ortholog of  Ceres SEQ ID NO 13595926 as cited in SEQ ID NO 67778
  misc_feature (1)..(1325): Ortholog of  Ceres SEQ ID NO 13662323 as cited in SEQ ID NO 68305
  misc_feature (1)..(1325): Ortholog of  Ceres SEQ ID NO 12567001 as cited in SEQ ID NO 0
gcacgagaccattacctagaacatcctaatcgaaaagacctgtgtacactcgtactcgtctcttcttcgccacacacacacacggctgctagtgtacacagaggcacagcagcaggaggatggccgtagtgccggcggcgccggtggttcttggagtggccatggtgctcgtcgtcctggccgccagcgccggcgcggccgggcagctcaggatggggttctacgccgagagctgcccgggcgtggagcgcgtggtgggcgacttcgtccggcagcacgtccgccgcgtgcccaccgtcgccgccgcgttgctccggctgcacttccacgactgcttcgtcaggggctgcgacgcctccgtcctgctcaactccaccgccggcagcgtggccgagaaggacgcgccgccgaacctgacgctgcgcggcttcgacctcgtcgaccgcgtcaaggcgctcgtcgaggatgcctgccccggcgtcgtctcctgcgccgacgtcctcgcgctcgccgcccgggacgcggtcgtcgccatcggcgggccgtcgtggcgcgtggcgacggggaggagggacggcacggtgtccgccatgcaggaggcgctcgacgacatccccaagcacaccatgaccttcccgcagctggccagcctgttcgccagcaaaggcctcggcgttcgtgacctcgtctggctctcaggcgcgcacacgatcggcatcgcgcactgctcctccttcgcggaccgcctgtacggctaccccggcggcggcgttggcgcggccggcaacgacacggccgacccggccctggacgcgacctacgcggccaacctgcggaggcgcaagtgccgggcggcgggcggcgggtacgcggaggacggcgtggtggagatggacccaggcagccacctgacgttcgacctgggctactaccgcgcgctgctcaagcgcaggggcctgctccgctccgacgccgcgctgctcaccgacgcggcggcgcgcgccgacgtcgagggcgtcgcggccgggcccgaggaggtcttcttccagctgttcgcgcggtccatggccaggctggcggcgctgcaggtcaagaccggcgccgagggggaggtcaggaggaactgcgctgtcgtcaacggcggctaatgcatgtagcttcttgcctttcttcttctttcccttcatggccattactgctagcgaatactgtgattttgctcttgcattttgggtgcttcacgctcgggtgcaattatcatgtcaaagaaattgttaccctcttgctccttttgttagagacttaatagaattgtttggactggc

SEQ ID NO: 6284 - protein, 342 aa, Zea mays subsp. mays
  peptide (1)..(342): Ceres Seq. ID no. 12402204
MAVVPAAPVVLGVAMVLVVLAASAGAAGQLRMGFYAESCPGVERVVGDFVRQHVRRVPTVAAALLRLHFHDCFVRGCDASVLLNSTAGSVAEKDAPPNLTLRGFDLVDRVKALVEDACPGVVSCADVLALAARDAVVAIGGPSWRVATGRRDGTVSAMQEALDDIPKHTMTFPQLASLFASKGLGVRDLVWLSGAHTIGIAHCSSFADRLYGYPGGGVGAAGNDTADPALDATYAANLRRRKCRAAGGGYAEDGVVEMDPGSHLTFDLGYYRALLKRRGLLRSDAALLTDAAARADVEGVAAGPEEVFFQLFARSMARLAALQVKTGAEGEVRRNCAVVNGG

SEQ ID NO: 6285 - protein, 328 aa, Zea mays subsp. mays
  peptide (1)..(328): Ceres Seq. ID no. 12402205
MVLVVLAASAGAAGQLRMGFYAESCPGVERVVGDFVRQHVRRVPTVAAALLRLHFHDCFVRGCDASVLLNSTAGSVAEKDAPPNLTLRGFDLVDRVKALVEDACPGVVSCADVLALAARDAVVAIGGPSWRVATGRRDGTVSAMQEALDDIPKHTMTFPQLASLFASKGLGVRDLVWLSGAHTIGIAHCSSFADRLYGYPGGGVGAAGNDTADPALDATYAANLRRRKCRAAGGGYAEDGVVEMDPGSHLTFDLGYYRALLKRRGLLRSDAALLTDAAARADVEGVAAGPEEVFFQLFARSMARLAALQVKTGAEGEVRRNCAVVNGG

SEQ ID NO: 6286 - protein, 311 aa, Zea mays subsp. mays
  peptide (1)..(311): Ceres Seq. ID no. 12402206
MGFYAESCPGVERVVGDFVRQHVRRVPTVAAALLRLHFHDCFVRGCDASVLLNSTAGSVAEKDAPPNLTLRGFDLVDRVKALVEDACPGVVSCADVLALAARDAVVAIGGPSWRVATGRRDGTVSAMQEALDDIPKHTMTFPQLASLFASKGLGVRDLVWLSGAHTIGIAHCSSFADRLYGYPGGGVGAAGNDTADPALDATYAANLRRRKCRAAGGGYAEDGVVEMDPGSHLTFDLGYYRALLKRRGLLRSDAALLTDAAARADVEGVAAGPEEVFFQLFARSMARLAALQVKTGAEGEVRRNCAVVNGG

SEQ ID NO: 6287 - DNA, 939 bp, Zea mays subsp. mays
  misc_feature (1)..(939): Ceres Seq. ID no. 12402805
  misc_feature (1)..(939): Ortholog of  Ceres SEQ ID NO 13624608 as cited in SEQ ID NO 0
agtcttccttccacctgaaaacccaacccacacgctcgcgcctccgcgaagaaaaacaccgaggcccatggcgccgagaacgtcagagagagcgatgacatcggcggccgcggggctcgcgcgtggcgccggcccgcactacagaggcgtcaggaagcggccgtggggccggtacgccgcggagatccgcgacccggccaagaagagccgcgtgtggctcggcacgttcgacacgcccgaggacgccgcgcgggcctacgacgccgccgcgcgcgagtaccgcggcgccaaggccaagaccaacttctccttcccttcgtgcctgccgctcgccgccgcggacgtggccggcggctgccggagcggcaacagcagcagcaccactaccaccaccaccgtcgactccttcggcggcgacgtgcaggcgccgcccatgcaggccatgccgctcccaccgtccttcagcgccagcgccgccgtacgcttccctttcagcggctaccccgtgacgcacccgtactacttcttcgggcaggcggcagcagggtgccatatgctgaagctgccaccgacgacggtgactgtggctcagagcgactctgactcctcgtccgtcgaggatctgtcgccgtcgccgccggccgccgtgtcagcgacgagagccgccgcgtttgatctcgacctaaactgcccaccgccggccgaggcggaggcatagtcgccggagttttgctgaatgactgcctgtagtttctttcgtcttttacccgtagagagaaaatcggtaggcttagggcccctttgtattcacacggtgtcacgggcacacccacctccgaactctggtactctgatctttagagtgaaactacgaacatgtggtttaaatagttcaaagttaactctataatttatggttcaaagttaactctatgattt

SEQ ID NO: 6288 - protein, 238 aa, Zea mays subsp. mays
  peptide (1)..(238): Ceres Seq. ID no. 12402806
VFLPPENPTHTLAPPRRKTPRPMAPRTSERAMTSAAAGLARGAGPHYRGVRKRPWGRYAAEIRDPAKKSRVWLGTFDTPEDAARAYDAAAREYRGAKAKTNFSFPSCLPLAAADVAGGCRSGNSSSTTTTTTVDSFGGDVQAPPMQAMPLPPSFSASAAVRFPFSGYPVTHPYYFFGQAAAGCHMLKLPPTTVTVAQSDSDSSSVEDLSPSPPAAVSATRAAAFDLDLNCPPPAEAEA

SEQ ID NO: 6289 - protein, 216 aa, Zea mays subsp. mays
  peptide (1)..(216): Ceres Seq. ID no. 12402807
MAPRTSERAMTSAAAGLARGAGPHYRGVRKRPWGRYAAEIRDPAKKSRVWLGTFDTPEDAARAYDAAAREYRGAKAKTNFSFPSCLPLAAADVAGGCRSGNSSSTTTTTTVDSFGGDVQAPPMQAMPLPPSFSASAAVRFPFSGYPVTHPYYFFGQAAAGCHMLKLPPTTVTVAQSDSDSSSVEDLSPSPPAAVSATRAAAFDLDLNCPPPAEAEA

SEQ ID NO: 6290 - protein, 207 aa, Zea mays subsp. mays
  peptide (1)..(207): Ceres Seq. ID no. 12402808
MTSAAAGLARGAGPHYRGVRKRPWGRYAAEIRDPAKKSRVWLGTFDTPEDAARAYDAAAREYRGAKAKTNFSFPSCLPLAAADVAGGCRSGNSSSTTTTTTVDSFGGDVQAPPMQAMPLPPSFSASAAVRFPFSGYPVTHPYYFFGQAAAGCHMLKLPPTTVTVAQSDSDSSSVEDLSPSPPAAVSATRAAAFDLDLNCPPPAEAEA

SEQ ID NO: 6291 - DNA, 1069 bp, Zea mays subsp. mays
  misc_feature (1)..(1069): Ceres Seq. ID no. 12341753
  misc_feature (1)..(1069): Ortholog of  Ceres SEQ ID NO 13587131 as cited in SEQ ID NO 331
  misc_feature (1)..(1069): Ortholog of  Ceres SEQ ID NO 13661176 as cited in SEQ ID NO 61114
acttcgtttctgcctttgaccagctcttgcgctcggcttatctcgtgcggttgttgctagaaccgtccctaattccattcccgtgatctggtttagtcatttcatggttttatttgttgcatctgtggtgaatctgtggtcacttagatcaacataggaagatgtacgcccagttgagttttgagtcggctgttggtgtttccctaactagggactgagggtctgaagctctatacctgttgcaatcgcgtagttgtgcgtgctagatgtatcagagaatccctttgagtagaaagcacacgcacacagctgccacggtattggcattcgtaggtatctgtttcactgacgtgctacctgcacgaggatagcacctgatatttgtgcgctttttttggtgaagattttttgaagctgagaagatggtgctgaagacggaactctgccgcttcagtggccagaagatctatcctgggaaaggcatccggtttattcgtgctgattctcaggttttcctttttgccaactctaaatgcaagcgctacttccacaaccgcctgaagcctgcaaagcttacctggacagcaatgtacaggaagcagcacaagaaggacatccatgctgaagctgtcaagaagaggcgccgcgccaccaagaagccatactcgaggtccattgtgggtgcttccttggaagtgatccagaagaagagagctgagaagcctgaggtccgtgatgctgctagagaagctgctcttcgtgagatcaaggagcgcatcaagaagaccaaggacgagaagaaggcgaagaaggctgaggtgtccaagtcccagaaggcgcagacgaagggcgctgtccagaagggttccaagggccccaagttgggcggcggcggtggcaaacgctgaaaaggaacgaagtgtcatttcgagacctcaccaaagtcacctttgtagtacctgggttaattttgcattttcgttcagagttacttgtgactcttaactaccatgtcaagagaatggattcgttatttttatatattgggagaaatgatcgccgttccttc

SEQ ID NO: 6292 - protein, 161 aa, Zea mays subsp. mays
  peptide (1)..(161): Ceres Seq. ID no. 12341754
MVLKTELCRFSGQKIYPGKGIRFIRADSQVFLFANSKCKRYFHNRLKPAKLTWTAMYRKQHKKDIHAEAVKKRRRATKKPYSRSIVGASLEVIQKKRAEKPEVRDAAREAALREIKERIKKTKDEKKAKKAEVSKSQKAQTKGAVQKGSKGPKLGGGGGKR

SEQ ID NO: 6293 - protein, 106 aa, Zea mays subsp. mays
  peptide (1)..(106): Ceres Seq. ID no. 12341755
MYRKQHKKDIHAEAVKKRRRATKKPYSRSIVGASLEVIQKKRAEKPEVRDAAREAALREIKERIKKTKDEKKAKKAEVSKSQKAQTKGAVQKGSKGPKLGGGGGKR

SEQ ID NO: 6294 - protein, 89 aa, Zea mays subsp. mays
  peptide (1)..(89): Ceres Seq. ID no. 12341756
MLLEKLLFVRSRSASRRPRTRRRRRRLRCPSPRRRRRRALSRRVPRAPSWAAAVANAEKERSVISRPHQSHLCSTWVNFAFSFRVTCDS

SEQ ID NO: 6295 - DNA, 1099 bp, Zea mays subsp. mays; identical to SEQ ID NO: 3493
  misc_feature (1)..(1099): Ceres Seq. ID no. 13577617
  misc_feature (1)..(1099): Ortholog of  Ceres SEQ ID NO 13594544 as cited in SEQ ID NO 51236

SEQ ID NO: 6296 - protein, 296 aa, Zea mays subsp. mays; identical to SEQ ID NO: 3494
  peptide (1)..(296): Ceres Seq. ID no. 13577618

SEQ ID NO: 6297 - protein, 251 aa, Zea mays subsp. mays; identical to SEQ ID NO: 3495
  peptide (1)..(251): Ceres Seq. ID no. 13577619

SEQ ID NO: 6298 - protein, 198 aa, Zea mays subsp. mays; identical to SEQ ID NO: 3496
  peptide (1)..(198): Ceres Seq. ID no. 13577620

SEQ ID NO: 6299 - DNA, 1073 bp, Zea mays subsp. mays
  misc_feature (1)..(1073): Ceres Seq. ID no. 12340796
  misc_feature (1)..(1073): Ortholog of  Ceres SEQ ID NO 13661756 as cited in SEQ ID NO 61398
  misc_feature (1)..(1073): Ortholog of  Ceres SEQ ID NO 13600110 as cited in SEQ ID NO 0
attttcttaaaaaaaaatctcaatcgcaacaacacaaaaaaggcccgcaatatcgattagcgagagtcgttcctccaccaaccaattcgcttctccgtcaacatcacttcatcgtcgacgcctccggcccaccaaccatgccggcggccatggcggctgcggcggcgcagaggctcctcgcggcgagcacgaaaatcattggcgttgggcgcaactacatagcccacgccaaggagctcggcaatccggtccccaaggagcccgtcctgttcctgaagccgacctcgtcgtttctccacgctggtgtggccaccgccgccgtcgagatcccggagccgctcgagtcgctacaccacgaggtcgagctcgccgtcgtcatctcccggcgcgggcgcgacgttcccgaggcgtccgccatggactttgttggaggttatgcacttgctttggacatgacagcaagggaccttcagtctgttgctaagtctgcaggccttccatggactttggctaaaggacaagacaccttcaccccaattagtgcagtagttccaaaatcagctgtcactaatcccgatgatctcgagctctggctgaaggtagatgatgaactaaggcagaaaggaccgacaagcgacatgctattcaagattccttttctgataagctatatcagttccatcatgacattaatggagggtcatgtgatattaacaggtactcctgagggtgtgggtcctgtcagagtaggtcagaagattacagctggtataactgacctaattgatgttgagttcgatgttcagaggcgaaatcggtcattttccacatgatgcaataagcaagaaagtaatggtgaatacaaagtggcagtactcgtcctcgaccttgaatcgcattactggacctgcagccattgcagatagctcttgagcctttccttgatttaatttacctgggttttgagagactatctatgaatatgctaactcgttcgtgaagtatctttttgtcccaattttgattgatggagctttaagcttgcttttctgtatgcaataaaaaaacttatc

SEQ ID NO: 6300 - protein, 276 aa, Zea mays subsp. mays
  peptide (1)..(276): Ceres Seq. ID no. 12340797
FLKKKSQSQQHKKGPQYRLARVVPPPTNSLLRQHHFIVDASGPPTMPAAMAAAAAQRLLAASTKIIGVGRNYIAHAKELGNPVPKEPVLFLKPTSSFLHAGVATAAVEIPEPLESLHHEVELAVVISRRGRDVPEASAMDFVGGYALALDMTARDLQSVAKSAGLPWTLAKGQDTFTPISAVVPKSAVTNPDDLELWLKVDDELRQKGPTSDMLFKIPFLISYISSIMTLMEGHVILTGTPEGVGPVRVGQKITAGITDLIDVEFDVQRRNRSFST

SEQ ID NO: 6301 - protein, 231 aa, Zea mays subsp. mays
  peptide (1)..(231): Ceres Seq. ID no. 12340798
MPAAMAAAAAQRLLAASTKIIGVGRNYIAHAKELGNPVPKEPVLFLKPTSSFLHAGVATAAVEIPEPLESLHHEVELAVVISRRGRDVPEASAMDFVGGYALALDMTARDLQSVAKSAGLPWTLAKGQDTFTPISAVVPKSAVTNPDDLELWLKVDDELRQKGPTSDMLFKIPFLISYISSIMTLMEGHVILTGTPEGVGPVRVGQKITAGITDLIDVEFDVQRRNRSFST

SEQ ID NO: 6302 - protein, 227 aa, Zea mays subsp. mays
  peptide (1)..(227): Ceres Seq. ID no. 12340799
MAAAAAQRLLAASTKIIGVGRNYIAHAKELGNPVPKEPVLFLKPTSSFLHAGVATAAVEIPEPLESLHHEVELAVVISRRGRDVPEASAMDFVGGYALALDMTARDLQSVAKSAGLPWTLAKGQDTFTPISAVVPKSAVTNPDDLELWLKVDDELRQKGPTSDMLFKIPFLISYISSIMTLMEGHVILTGTPEGVGPVRVGQKITAGITDLIDVEFDVQRRNRSFST

SEQ ID NO: 6303 - DNA, 860 bp, Zea mays subsp. mays
  misc_feature (1)..(860): Ceres Seq. ID no. 12353809
  misc_feature (1)..(860): Ortholog of  Ceres SEQ ID NO 12612272 as cited in SEQ ID NO 55946
  misc_feature (1)..(860): Ortholog of  Ceres SEQ ID NO 15169960 as cited in SEQ ID NO 57591
catccaaaaaaccagaagctagaagcctagaacagccaagaaaagccgaaacaacaacaatcccaatcccccccccccccccgcccnntgtcactcaaaactcgaccaacaatgtcgctgattcgccgtggaagcgcattcgaccccttctccctcgacctctgggaccccttccagggctttcccttcggctctggaagcagcagcagcagcagcctgttcccctcgttcggaggcaccaccaccagctcggagacggccgccttcgccggcgctcgcgtcgactggaaggagacgccggaggcgcacgtgttcaagaccgacgtgccggggctgaagaaggaggaggttaaggtggagctggaggacggcaacgtgctccagatcagcggcgagcgcagcaaggagcaggaggagaagagggacacctggcaccgcgtggagcgcagcagcggcaagttcctgcgcaggttccgcctgccggagaacgccaggacggagcagatcagtgcgtccatggagaacggcgtgctcaccgtcaccgtgcctaaggaggaggccaagaaggccgacgtcaagtctatccagatctccggctagtatgctcaagctcacaaccgatggtgtgccgtcttcgtcttgtcttcacatgccgggggtccataaaatgccagcgtccgtgtaatgtacttgtcacagtgtcagtgtattgtactggtatcatggttgtcttgagtagcgtgtgttgtggctattgtgttccgaacgatattgaagtctcatccgtcgtgtatcagtgtcgtctgtaacgaacccagttttaaaacatttcgaagtgagttgcttggtactcgtaaact

SEQ ID NO: 6304 - protein, 162 aa, Zea mays subsp. mays
  peptide (1)..(162): Ceres Seq. ID no. 12353810
MSLIRRGSAFDPFSLDLWDPFQGFPFGSGSSSSSSLFPSFGGTTTSSETAAFAGARVDWKETPEAHVFKTDVPGLKKEEVKVELEDGNVLQISGERSKEQEEKRDTWHRVERSSGKFLRRFRLPENARTEQISASMENGVLTVTVPKEEAKKADVKSIQISG

SEQ ID NO: 6305 - protein, 116 aa, Zea mays subsp. mays
  peptide (1)..(116): Ceres Seq. ID no. 12353811
  misc_feature (29)..(29): Xaa is any aa, unknown or other
SKKPEARSLEQPRKAETTTIPIPPPPPPXVTQNSTNNVADSPWKRIRPLLPRPLGPLPGLSLRLWKQQQQQPVPLVRRHHHQLGDGRLRRRSRRLEGDAGGARVQDRRAGAEEGGG

SEQ ID NO: 6306 - DNA, 1713 bp, Zea mays subsp. mays
  misc_feature (1)..(1713): Ceres Seq. ID no. 12566201
  misc_feature (1)..(1713): Ortholog of  Ceres SEQ ID NO 15227018 as cited in SEQ ID NO 0
gcacgagaccattacctagaacatcctaatcgaaaattcttcgctcacaccacgtacgatacgagcctcaccagcgccggcgctgtagtgtgcagccctcctcctggatctctgcacccttcggaggccactcctcgcgcgcgcgcgcgcgcggacatggaggtcgaataccacgaggtgagaggagttcggtctgctccgcgcaatgcggcgggcgaagacttatcttctccttattttccgccggccgggccttggatcgtccttgctgatcatctccgtttcggtgcgcttcttcctcctcctcctcctcctccttcggtcgcggaaacgccatggatggatggatgggacgggctagcaggagtacgtgcggagctcgagaggcgtgcagctattcacctgcggctggctgcccgctgccgcatcgcccaaggcgctcgtcttcctctgccacggctacggcatggagtgcagtggcttcatgagagaatgcggcgtgcggctggcggcggccgggtacggcgtgttcgggatggactacgagggccacggcaagtcgatgggcgcgcgctgctacatccgcagtttccgccgcctcgtcgacgactgcggccatttcttcaagtccgtctgcggtgggtcctgtatttcccgatcagaccacactctctctctgataccggctctctgaaccctgtttttttcctgcctcgacgcagagcttgaggagtaccggggcaagagccggttcctgtacggcgagtccatgggtggcgcggtggcgctgctgctgcacaccgaggaccccgccttctgggacggcgccgtcctcgtggcgcccatgtgcaagatatcggagaaggtgaagccgcaccctctggtgatcacgctcctgacgcaggtggaggacgtgatccccaggtggaagatcgtgcccaccaagcaggacgtcatcgacgccgccttcaaggaccccgtcaagcgtgaaaagatcaggaggaaccagctgatctaccaggacaagccgcggctcaagactgcgctggagatgctcagggccagcatgtacatagaagacagcttgtcacaggtgacgctgccgttcttcgtcctgcacggcgaggccgacacggtgacggacccggaggtgagccgcgcgctgtacgagcgttcggccagcgccgacaagaccatcaagctgtacccggggatgtggcacggcctcaccgccggggagcccgacgagaacgtggaggccatcttctccgacatcgtgtcctggctcaaccaccgcagccggagctgggccgtggaggaacgccatatgaccaggaagctggcgccagctccggccaagtccatcgaaggccacggcaccgtggacggcaaagtgcacacacaacaagggcgccctcggcggcgccagggcttcctctgcgggcttgccggccggacgcatcaccacgcggagatgtgaaagatagaatcgccgtctcggtcccggatcagatgggcgcctgctttcttcaaccatggcaaataaaggaatgatgacctgcggtttataatatagaggtcttattatgcttgtcaaagttatgtatgaccaatcattcccagtctggtgcagattcaaactcatgctcagatatatgtaatgtaagattataacgctattagcattctggataacccgttaacaatgacatt

SEQ ID NO: 6307 - protein, 242 aa, Zea mays subsp. mays
  peptide (1)..(242): Ceres Seq. ID no. 12566202
ARDHYLEHPNRKFFAHTTYDTSLTSAGAVVCSPPPGSLHPSEATPRARARADMEVEYHEVRGVRSAPRNAAGEDLSSPYFPPAGPWIVLADHLRFGALLPPPPPPPSVAETPWMDGWDGLAGVRAELERRAAIHLRLAARCRIAQGARLPLPRLRHGVQWLHERMRRAAGGGRVRRVRDGLRGPRQVDGRALLHPQFPPPRRRLRPFLQVRLRWVLYFPIRPHSLSDTGSLNPVFFLPRRRA

SEQ ID NO: 6308 - protein, 236 aa, Zea mays subsp. mays
  peptide (1)..(236): Ceres Seq. ID no. 12566203
MGGAVALLLHTEDPAFWDGAVLVAPMCKISEKVKPHPLVITLLTQVEDVIPRWKIVPTKQDVIDAAFKDPVKREKIRRNQLIYQDKPRLKTALEMLRASMYIEDSLSQVTLPFFVLHGEADTVTDPEVSRALYERSASADKTIKLYPGMWHGLTAGEPDENVEAIFSDIVSWLNHRSRSWAVEERHMTRKLAPAPAKSIEGHGTVDGKVHTQQGRPRRRQGFLCGLAGRTHHHAEM

SEQ ID NO: 6309 - protein, 211 aa, Zea mays subsp. mays
  peptide (1)..(211): Ceres Seq. ID no. 12566204
MCKISEKVKPHPLVITLLTQVEDVIPRWKIVPTKQDVIDAAFKDPVKREKIRRNQLIYQDKPRLKTALEMLRASMYIEDSLSQVTLPFFVLHGEADTVTDPEVSRALYERSASADKTIKLYPGMWHGLTAGEPDENVEAIFSDIVSWLNHRSRSWAVEERHMTRKLAPAPAKSIEGHGTVDGKVHTQQGRPRRRQGFLCGLAGRTHHHAEM

SEQ ID NO: 6310 - DNA, 1059 bp, Zea mays subsp. mays
  misc_feature (1)..(1059): Ceres Seq. ID no. 12409142
  misc_feature (1)..(1059): Ortholog of  Ceres SEQ ID NO 12612333 as cited in SEQ ID NO 56421
acactcttgccctctagctctagcagcagcagccaaagccatggaggcgagcggcatgaagctccgccggacgttcctcctcaccctactgctggtgctctccaccgccgtgacgcccatcctctcgctgcctgcagacaacgtggtagcctgcgactgcgacaagcccaaggcgcccaagccgtcgcactcgcgcccgcccaagacgaccaagccctcccacccgtcgccgaaacccgagaacccgaagccacccaagggccccgcgtacccggcggcggggcacccaccgcctaagagcccctcctacccaccggtcgtaggcccacccgtcacgcgcccgccggtcgtcggaccgccagtgacctacccgccgattaccggttctccgacgacgccgccggtcatcggcccaccggtcacgcgcccgccggtcgtcggaccaccggtgacctacccgccgatcaccggccctccgtcgacgccgcttccggtcaccggcccgcccgtgacctacccacccggcggaggcgggggcagctcgacgccgtgcccgccgccaccgccactgccgacgtgcccggcggactcgctgaagctgggcgcgtgcgtggacctgctgggcgggctggtgcacgtcggcctcggcgaccccgtggtgaaccagtgctgcccggtgctggaggggctggtggagctggaggcggccgtgtgcctgtgcaccaccatcaagctcaggctcctcaacgtcaacctgtacctgcccctggcgctccagctcctcctcacctgcggcaagacgccgccgccgggctacacctgcaccgtctgactgacgtcctcgatcggttagctagcgcctagcggcatagtagcagcagcccatgcattatccgtccatgcacatgcatgtacgtagctatgccttatgctatgcatgcatctctctgcaagtggttgctgtctgctgcatggtggaagactcgagagctactagctagctagtagagagtagagacgtcgtgttgttgttgcatgcaatgcatatgcgtgccttcg

SEQ ID NO: 6311 - protein, 276 aa, Zea mays subsp. mays
  peptide (1)..(276): Ceres Seq. ID no. 12409143
HSCPLALAAAAKAMEASGMKLRRTFLLTLLLVLSTAVTPILSLPADNVVACDCDKPKAPKPSHSRPPKTTKPSHPSPKPENPKPPKGPAYPAAGHPPPKSPSYPPVVGPPVTRPPVVGPPVTYPPITGSPTTPPVIGPPVTRPPVVGPPVTYPPITGPPSTPLPVTGPPVTYPPGGGGGSSTPCPPPPPLPTCPADSLKLGACVDLLGGLVHVGLGDPVVNQCCPVLEGLVELEAAVCLCTTIKLRLLNVNLYLPLALQLLLTCGKTPPPGYTCTV

SEQ ID NO: 6312 - protein, 263 aa, Zea mays subsp. mays
  peptide (1)..(263): Ceres Seq. ID no. 12409144
MEASGMKLRRTFLLTLLLVLSTAVTPILSLPADNVVACDCDKPKAPKPSHSRPPKTTKPSHPSPKPENPKPPKGPAYPAAGHPPPKSPSYPPVVGPPVTRPPVVGPPVTYPPITGSPTTPPVIGPPVTRPPVVGPPVTYPPITGPPSTPLPVTGPPVTYPPGGGGGSSTPCPPPPPLPTCPADSLKLGACVDLLGGLVHVGLGDPVVNQCCPVLEGLVELEAAVCLCTTIKLRLLNVNLYLPLALQLLLTCGKTPPPGYTCTV

SEQ ID NO: 6313 - protein, 258 aa, Zea mays subsp. mays
  peptide (1)..(258): Ceres Seq. ID no. 12409145
MKLRRTFLLTLLLVLSTAVTPILSLPADNVVACDCDKPKAPKPSHSRPPKTTKPSHPSPKPENPKPPKGPAYPAAGHPPPKSPSYPPVVGPPVTRPPVVGPPVTYPPITGSPTTPPVIGPPVTRPPVVGPPVTYPPITGPPSTPLPVTGPPVTYPPGGGGGSSTPCPPPPPLPTCPADSLKLGACVDLLGGLVHVGLGDPVVNQCCPVLEGLVELEAAVCLCTTIKLRLLNVNLYLPLALQLLLTCGKTPPPGYTCTV

SEQ ID NO: 6314 - DNA, 1601 bp, Zea mays subsp. mays
  misc_feature (1)..(1601): Ceres Seq. ID no. 13491106
  misc_feature (1)..(1601): Ortholog of  Ceres SEQ ID NO 12617253 as cited in SEQ ID NO 64065
ccttccgattctccgtcgcctgagcggctgagccaacttgccaagcccaagcaagccaagtcgtcgcctccccgacccaacgccgcgacccccttgcccgtccgcgaccgctgcagcacctcggatcccgccccaatggcaacagcgtgtccgccgctctcgctgccgtccacctccctcttccgcggcaggtccgcccgcgccgggcccaacgcaggcagctcacggccgtccgctgcagcgccgtcggagaggcggtcgtggaggaggcctcgcccagacggcggaagagccgctgctggtgagcgcaatcagagggaggaagtcgagaggccacccgtctggctcatgaggcaggccgggaggtacatgaagagctaccaattgctctgcgagcggtatccttcgttccgtgaaagatcagaaaatgtcgacctagttgttgagatctctttgcaaccatggaaggttttcaagcctgatggagtcatcttgttctcggacatccttactccacttcctgggatgaacataccttttgacattgtgaagggaaaaggtccagtgatctatgatccattgagaacggcagcagctgtgaatgaagtcagagaatttgttcctgaggagtgggtcccttatgtggggcaggctctgaatattttgagacaagaggttaaaaatgaagctgctgtactaggttttgttggagctccgtttaccttggcatcttattgtgtggaaggaggttcatcaaagaactttacattgattaagaaaatggccttctcagaaccagcgattttacacaatttgctacagaagttcacaacatcaatggctaactatattaaataccaagcggacaatggggcgcaggctgtccaaattttcgattcatgggctactgaactcagcccggctgattttgaggagtttagcctgccttatctaaagcagatagtggatagtgttagggaaacacatcctgacttgcctctgatactttacgcaagtggatctgggggcttgctggagaggcttcctttgacaggtgttgatgttgtcagcttggactggacggtcgatatggcagagggcaggaaaagattgggatctaacacagcagtccaagggaacgtggaccctggtgttctttttggatccaaagagtttataacgaggcggatttacgacactgtgcagaaggctggcaatgttggacatgtattgaaccttggccatggcatcaaggttggaactccggaggaaaatgttgctcacttttttgaggtcgcaaaagggatcagatattaaagaacctggcatggttttttcctttttccaaatcggcagaagttgtagagtcggcggtcgaggatagatgcagaaagcccatgtgcagtatagagtgcctgaaaaaatttttgggactgattttgtttgttgcatttcaagttccggtttcagtgtaatattgtaagcagatttgagtggaggcgtaatgaagtgcctaattgtttatagcaatatagttttgtacaaccagtatccttgtttatgagagtacgaagcagaaatactgatcatgtgttgacatg

SEQ ID NO: 6315 - protein, 438 aa, Zea mays subsp. mays
  peptide (1)..(438): Ceres Seq. ID no. 13491107
PSDSPSPERLSQLAKPKQAKSSPPRPNAATPLPVRDRCSTSDPAPMATACPPLSLPSTSLFRGRSARAGPNAGSSRPSAAAPSERRSWRRPRPDGGRAAAGERNQREEVERPPVWLMRQAGRYMKSYQLLCERYPSFRERSENVDLVVEISLQPWKVFKPDGVILFSDILTPLPGMNIPFDIVKGKGPVIYDPLRTAAAVNEVREFVPEEWVPYVGQALNILRQEVKNEAAVLGFVGAPFTLASYCVEGGSSKNFTLIKKMAFSEPAILHNLLQKFTTSMANYIKYQADNGAQAVQIFDSWATELSPADFEEFSLPYLKQIVDSVRETHPDLPLILYASGSGGLLERLPLTGVDVVSLDWTVDMAEGRKRLGSNTAVQGNVDPGVLFGSKEFITRRIYDTVQKAGNVGHVLNLGHGIKVGTPEENVAHFFEVAKGIRY

SEQ ID NO: 6316 - protein, 393 aa, Zea mays subsp. mays
  peptide (1)..(393): Ceres Seq. ID no. 13491108
MATACPPLSLPSTSLFRGRSARAGPNAGSSRPSAAAPSERRSWRRPRPDGGRAAAGERNQREEVERPPVWLMRQAGRYMKSYQLLCERYPSFRERSENVDLVVEISLQPWKVFKPDGVILFSDILTPLPGMNIPFDIVKGKGPVIYDPLRTAAAVNEVREFVPEEWVPYVGQALNILRQEVKNEAAVLGFVGAPFTLASYCVEGGSSKNFTLIKKMAFSEPAILHNLLQKFTTSMANYIKYQADNGAQAVQIFDSWATELSPADFEEFSLPYLKQIVDSVRETHPDLPLILYASGSGGLLERLPLTGVDVVSLDWTVDMAEGRKRLGSNTAVQGNVDPGVLFGSKEFITRRIYDTVQKAGNVGHVLNLGHGIKVGTPEENVAHFFEVAKGIRY

SEQ ID NO: 6317 - protein, 322 aa, Zea mays subsp. mays
  peptide (1)..(322): Ceres Seq. ID no. 13491109
MRQAGRYMKSYQLLCERYPSFRERSENVDLVVEISLQPWKVFKPDGVILFSDILTPLPGMNIPFDIVKGKGPVIYDPLRTAAAVNEVREFVPEEWVPYVGQALNILRQEVKNEAAVLGFVGAPFTLASYCVEGGSSKNFTLIKKMAFSEPAILHNLLQKFTTSMANYIKYQADNGAQAVQIFDSWATELSPADFEEFSLPYLKQIVDSVRETHPDLPLILYASGSGGLLERLPLTGVDVVSLDWTVDMAEGRKRLGSNTAVQGNVDPGVLFGSKEFITRRIYDTVQKAGNVGHVLNLGHGIKVGTPEENVAHFFEVAKGIRY

SEQ ID NO: 6318 - DNA, 1556 bp, Zea mays subsp. mays
  misc_feature (1)..(1556): Ceres Seq. ID no. 12409134
  misc_feature (1)..(1556): Ortholog of  Ceres SEQ ID NO 12593464 as cited in SEQ ID NO 69039
ctgattccttccgccttgtcagcgcagcgatccagacccacccgagccaacaacccatggccgccgcgacgccgcgtctcctgctcgcggtcgcgggcctcaccctcgccggtgctgcaggacccggcggagctcctgcgccttgccaaggagccggccttcgcggactggatggtcggggtgcggcggcggatccacgagaacccggagctgggatacgaggagttccagaccagcgagctcgtgcgccgggagctccacgccatggggatcccctacaggcaccccttcgccgtcaccggcgtggtagcaacagtcggcaccggcgggtccgcccttcgttgctctgcgggcggacatggacgcgctgcccttgcaggaaagtgtggagtgggaacacaagagcaaagtccctgggaagatgcatggatgtggacatgatgcacatgttgctatgctgttgggatctgctaagattcttcaggagcatcgtgatgagttgaagggtacagtagttcttgtcttccaaccagctgaggaaggtggcggtggggccaagaaaatgatagaagacagagctgtggaaaacatagatgccatttttgggcttcatatagctgactctgtgcctattggtgtgctggcatccaggccagggcctattatggctgggagtggattctttgaggccgtaataagtggaaagggaggacatgctgcacttcctcatcacactatagatccgatattggctgcctcaaatgttattgtgagccttcagcaacttgtttctcgagaagctgatcccttggactcacaggttgtgacagttggaaagtttcaaggaggtggagccttcaatgtgatccctgattcggtaactataggtggcaccttccgagcctttctgaaagagagttttaatcaattgaagcagcggattgaagaggtgattgtgtctcaagctagcgtgcagcgctgcagcgctgccgtggacttcctcagcaaggaccgtcctttcttcccgccgaccatcaacagccccgagctccacgacttcttcgtgaacgtggccggcgagatggtcggctcgaggaacgtgagggacaggcagccgctgatgggcgccgaggacttcgcgttctacgccgaggcggtcccttccacctactactacttcgtgggcatgtacaacgagacgcgcgggccgcaggcgccccaccactccccctacttcaccatcaacgaagacgcccttccctacggcgcggccgggcaggcggcgctggcagctcgctacctactcgagcgtcagcagcctgctgccgccaccgctgataaggcagaaacccatgatgagctgtagatagtacatgatgtttgcgtccctgtccctgtgttgatggaattagattgagcaataatttcttcgccaagtttattcagcggctgtacatatcctggtatctccatgctttggtaatgatcggttgggatcagtcagcaaatagtctgagaaacatgctttagtctgagaaacatgattccatcccttg

SEQ ID NO: 6319 - protein, 335 aa, Zea mays subsp. mays
  peptide (1)..(335): Ceres Seq. ID no. 12409135
MDALPLQESVEWEHKSKVPGKMHGCGHDAHVAMLLGSAKILQEHRDELKGTVVLVFQPAEEGGGGAKKMIEDRAVENIDAIFGLHIADSVPIGVLASRPGPIMAGSGFFEAVISGKGGHAALPHHTIDPILAASNVIVSLQQLVSREADPLDSQVVTVGKFQGGGAFNVIPDSVTIGGTFRAFLKESFNQLKQRIEEVIVSQASVQRCSAAVDFLSKDRPFFPPTINSPELHDFFVNVAGEMVGSRNVRDRQPLMGAEDFAFYAEAVPSTYYYFVGMYNETRGPQAPHHSPYFTINEDALPYGAAGQAALAARYLLERQQPAAATADKAETHDEL

SEQ ID NO: 6320 - protein, 314 aa, Zea mays subsp. mays
  peptide (1)..(314): Ceres Seq. ID no. 12409136
MHGCGHDAHVAMLLGSAKILQEHRDELKGTVVLVFQPAEEGGGGAKKMIEDRAVENIDAIFGLHIADSVPIGVLASRPGPIMAGSGFFEAVISGKGGHAALPHHTIDPILAASNVIVSLQQLVSREADPLDSQVVTVGKFQGGGAFNVIPDSVTIGGTFRAFLKESFNQLKQRIEEVIVSQASVQRCSAAVDFLSKDRPFFPPTINSPELHDFFVNVAGEMVGSRNVRDRQPLMGAEDFAFYAEAVPSTYYYFVGMYNETRGPQAPHHSPYFTINEDALPYGAAGQAALAARYLLERQQPAAATADKAETHDEL

SEQ ID NO: 6321 - protein, 303 aa, Zea mays subsp. mays
  peptide (1)..(303): Ceres Seq. ID no. 12409137
MLLGSAKILQEHRDELKGTVVLVFQPAEEGGGGAKKMIEDRAVENIDAIFGLHIADSVPIGVLASRPGPIMAGSGFFEAVISGKGGHAALPHHTIDPILAASNVIVSLQQLVSREADPLDSQVVTVGKFQGGGAFNVIPDSVTIGGTFRAFLKESFNQLKQRIEEVIVSQASVQRCSAAVDFLSKDRPFFPPTINSPELHDFFVNVAGEMVGSRNVRDRQPLMGAEDFAFYAEAVPSTYYYFVGMYNETRGPQAPHHSPYFTINEDALPYGAAGQAALAARYLLERQQPAAATADKAETHDEL

SEQ ID NO: 6322 - DNA, 1078 bp, Zea mays subsp. mays
  misc_feature (1)..(1078): Ceres Seq. ID no. 12577742
  misc_feature (1)..(1078): Ortholog of  Ceres SEQ ID NO 15176208 as cited in SEQ ID NO 55594
  misc_feature (1)..(1078): Ortholog of  Ceres SEQ ID NO 14312330 as cited in SEQ ID NO 58581
agttcgccactctcgccatcggggacgagggactgggagccaggatacttctgccgcgcggcgaccggtcgagcgaaatcgatctaccccaggtgcggcgggcgcggctttattctcaagattttttctgtgttctttagagagcagccatggacgagtggattcgccaaaccgaggtgtgggtgcaccaaaccgacagctggatccggcagcagcccccggagcagatctatgtagcggccgcggtggttgccgtcacaatcctgttgcttatcgtagcatcttgtctgaaatcgtctagaccaaacaccatagttctatctgggcttagtggcagtggcaaaaccactatttactaccagcttcgggatggatcatcacatcaaggaactgttacttcaatggaagaaaacagtgatacttttgtgctgcattcggagcaagaaaggaaagacaaagtaaaacctgtgcatattattgatgttcctggtcatgctaggctcaaacccaaacttgatgaagtcctgcctaaagctgctgcggttgtctttgttgttgatgctcaagatttcttgtctagcatgcaagctgctgcagagtacctttatgacattctgacaaaggcaactgtagtgaagaaaaaggtccctgtgcttatattctgcaacaagacagataaagttaccgcccactcgaaggaattcatcaagaagcagttggagaaagaattgaacaagcttagggaatctaggaacgccgtatcgtcagccgacatctctgatgaagtccagcttggggtccctggagaggcattcaacttcagccagtgccagaacaaggtggctgttgcggagggtgctggtttgacaggtgatgtttcggccgtggaacaattcatccgtgaacatgtgaaggcataggttgttcttattgtttttggggctccaaatggctatcctgatgagataagatgtacattgcgtcaatgtggttgttacctttcatgcatgtacaccttcatccggtgctctgaagttgcttagagacagtgaagcacagtcatattttgaactggttc

SEQ ID NO: 6323 - protein, 256 aa, Zea mays subsp. mays
  peptide (1)..(256): Ceres Seq. ID no. 12577743
MDEWIRQTEVWVHQTDSWIRQQPPEQIYVAAAVVAVTILLLIVASCLKSSRPNTIVLSGLSGSGKTTIYYQLRDGSSHQGTVTSMEENSDTFVLHSEQERKDKVKPVHIIDVPGHARLKPKLDEVLPKAAAVVFVVDAQDFLSSMQAAAEYLYDILTKATVVKKKVPVLIFCNKTDKVTAHSKEFIKKQLEKELNKLRESRNAVSSADISDEVQLGVPGEAFNFSQCQNKVAVAEGAGLTGDVSAVEQFIREHVKA

SEQ ID NO: 6324 - protein, 172 aa, Zea mays subsp. mays
  peptide (1)..(172): Ceres Seq. ID no. 12577744
MEENSDTFVLHSEQERKDKVKPVHIIDVPGHARLKPKLDEVLPKAAAVVFVVDAQDFLSSMQAAAEYLYDILTKATVVKKKVPVLIFCNKTDKVTAHSKEFIKKQLEKELNKLRESRNAVSSADISDEVQLGVPGEAFNFSQCQNKVAVAEGAGLTGDVSAVEQFIREHVKA

SEQ ID NO: 6325 - DNA, 1103 bp, Zea mays subsp. mays
  misc_feature (1)..(1103): Ceres Seq. ID no. 13498465
  misc_feature (1)..(1103): Ortholog of  Ceres SEQ ID NO 14315896 as cited in SEQ ID NO 57597
aaggactcagtccacactccacagggaaggagggagcaggagaggtaggtagccaagaagatcggttccagcggcaggcgcgagcgaggcgtgaccgatggcggccgcgtcgctctgagccgggcgcggtggctcctggtggagcacccggccgtgccctcgttccgctggcagccaggccgcacggtcggcgcgacgccgtccttcgcggccgccgtcatctgcggctacctcgccgcggtgctcgtcctccgccgcctcgtcctgccccgcctcccggcgctgcctccgccggcgctccgcgcgctctccgccgcccacaacgcggtcctgctggcgctctccgccgccatggccggcgggtgcgcgctgtcgacggccgcgacggcgccggcgccgcggtgggcgtgggccttctgcttcccgccgcggggcgccacggaggcgtcggggcccgtcttcttctgggcgcacgtgttctacctctccaaggtgtacgagctcggcgacacgctgctcatcctgctcgcccgccgcccgctcacgctgctccacgtgtaccaccacgcgctcgtcgtggccatgtgctacctctggctcgccacccggcagtcgctgatgcccgtcgcgctcgtcaccaacgccggcgtgcacgtcgtgatgtactcctactacctctcctgcagcgtcggcctgcgctggcccgggcggtggaagcgcgccgtcacggagctgcagatcgcgcagttcctcttcagcttcgcggcctccgtggtgatgctgtggctccacttcgccgctggcggctgcgaggggatggccggctgggtgttcaacgccgtcttcaacgcgtcgctgctcgcgctcttcctcaacttccacggcgccgcctacaaaggcgccgccaaggccaacaagggtaaagcggaatgacgcggccgacaagctttaatttgccggcaaccaaaatcctcgtgagatttaattgggaccaattgtttaatgttgcttcttcgccaaattattactgatacgaagtctgtctgaaataattgttcgaaaaagaatggcatcgatcgcccttgaattatgggtgaattttc

SEQ ID NO: 6326 - protein, 306 aa, Zea mays subsp. mays
  peptide (1)..(306): Ceres Seq. ID no. 13498466
GLSPHSTGKEGAGEVGSQEDRFQRQARARRDRWRPRRSEPGAVAPGGAPGRALVPLAARPHGRRDAVLRGRRHLRLPRRGARPPPPRPAPPPGAASAGAPRALRRPQRGPAGALRRHGRRVRAVDGRDGAGAAVGVGLLLPAAGRHGGVGARLLLGARVLPLQGVRARRHAAHPARPPPAHAAPRVPPRARRGHVLPLARHPAVADARRARHQRRRARRDVLLLPLLQRRPALARAVEARRHGAADRAVPLQLRGLRGDAVAPLRRWRLRGDGRLGVQRRLQRVAARALPQLPRRRLQRRRQGQQG

SEQ ID NO: 6327 - protein, 193 aa, Zea mays subsp. mays
  peptide (1)..(193): Ceres Seq. ID no. 13498467
MAGGCALSTAATAPAPRWAWAFCFPPRGATEASGPVFFWAHVFYLSKVYELGDTLLILLARRPLTLLHVYHHALVVAMCYLWLATRQSLMPVALVTNAGVHVVMYSYYLSCSVGLRWPGRWKRAVTELQIAQFLFSFAASVVMLWLHFAAGGCEGMAGWVFNAVFNASLLALFLNFHGAAYKGAAKANKGKAE

SEQ ID NO: 6328 - DNA, 1768 bp, Zea mays subsp. mays
  misc_feature (1)..(1768): Ceres Seq. ID no. 12409131
  misc_feature (1)..(1768): Ortholog of  Ceres SEQ ID NO 12607856 as cited in SEQ ID NO 55419
atctcttgtgccagcacaatgatgctttgtcatatctagggagaagtgagtaaaagccatgagtgatgattatgcttctcttcttcttttccttcttaatgacgtactgccagtacgtacgtgctgttgtcagggaactgtatccgaattccaaattttgaacatgatttagcaagacagacagagagaaagagaatagttgactagttgtaaacttgtaatgtatggatcatgcctttcattcgatggctactgatcttgcttcgagcgcagtctgccgcggacctggcctgggagatagccgtcctggaggagcaagtcgtccgcaaggagctgcacctgctgtccctgtacagagccgcgttcgaccagtacctcggcgtctcccctcgcgcgtctgctcaggaaccgcgccatgagcgcagcagcagaagggctactgctgctgacgacgaaggcgcccttcgcctgaggagcatcaaggagtctgcgtcctacagcctaccaacgctctccgattctaaacgcgtagagctctccaggtgctcctcagggcggtccagcctggccaacttcctgagcgcctcgatcgctgagtacgtgcctaagatctcgtgcaagctctcggaggacatactgcggtgcgtctccgccgtctactgcaagctcgcgagcaggccgctgtcgcaggaggaggaggaggcgaggtccgagacgccgccgttcacgccttctctctcggtctcgtccgcgtcgagctccttctccctcaagaagcagcaccccgtccgtggctggagccctcggtgctactacaacgccgacgcgactgcgaccccggacgcgtacgcttcgtccggcgggagcagtgggcggtacagtggggtgatggttttcccagggatacatgtagacgaggagaagtttgagtatgcctgcaaaatcctggacactatcagatcgctgatcaaacggctggagaagattgatcctagaaagatggcacatgaagagcagctctgtttctgggtcaacatccacaatgccttggttatgcatgctttcatggcctatggattacaggaaaaacggatgaaaagcactgacttgattctgaaggctgcatacaatgtgggtgggcattcagtgaactcccaaactatccagaactcgattctaggatgccagtcccaccgcccttcactgtgggttcggacactatttacgccgacgaaaaaatctgggagctccatacatccatatgcgcttcagtacgcagagccaattgcgcactttgcgctctcgaccggcgcgttttcagacccacctgtgaggctgtacacagccaagaaactgtaccatcagctggagcaagccagggccgagttcatccaagcaaatgtcatggtccggaggcagaccatcttcctgcccaaggttctccacttctatgcgaaggatgcttccctggagctacctgaccttgttgacatagtgtgcgagagcatgcctgagctgcagcgaaaagagatcaggcagtatcttaggaggaggatcgacaagtgtgttcagtggttgccctacaagtcttctttcaggtacactgtgcatagcagtttggctgagtaggcacttttttttcttctctatgtgcttgtaaataaggagccatgattctaagaacagtcgtctgttggggtgtgtgtgtgtatgtaaaactatattgtgacagttctttctttcttagaggaaaattacagcttatctc

SEQ ID NO: 6329 - protein, 465 aa, Zea mays subsp. mays
  peptide (1)..(465): Ceres Seq. ID no. 12409132
MPFIRWLLILLRAQSAADLAWEIAVLEEQVVRKELHLLSLYRAAFDQYLGVSPRASAQEPRHERSSRRATAADDEGALRLRSIKESASYSLPTLSDSKRVELSRCSSGRSSLANFLSASIAEYVPKISCKLSEDILRCVSAVYCKLASRPLSQEEEEARSETPPFTPSLSVSSASSSFSLKKQHPVRGWSPRCYYNADATATPDAYASSGGSSGRYSGVMVFPGIHVDEEKFEYACKILDTIRSLIKRLEKIDPRKMAHEEQLCFWVNIHNALVMHAFMAYGLQEKRMKSTDLILKAAYNVGGHSVNSQTIQNSILGCQSHRPSLWVRTLFTPTKKSGSSIHPYALQYAEPIAHFALSTGAFSDPPVRLYTAKKLYHQLEQARAEFIQANVMVRRQTIFLPKVLHFYAKDASLELPDLVDIVCESMPELQRKEIRQYLRRRIDKCVQWLPYKSSFRYTVHSSLAE

SEQ ID NO: 6330 - protein, 246 aa, Zea mays subsp. mays
  peptide (1)..(246): Ceres Seq. ID no. 12409133
MVFPGIHVDEEKFEYACKILDTIRSLIKRLEKIDPRKMAHEEQLCFWVNIHNALVMHAFMAYGLQEKRMKSTDLILKAAYNVGGHSVNSQTIQNSILGCQSHRPSLWVRTLFTPTKKSGSSIHPYALQYAEPIAHFALSTGAFSDPPVRLYTAKKLYHQLEQARAEFIQANVMVRRQTIFLPKVLHFYAKDASLELPDLVDIVCESMPELQRKEIRQYLRRRIDKCVQWLPYKSSFRYTVHSSLAE

SEQ ID NO: 6331 - DNA, 1411 bp, Zea mays subsp. mays
  misc_feature (1)..(1411): Ceres Seq. ID no. 12409129
  misc_feature (1)..(1411): Ortholog of  Ceres SEQ ID NO 13638097 as cited in SEQ ID NO 57043
  misc_feature (1)..(1411): Ortholog of  Ceres SEQ ID NO 13596416 as cited in SEQ ID NO 62177
  misc_feature (1)..(1411): Ortholog of  Ceres SEQ ID NO 13659338 as cited in SEQ ID NO 66875
cccgctgctgcctgctctcctccccgaaggccgaatccgatagctagcggctagcgccaacaaaacccctctctccgcgcccgctccccaccggtgacagcgcgcccatggctgccttactccgaacggccgcggccctcgcgcccccgccctcgtcgtccctgtccgcacgggagccgcgtgggcggtgcctgcggctagcctgctcccggcgcgcgccggcccgacagcttcgggcgtggctactgccgactccgcacgtcttcggtcgttctgggggccggttccggcgcctgagcgtcaccgaggccgaggaggccgcgcagacggcgacgcaggaggatccagaaaccgaagttactggagagagtgctgcagatgacagtgctggaagcacagacgaaactccatcatttattgtgacaacactgcaatcatacagagaagctctgattaatgatgatgaagcaaaagctgctgagatagaatcctttttactttctatcgaggatgagaagaactctcttttgagcaaaatcactgctctagatgtggaactagcaactcaacgagaacgtatcttgcggattagtgctgattttgacaatttcaggaaaaggacagaaaatgagaagcttaacatgatggaaaatgtgcaaggggaacttatagagagctttttgcctgttctcgataactttgaaagagcaaaaatgcaaataaaggtggaaacagagggagaggagaaaataaataatagctaccagagcattaataagcaatttatcgagattcttaattcattgagtgttgaagatgttgaaactgttggcaaaccatttgatcctatgctgcacgaggctattatgagagaagaatcatcggagtatgaagagggaatcatactccaggaattccgaaaaggcttcaaacttggggaaagactacttcgcccagcaatggtcaaggtgtctgcagggccaggccctgaaaattctggagatgatgaccctacagttgttgaagatagtgtggcacctcaaaaggttgaggatgttgaagaagacggttttgatgacggcgatgcagaataggtggctggagcttcagctgtgaatcaacaagaacaagtccagaaattttgatgcttttctggagcgtgccaagcaggtaataggattagtaccaattcgttcaagctagagttaggtccccaaatgtgctggttctttactgctgctgacatgggggtgttggtattgcgacaaatttgtgtttctacccgccgtggtcaactttttgttcttacgaaggggaattttcgtggttcatagatgcaaaaatgatatttgtaaggactaaattggctcagtttgctattgataatcaatatatgaattccattgtttgt

SEQ ID NO: 6332 - protein, 328 aa, Zea mays subsp. mays
  peptide (1)..(328): Ceres Seq. ID no. 12409130
MAALLRTAAALAPPPSSSLSAREPRGRCLRLACSRRAPARQLRAWLLPTPHVFGRSGGRFRRLSVTEAEEAAQTATQEDPETEVTGESAADDSAGSTDETPSFIVTTLQSYREALINDDEAKAAEIESFLLSIEDEKNSLLSKITALDVELATQRERILRISADFDNFRKRTENEKLNMMENVQGELIESFLPVLDNFERAKMQIKVETEGEEKINNSYQSINKQFIEILNSLSVEDVETVGKPFDPMLHEAIMREESSEYEEGIILQEFRKGFKLGERLLRPAMVKVSAGPGPENSGDDDPTVVEDSVAPQKVEDVEEDGFDDGDAE

SEQ ID NO: 6333 - DNA, 764 bp, Zea mays subsp. mays
  misc_feature (1)..(764): Ceres Seq. ID no. 12403432
  misc_feature (1)..(764): Ortholog of  Ceres SEQ ID NO 12610133 as cited in SEQ ID NO 55783
gacaagcaagaacagctgtcgatccaattgtcacttgctctccctccaacaagctaattaaggccggtcatccctcttctagctcgtttcattatccatggcggaggagaagcaccaccaccaccacctgttccaccacaagaaggacgaggagcaggaggagcagctcgccggcggcgggtacggcgagtccgccgagtacacggaggccacggtgacggaggtcgtgtccacgggcgagaacgagtacgacgagtacaagaaggaggagaagcagcacaagcacaagcagcacctcggcgaggccggcgccatcgccgccggcgccttcgcactctacgagaagcacgaggcaaagaaggacccggagcacgcgcaccgccacaagatcgaggaggaggtcgcggcggcggcggccgtcggctccggcggcttcgccttccacgagcaccacgagaagaagaaggaccacaaggacgccgaggaggccggcggcgagaagaagcaccacttcttcggctgattgatcctcccgtatcgtcgtccctccccgtgtgctacgcgtgcgtgtgtgagagtgatatcgagcgcccgccgtgttgtgcgcgcgtacgtatgtatgcgctcgtgtgatgcacgaataagcgtggctacgtaatctatcgtatgtatacgtgtgtgtatgcatgtgcttgtgtatgatcgtggtacgaggaccgaaaaaatgtatgcaactctgatttacttacatgtttagttgtttc

SEQ ID NO: 6334 - protein, 141 aa, Zea mays subsp. mays
  peptide (1)..(141): Ceres Seq. ID no. 12403433
MAEEKHHHHHLFHHKKDEEQEEQLAGGGYGESAEYTEATVTEVVSTGENEYDEYKKEEKQHKHKQHLGEAGAIAAGAFALYEKHEAKKDPEHAHRHKIEEEVAAAAAVGSGGFAFHEHHEKKKDHKDAEEAGGEKKHHFFG

SEQ ID NO: 6335 - protein, 71 aa, Zea mays subsp. mays
  peptide (1)..(71): Ceres Seq. ID no. 12403434
QARTAVDPIVTCSPSNKLIKAGHPSSSSFHYPWRRRSTTTTTCSTTRRTRSRRSSSPAAGTASPPSTRRPR

SEQ ID NO: 6336 - DNA, 1770 bp, Zea mays subsp. mays
  misc_feature (1)..(1770): Ceres Seq. ID no. 12410829
  misc_feature (1)..(1770): Ortholog of  Ceres SEQ ID NO 13595870 as cited in SEQ ID NO 62101
  misc_feature (1)..(1770): Ortholog of  Ceres SEQ ID NO 13590241 as cited in SEQ ID NO 63878
  misc_feature (1)..(1770): Ortholog of  Ceres SEQ ID NO 13657939 as cited in SEQ ID NO 66349
  misc_feature (1)..(1770): Ortholog of  Ceres SEQ ID NO 13660597 as cited in SEQ ID NO 67655
tctgttcccctttccctcctgcgcaccccgtcttctcctccccgcgtcaaaccccagcacaaaaagcaaccgcccgccgcctcctcgctcctctcccgaatcagccgtcgcggtgcctaatccggccgaccccccctccgatccgcgggtgcccgccgcagaggcggcgcctccgggcctcccccgatgtatagcaacttcaaggagcaggcgatcgagtacgtcaagcaggcagtccaggaggacaatgccggcaactacgtcaaggcgttccctctctacatgaacgcgctcgagtacttcaaaacccacctcaagtacgagaagaaccccaagatcaaggaggccatcaccgccaagttcaccgagtacctccgccgcgccgaggagatccgggcggtcctcgatgagggcggcgcagggcctggggccaacggtggcgacgcagctgtcgccacgcgccccaagacccaagggcaaggatggggacggaggcaacggaggggatgactccgagcagtccaagctgagggcggggctcaactccgccatcatcaccgagaagcccaacattaagtggaacgacgttgccggcctcgagagcgccaagcaggcactgcaggaggccgttatattgcccgtcaagttcccgcagttcttcacgggcaagcggaggccttggagggcgtttcttttgtatggccccccaggaacaggaaagtcttatttggcaaaagctgttgcaaccgaggctgattcaacatttttcagtatatcttcttcagatctggtttcaaagtggatgggtgaaagtgagaaattagttgcaaatctgttccaaatggctcgggaaaatgccccttccattatcttcattgatgaaattgattctttatgcggtcaacgtggagaaggcaatgaaagtgaagcatctaggagaattaagactgaacttcttgtgcaaatgcagggtgttggtcacaatgatgataaagttcttgttcttgctgccacgaatacgccatatgctctggaccaggctgtgcggcgaagatttgacaagcgtatctacattccgctacctgacatgaaagcaaggcaacacatgtttaaggtccatctcggggatacaccgcacagtttaactgaaagtgatttcgagagcttggcccgtcggacagacgggttttctggttctgacgttgctgtctgcgttaaggacgtgttatttgaacccgtgcgcaaaacgcaggatgccatgttcttcttcaaggcggacggtgacatgtggatgccatgtggaccgaagcaaccgggcgccgtgcagaccaccatgcaggagcttgcatccaaaggcctcgctgcgaagattcttccgccccctatctcgagggcggacttcgagaaggtcctgtcgaggcagaggccgacggttagcaagaaggacctggaggtgcacgagaggttcacgaaggagttcggcgaggagggctgacagacgcgggcacccacccatgcacgggctgctgcaccacacaaatgtatattgcttcttatgacttggattgttctgcttggaagtggaagttgcgttacattacaatttggtgtcccaactacggctaatcatgccagctggtttctcgtgttgggctaccaatgggcctctgttgtcagcctatttcatttttattgttgcacatggaatttttccacgggtgtattattatggaataataattgttagcgtggtggagtccttgtggttgc

SEQ ID NO: 6337 - protein, 362 aa, Zea mays subsp. mays
  peptide (1)..(362): Ceres Seq. ID no. 12410830
MRAAQGLGPTVATQLSPRAPRPKGKDGDGGNGGDDSEQSKLRAGLNSAIITEKPNIKWNDVAGLESAKQALQEAVILPVKFPQFFTGKRRPWRAFLLYGPPGTGKSYLAKAVATEADSTFFSISSSDLVSKWMGESEKLVANLFQMARENAPSIIFIDEIDSLCGQRGEGNESEASRRIKTELLVQMQGVGHNDDKVLVLAATNTPYALDQAVRRRFDKRIYIPLPDMKARQHMFKVHLGDTPHSLTESDFESLARRTDGFSGSDVAVCVKDVLFEPVRKTQDAMFFFKADGDMWMPCGPKQPGAVQTTMQELASKGLAAKILPPPISRADFEKVLSRQRPTVSKKDLEVHERFTKEFGEEG

SEQ ID NO: 6338 - protein, 230 aa, Zea mays subsp. mays
  peptide (1)..(230): Ceres Seq. ID no. 12410831
MGESEKLVANLFQMARENAPSIIFIDEIDSLCGQRGEGNESEASRRIKTELLVQMQGVGHNDDKVLVLAATNTPYALDQAVRRRFDKRIYIPLPDMKARQHMFKVHLGDTPHSLTESDFESLARRTDGFSGSDVAVCVKDVLFEPVRKTQDAMFFFKADGDMWMPCGPKQPGAVQTTMQELASKGLAAKILPPPISRADFEKVLSRQRPTVSKKDLEVHERFTKEFGEEG

SEQ ID NO: 6339 - protein, 217 aa, Zea mays subsp. mays
  peptide (1)..(217): Ceres Seq. ID no. 12410832
MARENAPSIIFIDEIDSLCGQRGEGNESEASRRIKTELLVQMQGVGHNDDKVLVLAATNTPYALDQAVRRRFDKRIYIPLPDMKARQHMFKVHLGDTPHSLTESDFESLARRTDGFSGSDVAVCVKDVLFEPVRKTQDAMFFFKADGDMWMPCGPKQPGAVQTTMQELASKGLAAKILPPPISRADFEKVLSRQRPTVSKKDLEVHERFTKEFGEEG

SEQ ID NO: 6340 - DNA, 1422 bp, Zea mays subsp. mays
  misc_feature (1)..(1422): Ceres Seq. ID no. 12410825
  misc_feature (1)..(1422): Ortholog of  Ceres SEQ ID NO 14314252 as cited in SEQ ID NO 57492
  misc_feature (1)..(1422): Ortholog of  Ceres SEQ ID NO 12608276 as cited in SEQ ID NO 57871
  misc_feature (1)..(1422): Ortholog of  Ceres SEQ ID NO 13657914 as cited in SEQ ID NO 66230
  misc_feature (1)..(1422): Ortholog of  Ceres SEQ ID NO 13595877 as cited in SEQ ID NO 67702
  misc_feature (1)..(1422): Ortholog of  Ceres SEQ ID NO 13622667 as cited in SEQ ID NO 0
agatctccggatcgttcatccactggtcgagaatccagatctctcgccttctcgctaccaaataccaaccacgaagaacaggaagaatgcccaaactgtcgtgtcgggtgctctttgcggctcttctcatcgcttcgctagccgctctgctcgtccggttcccgatccacaggctcctcaacccccacgccgccatggaccccgactccgagctcgagttcgagatgcccggcgtcttgcgtgtgtacaagaccggccgcgtcgagcgcttcgacggcaccgagaccgtcccgccctgccccgatggcgatcccgccaacggcgtcgcgtccaaggacatcgtcctggaccccgccgcaggcatctccgcccgcctctacctacccgcgggagtggatgccgggaagaagctccccgtcgttgtgttcttccacggcggtgcgttcatggtccacaccgccgcctccccgctgtaccacatctacgccgcctccctcgctgccgcggtgcccgccgtcgtcgtctccgttgactaccgcctagctcccgagcaccgcatccccgccgcctacgacgacgcattcgcggccctgaaggcggtcatcgccgcgtgccgcgcggatggcgccgaggcggaggctgagccctggctcgcctctcacggcgacgcctcccgcatcgtccttgcgggggacagcgccggcggtaacatggcgcacaacgtggcgataaggctgcgcaaggaaggcggcatcgagggttacggcgacatggtcagcggcgtcgtcctcctgtacccttatttctgggggaaggagccgctgggcgcggagcccacggatcccggctaccgcgcaatgttcgatcccacttgggaattcatctgcggcggaaagttcggcctcgaccacccctacgtcaacccaatggcatcgccggaggagttgaggcagctcggttcccgccgcgtgctggtgaccacggcggaccagtgctggttcgtggagagggcaagggcgtacgcagagggaatcaagaaatgcggctgggagggggagctcgagttctacgagaccaagggtgaggcgcacgtcttcttcttgcctaaacacggcagcgaaaaagccgtgaaggagctcgccctcgtggccgaattcgtccggcgctgttgaggtacctttcgctttgtttgcccggacctggtgagtagttcagcgagaaaaaaaatcgcacaattagtgacttttattcatattgcaaattaaggacagaggttcagtctcgattcagaatcctgatcttgaatttctgttgtgcatcgaaatttatcctgaacagtacacactgtaattctgaagtacaggcaagcgagtggctaaatgtattgtatacttgaaaactgtccaatgtattgtatactcg

SEQ ID NO: 6341 - protein, 389 aa, Zea mays subsp. mays
  peptide (1)..(389): Ceres Seq. ID no. 12410826
ISGSFIHWSRIQISRLLATKYQPRRTGRMPKLSCRVLFAALLIASLAALLVRFPIHRLLNPHAAMDPDSELEFEMPGVLRVYKTGRVERFDGTETVPPCPDGDPANGVASKDIVLDPAAGISARLYLPAGVDAGKKLPVVVFFHGGAFMVHTAASPLYHIYAASLAAAVPAVVVSVDYRLAPEHRIPAAYDDAFAALKAVIAACRADGAEAEAEPWLASHGDASRIVLAGDSAGGNMAHNVAIRLRKEGGIEGYGDMVSGVVLLYPYFWGKEPLGAEPTDPGYRAMFDPTWEFICGGKFGLDHPYVNPMASPEELRQLGSRRVLVTTADQCWFVERARAYAEGIKKCGWEGELEFYETKGEAHVFFLPKHGSEKAVKELALVAEFVRRC

SEQ ID NO: 6342 - protein, 361 aa, Zea mays subsp. mays
  peptide (1)..(361): Ceres Seq. ID no. 12410827
MPKLSCRVLFAALLIASLAALLVRFPIHRLLNPHAAMDPDSELEFEMPGVLRVYKTGRVERFDGTETVPPCPDGDPANGVASKDIVLDPAAGISARLYLPAGVDAGKKLPVVVFFHGGAFMVHTAASPLYHIYAASLAAAVPAVVVSVDYRLAPEHRIPAAYDDAFAALKAVIAACRADGAEAEAEPWLASHGDASRIVLAGDSAGGNMAHNVAIRLRKEGGIEGYGDMVSGVVLLYPYFWGKEPLGAEPTDPGYRAMFDPTWEFICGGKFGLDHPYVNPMASPEELRQLGSRRVLVTTADQCWFVERARAYAEGIKKCGWEGELEFYETKGEAHVFFLPKHGSEKAVKELALVAEFVRRC

SEQ ID NO: 6343 - protein, 325 aa, Zea mays subsp. mays
  peptide (1)..(325): Ceres Seq. ID no. 12410828
MDPDSELEFEMPGVLRVYKTGRVERFDGTETVPPCPDGDPANGVASKDIVLDPAAGISARLYLPAGVDAGKKLPVVVFFHGGAFMVHTAASPLYHIYAASLAAAVPAVVVSVDYRLAPEHRIPAAYDDAFAALKAVIAACRADGAEAEAEPWLASHGDASRIVLAGDSAGGNMAHNVAIRLRKEGGIEGYGDMVSGVVLLYPYFWGKEPLGAEPTDPGYRAMFDPTWEFICGGKFGLDHPYVNPMASPEELRQLGSRRVLVTTADQCWFVERARAYAEGIKKCGWEGELEFYETKGEAHVFFLPKHGSEKAVKELALVAEFVRRC

SEQ ID NO: 6344 - DNA, 1630 bp, Zea mays subsp. mays
  misc_feature (1)..(1630): Ceres Seq. ID no. 12353812
  misc_feature (1)..(1630): Ortholog of  Ceres SEQ ID NO 13595437 as cited in SEQ ID NO 56562
atcttgatctcatctcctatcttcttcctcctagattctttcttccgcgcgccctctctctctctctccttcctgccttctgcctgcgggcggcccatgtccgtggcgcccctcctgccctgcgagctgcttctccagcgaaaaggttgctgcgccttgacgcaccaccgatccaccgccgcccaacccgagcgttctgtccggcagctaggtagcgagctgcgcggtggctgcgaccggaagcagggaggggaacagggcagcgaacgcccggcgattgccttgcttgcctgtgtgctccggccggcgcgagttggtcggtcgttccatgcatggatgacaaggaacttatctcacagtccgacctgcagtcattctaccagcagcagcagcagcaccaccgggccttcggcggcggcggcggcgggcagcatagcccgtcctcgctggccgggatgcactccgtcattcgccccatgcccaacatgaacatgagcccgtcggcgatccttaactctatcggcgggggctccttcaccggtatgcagttccaaatggacccgccgccgccaccattgctgcacaccgccgccatgggtgcctcggctcctacctccacccccggtgccgtccccgcggcccccacggagccggtcaagcgcaaaagagggagaccgcgcaaatacggtcccgacggcaccatgaagcagcagcagctcgtcgccgcacagccaaggatagggccgtctggtcccaacatgatcagcagcgccgggatagaggactcttcgcagaagaagcggcgcggccggccgccgggcaccgccaagaagcatcagccctcgccctctcaaggcaatgcgttcgccggttcagctggaacgagcttcactccgcacatcatcacggcgtctccttcagaggacgtggcggcgaagatcgtcgcgttcgccacccagtcgtcaagggcggtgtgcgtgctctcggcgatgggctccgtctccagggccgtcctccgccacccggccgacggctctcccatggcgagggttcacgcgtcgccgcagccgtacaacaacagcccagccatctacgaggggttctacgagatcatgagcctaaccggctcgtacaacctggccgagggctcacaacaagaacagtgccagggccagggccagccgagcggcgggctcagcgtcacgctctgcagccctgagaggaatgtgatcggaggtgttttgggcggcccactggtagctgcaggaaccgtgcaggtggtactggggagttttcaccaaggagggtcgaaatccaagtccaagaaaggcgggaagcagcagcaggcgccggcgccggcggccgccttcagttccgactcgctcaccggcggccaggaggcgtcgcccagctctgggcacaaccaaaatctaacgccgccgccgccgccgccctccgtgacgggagggtggcccacctccgggatgtttgacaccagcattgatatcaactcatctagaggatagctcatttcatttgtcgataattccagccctcgagaaattttctgttctcgcacaagaatgatcgaaaccatacttcgaaatagattattcggtttctccctttt

SEQ ID NO: 6345 - protein, 397 aa, Zea mays subsp. mays
  peptide (1)..(397): Ceres Seq. ID no. 12353813
MDDKELISQSDLQSFYQQQQQHHRAFGGGGGGQHSPSSLAGMHSVIRPMPNMNMSPSAILNSIGGGSFTGMQFQMDPPPPPLLHTAAMGASAPTSTPGAVPAAPTEPVKRKRGRPRKYGPDGTMKQQQLVAAQPRIGPSGPNMISSAGIEDSSQKKRRGRPPGTAKKHQPSPSQGNAFAGSAGTSFTPHIITASPSEDVAAKIVAFATQSSRAVCVLSAMGSVSRAVLRHPADGSPMARVHASPQPYNNSPAIYEGFYEIMSLTGSYNLAEGSQQEQCQGQGQPSGGLSVTLCSPERNVIGGVLGGPLVAAGTVQVVLGSFHQGGSKSKSKKGGKQQQAPAPAAAFSSDSLTGGQEASPSSGHNQNLTPPPPPPSVTGGWPTSGMFDTSIDINSSRG

SEQ ID NO: 6346 - protein, 356 aa, Zea mays subsp. mays
  peptide (1)..(356): Ceres Seq. ID no. 12353814
MHSVIRPMPNMNMSPSAILNSIGGGSFTGMQFQMDPPPPPLLHTAAMGASAPTSTPGAVPAAPTEPVKRKRGRPRKYGPDGTMKQQQLVAAQPRIGPSGPNMISSAGIEDSSQKKRRGRPPGTAKKHQPSPSQGNAFAGSAGTSFTPHIITASPSEDVAAKIVAFATQSSRAVCVLSAMGSVSRAVLRHPADGSPMARVHASPQPYNNSPAIYEGFYEIMSLTGSYNLAEGSQQEQCQGQGQPSGGLSVTLCSPERNVIGGVLGGPLVAAGTVQVVLGSFHQGGSKSKSKKGGKQQQAPAPAAAFSSDSLTGGQEASPSSGHNQNLTPPPPPPSVTGGWPTSGMFDTSIDINSSRG

SEQ ID NO: 6347 - protein, 349 aa, Zea mays subsp. mays
  peptide (1)..(349): Ceres Seq. ID no. 12353815
MPNMNMSPSAILNSIGGGSFTGMQFQMDPPPPPLLHTAAMGASAPTSTPGAVPAAPTEPVKRKRGRPRKYGPDGTMKQQQLVAAQPRIGPSGPNMISSAGIEDSSQKKRRGRPPGTAKKHQPSPSQGNAFAGSAGTSFTPHIITASPSEDVAAKIVAFATQSSRAVCVLSAMGSVSRAVLRHPADGSPMARVHASPQPYNNSPAIYEGFYEIMSLTGSYNLAEGSQQEQCQGQGQPSGGLSVTLCSPERNVIGGVLGGPLVAAGTVQVVLGSFHQGGSKSKSKKGGKQQQAPAPAAAFSSDSLTGGQEASPSSGHNQNLTPPPPPPSVTGGWPTSGMFDTSIDINSSRG

SEQ ID NO: 6348 - DNA, 1108 bp, Zea mays subsp. mays
  misc_feature (1)..(1108): Ceres Seq. ID no. 12566751
  misc_feature (1)..(1108): Ortholog of  Ceres SEQ ID NO 15177414 as cited in SEQ ID NO 57242
  misc_feature (1)..(1108): Ortholog of  Ceres SEQ ID NO 13594151 as cited in SEQ ID NO 58886
aatcccctcctccgccctccgcctcctcagtgctccggcgcctagcgacctgctcctgcccccgccgccgccgtgcacgcacagccggagcaggagcagcgctgcccgcctttaccgttgcccatggagaactctgccgccgccgccgccgcccggccgcgcctcacccgcgcagccgccaagcgctcagccgtcgtcacggctgtggccgtcgccgccaagcgcaagcgcgtcgcgctcagccagctgcccacgctccccaacgccgtgctcggcgcgcacgacgacgacgacgacaagcccgtcaggaagcagcgcctcctccccgccgccaagcccaagcccaagcccaaggcagcgcccgcgcctgccgcgcccgccgccgcggatgacacggatgacgacattcagctctgcaagccctacgcttccgacatctactcctacctccgctccatggagtcgcaggccaagcgccgcctcgctgttgactacatcgcggcggtgcagatcgacgtcacgcccaacatgcgtggcatcctcatcgactggctcgtcgaggtcgccgaggagtacaagctcgtctccgacacgctctacctcaccgtctcctacatcgaccgcttcctctctgccaaagttctcaacaggcagaagctgcagctcctcggcgtctccgccatgctcatcgcatccaagtatgaggagatcagcccgcccaacgtggaggatttctgctacatcaccgataacacctacaccaagcaggaggtagttaagatggagagtgatatactgaatgtcctcaagtttgaggtgggcagtcctaccgccaagacgttcctgaggatgttcatcagatctgcccaagaagacaacaagaagtatcctagcctccagttggagttcctggggagctacctttctgagctgagcttgctggattatggcttgattcgctccttgccgtcacttgttgcagcctcagccgtctttgttgcaaggctgaccctggatccacacacccatccctggagcaagaagatgcaaacgctaacaggctataagccatctgagttgaaggactgtgttgctgccatacataatt

SEQ ID NO: 6349 - protein, 328 aa, Zea mays subsp. mays
  peptide (1)..(328): Ceres Seq. ID no. 12566752
MENSAAAAAARPRLTRAAAKRSAVVTAVAVAAKRKRVALSQLPTLPNAVLGAHDDDDDKPVRKQRLLPAAKPKPKPKAAPAPAAPAAADDTDDDIQLCKPYASDIYSYLRSMESQAKRRLAVDYIAAVQIDVTPNMRGILIDWLVEVAEEYKLVSDTLYLTVSYIDRFLSAKVLNRQKLQLLGVSAMLIASKYEEISPPNVEDFCYITDNTYTKQEVVKMESDILNVLKFEVGSPTAKTFLRMFIRSAQEDNKKYPSLQLEFLGSYLSELSLLDYGLIRSLPSLVAASAVFVARLTLDPHTHPWSKKMQTLTGYKPSELKDCVAAIHN

SEQ ID NO: 6350 - protein, 257 aa, Zea mays subsp. mays
  peptide (1)..(257): Ceres Seq. ID no. 12566753
IPSSALRLLSAPAPSDLLLPPPPPCTHSRSRSSAARLYRCPWRTLPPPPPPGRASPAQPPSAQPSSRLWPSPPSASASRSASCPRSPTPCSARTTTTTTSPSGSSASSPPPSPSPSPRQRPRLPRPPPRMTRMTTFSSASPTLPTSTPTSAPWSRRPSAASLLTTSRRCRSTSRPTCVASSSTGSSRSPRSTSSSPTRSTSPSPTSTASSLPKFSTGRSCSSSASPPCSSHPSMRRSARPTWRISATSPITPTPSRR

SEQ ID NO: 6351 - protein, 217 aa, Zea mays subsp. mays
  peptide (1)..(217): Ceres Seq. ID no. 12566754
MESQAKRRLAVDYIAAVQIDVTPNMRGILIDWLVEVAEEYKLVSDTLYLTVSYIDRFLSAKVLNRQKLQLLGVSAMLIASKYEEISPPNVEDFCYITDNTYTKQEVVKMESDILNVLKFEVGSPTAKTFLRMFIRSAQEDNKKYPSLQLEFLGSYLSELSLLDYGLIRSLPSLVAASAVFVARLTLDPHTHPWSKKMQTLTGYKPSELKDCVAAIHN

SEQ ID NO: 6352 - DNA, 2219 bp, Zea mays subsp. mays
  misc_feature (1)..(2219): Ceres Seq. ID no. 12409104
  misc_feature (1)..(2219): Ortholog of  Ceres SEQ ID NO 14307843 as cited in SEQ ID NO 20508
  misc_feature (1)..(2219): Ortholog of  Ceres SEQ ID NO 15170811 as cited in SEQ ID NO 52649
  misc_feature (1)..(2219): Ortholog of  Ceres SEQ ID NO 13638331 as cited in SEQ ID NO 58047
  misc_feature (1)..(2219): Ortholog of  Ceres SEQ ID NO 15225845 as cited in SEQ ID NO 65125
  misc_feature (1)..(2219): Ortholog of  Ceres SEQ ID NO 15170135 as cited in SEQ ID NO 67647
attcgagccctgaaatcccaaaagcccaaaccaaatccaagcgcaagagggggcaaagccgcaaagggggaggcaccaggcaccggcagccattacttactggtcctcactcccacaccaaccaaccaacctcctctgcctgccgcttctcctgctgcgggcgggcactgctgcaagtactagaggaggacatccgcttccattactgcgcctgcggaggatcggaggaaccagtagcggaggcttcgattttcggcgggcgcaataaatttcccgcatggctcggagggccgcgtcctcgctcgtctcccgctgcctcctggcgagggcccctgccggcgcgccgcccgctgccccctctgcgccgcgcaggacagtgcctgcagatgggatgcacaggctgttgccaggtgtccttcagaggttcagcactgcagcagcagtagaggagcccatcacgccgtcagtccatgtgaactacacaaagctcctcattaatgggaactttgttgattccgcatccggcaagaccttcccaactctggaccctcgtacaggggaggtgattgctcatgtggctgagggtgacgcagaggacattaaccgtgcagtagctgcggctcgcaaggcttttgatgaagggccatggccgaagatgactgcctatgagaggtcccgtatcctactgcggtttgctgatttgatagagaagcacaatgacgagcttgctgctttggagacatgggacaacgggaagccatatgagcaagcagcccagattgaagtacccatggtggcccgtcttatgcgttactatgctggttgggctgataagatccatgggctcattgtgccggctgatggcccacaccatgtacagatcttgcatgagccaattggtgttgcaggtcagatcatcccatggaactttcctcttctgatgtatgcctggaaagttggccctgctttggcatgtggaaatactctcgtgctcaagactgctgaacaaacccctctatcggctttgtatatctccaaattgttgcatgaggctggactacctgagggtgttgtgaatgtcgtttctggttttggccctactgctggtgctgctcttgctagtcacatggatgttgataagatcgcatttactggatctaccgatactggaaaaattattctcgagttggctgcaaagagcaaccttaagacagtgacactggagttaggaggcaagtcccctttcatcataatggacgatgctgatgttgaccatgctgttgagcttgcgcactttgccctgttctttaaccagggacaatgctgctgcgctggatctcgcacgtttgtacatgagcgtgtttatgatgagtttgtggagaaggccaaggctcgtgcattgaagcgcgtcgttggtgatccgttcaggaaaggtgttgaacagggcccgcagattgacgacgagcaattcaacaagatcttgcgctacattaggtatggtgttgacggtggagctacccttgtgacgggtggtgataggttgggtgacaagggtttctacatccagccaacgattttctcagatgtccaggacggcatgaagattgctcaggaggagatatttgggcctgtgcagtcgatcctcaagttcaaagacctcaatgaggttatcaagagggcaaacgcgagccagtatggattggccgccggcgtgttcaccaacagcctggacacggccaacaccctgacgcgcgcgctcagggccgggaccgtctgggtgaactgcttcgacgtcttcgatgctgcgattccgtttggtgggtacaagatgagcggcatcgggagggagaagggcgttgacagcctgaagaactacctgcaggtgaaggcggtcgtcaccccaatcaagaacgccgcgtggttgtagacgctgcaagtgtggccttgtgcacgagaaccacgtatattcatttcctggtcacatccccgaacaatgtgaaggcgttaatcagatagatgacgatgaagaagaacaactataataagatttgccctagcctgggttctcagttatctctaataagttttatggttggtgcctatatattgtgcaatttggttgctcccttttattttgtttctttttgataagactgttctagcaacggatatgcagagttcattatgaaaatgcatttgttagtgtctttgatggttaa

SEQ ID NO: 6353 - protein, 549 aa, Zea mays subsp. mays
  peptide (1)..(549): Ceres Seq. ID no. 12409105
MARRAASSLVSRCLLARAPAGAPPAAPSAPRRTVPADGMHRLLPGVLQRFSTAAAVEEPITPSVHVNYTKLLINGNFVDSASGKTFPTLDPRTGEVIAHVAEGDAEDINRAVAAARKAFDEGPWPKMTAYERSRILLRFADLIEKHNDELAALETWDNGKPYEQAAQIEVPMVARLMRYYAGWADKIHGLIVPADGPHHVQILHEPIGVAGQIIPWNFPLLMYAWKVGPALACGNTLVLKTAEQTPLSALYISKLLHEAGLPEGVVNVVSGFGPTAGAALASHMDVDKIAFTGSTDTGKIILELAAKSNLKTVTLELGGKSPFIIMDDADVDHAVELAHFALFFNQGQCCCAGSRTFVHERVYDEFVEKAKARALKRVVGDPFRKGVEQGPQIDDEQFNKILRYIRYGVDGGATLVTGGDRLGDKGFYIQPTIFSDVQDGMKIAQEEIFGPVQSILKFKDLNEVIKRANASQYGLAAGVFTNSLDTANTLTRALRAGTVWVNCFDVFDAAIPFGGYKMSGIGREKGVDSLKNYLQVKAVVTPIKNAAWL

SEQ ID NO: 6354 - protein, 511 aa, Zea mays subsp. mays
  peptide (1)..(511): Ceres Seq. ID no. 12409106
MHRLLPGVLQRFSTAAAVEEPITPSVHVNYTKLLINGNFVDSASGKTFPTLDPRTGEVIAHVAEGDAEDINRAVAAARKAFDEGPWPKMTAYERSRILLRFADLIEKHNDELAALETWDNGKPYEQAAQIEVPMVARLMRYYAGWADKIHGLIVPADGPHHVQILHEPIGVAGQIIPWNFPLLMYAWKVGPALACGNTLVLKTAEQTPLSALYISKLLHEAGLPEGVVNVVSGFGPTAGAALASHMDVDKIAFTGSTDTGKIILELAAKSNLKTVTLELGGKSPFIIMDDADVDHAVELAHFALFFNQGQCCCAGSRTFVHERVYDEFVEKAKARALKRVVGDPFRKGVEQGPQIDDEQFNKILRYIRYGVDGGATLVTGGDRLGDKGFYIQPTIFSDVQDGMKIAQEEIFGPVQSILKFKDLNEVIKRANASQYGLAAGVFTNSLDTANTLTRALRAGTVWVNCFDVFDAAIPFGGYKMSGIGREKGVDSLKNYLQVKAVVTPIKNAAWL

SEQ ID NO: 6355 - protein, 423 aa, Zea mays subsp. mays
  peptide (1)..(423): Ceres Seq. ID no. 12409107
MTAYERSRILLRFADLIEKHNDELAALETWDNGKPYEQAAQIEVPMVARLMRYYAGWADKIHGLIVPADGPHHVQILHEPIGVAGQIIPWNFPLLMYAWKVGPALACGNTLVLKTAEQTPLSALYISKLLHEAGLPEGVVNVVSGFGPTAGAALASHMDVDKIAFTGSTDTGKIILELAAKSNLKTVTLELGGKSPFIIMDDADVDHAVELAHFALFFNQGQCCCAGSRTFVHERVYDEFVEKAKARALKRVVGDPFRKGVEQGPQIDDEQFNKILRYIRYGVDGGATLVTGGDRLGDKGFYIQPTIFSDVQDGMKIAQEEIFGPVQSILKFKDLNEVIKRANASQYGLAAGVFTNSLDTANTLTRALRAGTVWVNCFDVFDAAIPFGGYKMSGIGREKGVDSLKNYLQVKAVVTPIKNAAWL

SEQ ID NO: 6356 - DNA, 1566 bp, Zea mays subsp. mays
  misc_feature (1)..(1566): Ceres Seq. ID no. 12374418
  misc_feature (1)..(1566): Ortholog of  Ceres SEQ ID NO 13594104 as cited in SEQ ID NO 55505
ggcactgccattcccgtttcctcgctcgaacacacaccgaagagagagacagagcgagagaggatggcgtccctggcgcagcacgtcgcgggcctaccgtgcccccctctatccggcgcgtcgcgccgtcgccccgcggcgcagaggcggcctccgtcggcgcttgtgtgcggtacctatgcgctgaccaaggacgagcgggagcgggagcggatgcgccaggtgttcgacgacgcctccgagcgctgccgcaccgcgcccatggagggcgtcgccttctcccccgacgacctcgacaccgccgtcgagtccaccgacatagacacggagatcggctcgctcattaaaggaacagtatttatgactacctcaaatggtgcatatatcgacatccaatccaagtctactgcttttttgcccttagatgaggcatgtcttcttgatatcgataatgttgaagaggctggcattcgtcctgggttagtagaagaattcatgataattgatgagaacccaggtgatgaaactttgattctaagtttgcaagcaattcagcaagaacttgcatgggaaaggtgccggcaacttcaggccgaagatgtcgttgtcacgggtaaagtaattggtggaaacaaaggaggtgtagtagctcttgtggatgggcttaagggtttcgttccattttcgcaagtgtcatcgaaaacaaccgccgaagagctgcttgagaaagaattgcctctgaagtttgtagaggtcgatgaggaacaaggcaggcttgtcctcagtaatcgcaaggcaatggcagatagtcaggcccagctaggtattggatcagttgtcttgggaactgtagagagcctaaaaccttatggcgccttcattgacatcggtggaatcaacggccttctccatgtgagccagattagtcatgaccgtgttgcagatatctcaacagttctgcaaccaggagataccctcaaggttatgatactgagccatgaccgtgaaagaggccgagtcagcctttctactaagaagcttgagccaacacctggtgacatgatccgcaatcccaagcttgtgtttgagaaggctgatgagatggctcagatattcaggcagagaatagctcaggcagaggctatggctcgtgctgacatgttgagattccagccagagagtggattgaccctcagttcagagggcatcttaggaccattgtcgtcggatgcaccttcggaggattctgaagaacccacagatgaatagaggcagttgacgaagtgcaccgggtttgagatatgtgatggcagttcatcatgctcattttccttggggtgggggaggcatgacgagagcatgttctgttcagatcgttttccccgttccacttattcttgtcttgtactaggaaatctgaaaatgtaacaaggttctgaagacaccgaaaagaaatgtaattaaatccctctgtgaagttatcccattctcgcaggaacctcaatgtgtagtctgatcgttgagtgtatattttgtaattttgaatgcattttgaatgcgtattcc

SEQ ID NO: 6357 - protein, 422 aa, Zea mays subsp. mays
  peptide (1)..(422): Ceres Seq. ID no. 12374419
GTAIPVSSLEHTPKRETERERMASLAQHVAGLPCPPLSGASRRRPAAQRRPPSALVCGTYALTKDERERERMRQVFDDASERCRTAPMEGVAFSPDDLDTAVESTDIDTEIGSLIKGTVFMTTSNGAYIDIQSKSTAFLPLDEACLLDIDNVEEAGIRPGLVEEFMIIDENPGDETLILSLQAIQQELAWERCRQLQAEDVVVTGKVIGGNKGGVVALVDGLKGFVPFSQVSSKTTAEELLEKELPLKFVEVDEEQGRLVLSNRKAMADSQAQLGIGSVVLGTVESLKPYGAFIDIGGINGLLHVSQISHDRVADISTVLQPGDTLKVMILSHDRERGRVSLSTKKLEPTPGDMIRNPKLVFEKADEMAQIFRQRIAQAEAMARADMLRFQPESGLTLSSEGILGPLSSDAPSEDSEEPTDE

SEQ ID NO: 6358 - protein, 401 aa, Zea mays subsp. mays
  peptide (1)..(401): Ceres Seq. ID no. 12374420
MASLAQHVAGLPCPPLSGASRRRPAAQRRPPSALVCGTYALTKDERERERMRQVFDDASERCRTAPMEGVAFSPDDLDTAVESTDIDTEIGSLIKGTVFMTTSNGAYIDIQSKSTAFLPLDEACLLDIDNVEEAGIRPGLVEEFMIIDENPGDETLILSLQAIQQELAWERCRQLQAEDVVVTGKVIGGNKGGVVALVDGLKGFVPFSQVSSKTTAEELLEKELPLKFVEVDEEQGRLVLSNRKAMADSQAQLGIGSVVLGTVESLKPYGAFIDIGGINGLLHVSQISHDRVADISTVLQPGDTLKVMILSHDRERGRVSLSTKKLEPTPGDMIRNPKLVFEKADEMAQIFRQRIAQAEAMARADMLRFQPESGLTLSSEGILGPLSSDAPSEDSEEPTDE

SEQ ID NO: 6359 - protein, 351 aa, Zea mays subsp. mays
  peptide (1)..(351): Ceres Seq. ID no. 12374421
MRQVFDDASERCRTAPMEGVAFSPDDLDTAVESTDIDTEIGSLIKGTVFMTTSNGAYIDIQSKSTAFLPLDEACLLDIDNVEEAGIRPGLVEEFMIIDENPGDETLILSLQAIQQELAWERCRQLQAEDVVVTGKVIGGNKGGVVALVDGLKGFVPFSQVSSKTTAEELLEKELPLKFVEVDEEQGRLVLSNRKAMADSQAQLGIGSVVLGTVESLKPYGAFIDIGGINGLLHVSQISHDRVADISTVLQPGDTLKVMILSHDRERGRVSLSTKKLEPTPGDMIRNPKLVFEKADEMAQIFRQRIAQAEAMARADMLRFQPESGLTLSSEGILGPLSSDAPSEDSEEPTDE

SEQ ID NO: 6360 - DNA, 1546 bp, Zea mays subsp. mays
  misc_feature (1)..(1546): Ceres Seq. ID no. 12409096
  misc_feature (1)..(1546): Ortholog of  Ceres SEQ ID NO 13592961 as cited in SEQ ID NO 20522
  misc_feature (1)..(1546): Ortholog of  Ceres SEQ ID NO 12583469 as cited in SEQ ID NO 51031
  misc_feature (1)..(1546): Ortholog of  Ceres SEQ ID NO 13596527 as cited in SEQ ID NO 62582
  misc_feature (1)..(1546): Ortholog of  Ceres SEQ ID NO 15226378 as cited in SEQ ID NO 62741
  misc_feature (1)..(1546): Ortholog of  Ceres SEQ ID NO 15169639 as cited in SEQ ID NO 64624
  misc_feature (1)..(1546): Ortholog of  Ceres SEQ ID NO 14303071 as cited in SEQ ID NO 67114
  misc_feature (1)..(1546): Ortholog of  Ceres SEQ ID NO 13595998 as cited in SEQ ID NO 68161
  misc_feature (1)..(1546): Ortholog of  Ceres SEQ ID NO 14303635 as cited in SEQ ID NO 68503
acgtctcattcaagcgctctgccggccagcctagtgctctcggctttctttcatctccctccttttgccacttgctgtagctttaatttgcctggcactttgcacgttgtggccggccggggcctgtgcttccattggtcggcagcaagcaagcaaggctagctagcgtccgtggatcagtcatgggcagccagaggcagaggcaccgagcggtcactggcctcccggcggcgggcgcgcggatgctggccctgctgtgcgcgtcgtcgtgggtgctggtgctcacgacggcgcagaactacagcgccatcttcaacttcggcgactcgatcaccgacaccggcaacctgtgcaccagcggcaggccgtcgcagatcaccttcacgcagcccccctacggcgagacctacttcggcacgccgacgtgccgctgctccgacggccgcgtcgtcgtcgacttcctgagcacccagttcgggctgccgttcctgccgccgtccaagtcgagcagcgcggacttcagtcagggcgccaacatggcgatcacgggcgccactgccatggacgcccccttcttccgctcgctcgggctctccgacaagatctggaacaacgggcccatcagctttcagctgcagtggttccagcagatcgccacctccgtctgcggacagagctgcaagagctacctgggcaactccctgttcgtgttcggcgagttcggcggcaacgactacaacgccatgatcttcggcggctactccatcgagcaggccaggaaatacgtccccaagatcgtcaacaccatctcgaggggcatcgataaactgatcgccatgggcgcgaccgacatcgtcgtccccggggtgcttcccatcgggtgcttccccatctatctgaccatctaccagagctccaacggcagcgactacgacagtctcggctgcctcaacagcttcaacgacctgtccacgtaccacaactccctgctccagaagagggtggacatcatccagagccggcacaggaagacggcgcgcatcatgtacgccgacttctactccgccgtctacgacatggtccgcaacccacagagctacgggttcagctcggtgttcgagacgtgctgcggatcaggcggcggcaagtacaactaccagaacagcgcgcggtgcggcatggcgggcgccgccgcgtgctctagcccggcgtcgcacctcagctgggacggcatccacctcacggaggccgcgtacaagcacatcaccgacgcctggctcaaggggccgtactgccgcccgcccatcctgcacaactaatcctcagtgcatatggacacgctggaccggaggccggcagcgcgttgtcttttttataaataatttatttattattcgtacaagctttggttggatccatcgcggcgggggttattaattatagcattggttggtcctttcgttatatttgaccatatttttttttgtgttcggggtaaggtgtttattatattttgcgttgctcaagaaaaagagctgacgatggc

SEQ ID NO: 6361 - protein, 378 aa, Zea mays subsp. mays
  peptide (1)..(378): Ceres Seq. ID no. 12409097
MGSQRQRHRAVTGLPAAGARMLALLCASSWVLVLTTAQNYSAIFNFGDSITDTGNLCTSGRPSQITFTQPPYGETYFGTPTCRCSDGRVVVDFLSTQFGLPFLPPSKSSSADFSQGANMAITGATAMDAPFFRSLGLSDKIWNNGPISFQLQWFQQIATSVCGQSCKSYLGNSLFVFGEFGGNDYNAMIFGGYSIEQARKYVPKIVNTISRGIDKLIAMGATDIVVPGVLPIGCFPIYLTIYQSSNGSDYDSLGCLNSFNDLSTYHNSLLQKRVDIIQSRHRKTARIMYADFYSAVYDMVRNPQSYGFSSVFETCCGSGGGKYNYQNSARCGMAGAAACSSPASHLSWDGIHLTEAAYKHITDAWLKGPYCRPPILHN

SEQ ID NO: 6362 - protein, 358 aa, Zea mays subsp. mays
  peptide (1)..(358): Ceres Seq. ID no. 12409098
MLALLCASSWVLVLTTAQNYSAIFNFGDSITDTGNLCTSGRPSQITFTQPPYGETYFGTPTCRCSDGRVVVDFLSTQFGLPFLPPSKSSSADFSQGANMAITGATAMDAPFFRSLGLSDKIWNNGPISFQLQWFQQIATSVCGQSCKSYLGNSLFVFGEFGGNDYNAMIFGGYSIEQARKYVPKIVNTISRGIDKLIAMGATDIVVPGVLPIGCFPIYLTIYQSSNGSDYDSLGCLNSFNDLSTYHNSLLQKRVDIIQSRHRKTARIMYADFYSAVYDMVRNPQSYGFSSVFETCCGSGGGKYNYQNSARCGMAGAAACSSPASHLSWDGIHLTEAAYKHITDAWLKGPYCRPPILHN

SEQ ID NO: 6363 - protein, 260 aa, Zea mays subsp. mays
  peptide (1)..(260): Ceres Seq. ID no. 12409099
MAITGATAMDAPFFRSLGLSDKIWNNGPISFQLQWFQQIATSVCGQSCKSYLGNSLFVFGEFGGNDYNAMIFGGYSIEQARKYVPKIVNTISRGIDKLIAMGATDIVVPGVLPIGCFPIYLTIYQSSNGSDYDSLGCLNSFNDLSTYHNSLLQKRVDIIQSRHRKTARIMYADFYSAVYDMVRNPQSYGFSSVFETCCGSGGGKYNYQNSARCGMAGAAACSSPASHLSWDGIHLTEAAYKHITDAWLKGPYCRPPILHN

SEQ ID NO: 6364 - DNA, 1237 bp, Zea mays subsp. mays; identical to SEQ ID NO: 5628
  misc_feature (1)..(1237): Ceres Seq. ID no. 12356266
  misc_feature (1)..(1237): Ortholog of  Ceres SEQ ID NO 13594377 as cited in SEQ ID NO 58177
  misc_feature (1)..(1237): Ortholog of  Ceres SEQ ID NO 15224613 as cited in SEQ ID NO 58938
  misc_feature (1)..(1237): Ortholog of  Ceres SEQ ID NO 13664309 as cited in SEQ ID NO 60596

SEQ ID NO: 6365 - protein, 374 aa, Zea mays subsp. mays; identical to SEQ ID NO: 5629
  peptide (1)..(374): Ceres Seq. ID no. 12356267

SEQ ID NO: 6366 - protein, 354 aa, Zea mays subsp. mays; identical to SEQ ID NO: 5630
  peptide (1)..(354): Ceres Seq. ID no. 12356268

SEQ ID NO: 6367 - protein, 270 aa, Zea mays subsp. mays; identical to SEQ ID NO: 5631
  peptide (1)..(270): Ceres Seq. ID no. 12356269

SEQ ID NO: 6368 - DNA, 854 bp, Zea mays subsp. mays
  misc_feature (1)..(854): Ceres Seq. ID no. 12409092
  misc_feature (1)..(854): Ortholog of  Ceres SEQ ID NO 13594809 as cited in SEQ ID NO 51847
  misc_feature (1)..(854): Ortholog of  Ceres SEQ ID NO 12563124 as cited in SEQ ID NO 57104
  misc_feature (1)..(854): Ortholog of  Ceres SEQ ID NO 15226273 as cited in SEQ ID NO 64934
  misc_feature (1)..(854): Ortholog of  Ceres SEQ ID NO 12617639 as cited in SEQ ID NO 65219
  misc_feature (1)..(854): Ortholog of  Ceres SEQ ID NO 15173998 as cited in SEQ ID NO 0
  misc_feature (1)..(854): Ortholog of  Ceres SEQ ID NO 15178333 as cited in SEQ ID NO 0
acatcgccccagccccaagtccaaagccgcgagaggcaagggcgcagcaaaaccctagccgccttcccgtccttttcctttcataaaccccaagccgcgccgcaatagctcgccccctcgttcgccgcctctcctgctcctaccgcagctctccctcaggtttagtgttcgcaatggcggccttcaacaagcttggtggccttctaaggcacagtgctctggtgagcggtatcactggtggctcttctcctgcagtgttcaatgctgcacggctcatgtctaccaagctatttattggtggtcttgactggggtgttgatgacgtgaaactaagagaagcatttagcagctttggagaggttactgaagcgagggtgatcacagacagggagactgggaggtcaagaggctttggctttgtgaactactccgacagtgatgctgccaaggaagctatttctgcaatggatggcaaggaaattgatgggcggcaggtacgtgtcaacatggctaatgagagacctgctgggaaccgtggtggtggtggctatggcggcggcggctatggaggtggtggctacggaggtggcggcggctacggaggtggtggctatggtggtggcagccaaagctatgatgcttgaggggggcaggatcctattaggtgcattatcaaccaagatatttgaaataatgaactttaggacttggtatgacgttttatgttaagcgttgtcaggttttgctattcgtgttatgctgaattgttggaactcctagatgcagaatcttacgtattggttttggttccttcgagaagtgcaaatgcaagacgcatctattcccattgagtg

SEQ ID NO: 6369 - protein, 156 aa, Zea mays subsp. mays
  peptide (1)..(156): Ceres Seq. ID no. 12409093
MAAFNKLGGLLRHSALVSGITGGSSPAVFNAARLMSTKLFIGGLDWGVDDVKLREAFSSFGEVTEARVITDRETGRSRGFGFVNYSDSDAAKEAISAMDGKEIDGRQVRVNMANERPAGNRGGGGYGGGGYGGGGYGGGGGYGGGGYGGGSQSYDA

SEQ ID NO: 6370 - protein, 122 aa, Zea mays subsp. mays
  peptide (1)..(122): Ceres Seq. ID no. 12409094
MSTKLFIGGLDWGVDDVKLREAFSSFGEVTEARVITDRETGRSRGFGFVNYSDSDAAKEAISAMDGKEIDGRQVRVNMANERPAGNRGGGGYGGGGYGGGGYGGGGGYGGGGYGGGSQSYDA

SEQ ID NO: 6371 - protein, 96 aa, Zea mays subsp. mays
  peptide (1)..(96): Ceres Seq. ID no. 12409095
MLPRKLFLQWMARKLMGGRYVSTWLMRDLLGTVVVVAMAAAAMEVVATEVAAATEVVAMVVAAKAMMLEGGRILLGALSTKIFEIMNFRTWYDVLC

SEQ ID NO: 6372 - DNA, 620 bp, Zea mays subsp. mays
  misc_feature (1)..(620): Ceres Seq. ID no. 12367118
  misc_feature (1)..(620): Ortholog of  Ceres SEQ ID NO 15175765 as cited in SEQ ID NO 54076
aaatcccccaaacatttcgtcgaatccgccgtgagatccgcccgactctcgctccgttccggcgctctcggtcgggcgaaggctccaccttcctccgacaagatggcggggaagggagccaaggccacggccgccaagtcggcggacaaggacaaggggaagaagaccggcggccccgtctcgcgctcctcccgcgccgcaccccaggagaagtcagctccgaagaaagatgtttatcaattgttcgctgagaaggtcagggataacaaacaactggaatcaagatgggcgatcatgcaagaaacccgcgtggagtatttccgtggaaaagatttcaataccttcgtcaaaaatcatccagaagtcagggaaattttggggccagataaggatttagaggtggaagacattgttaacactttgctgaccaagaaccttgtgataaggtgtgatcgagtcatgaaaactgtgaggcctggcaagaaaaagctatcgtcatggcctgctcatttggagatacataatgaacaagtgtttactgaaaatgatgggttttttgcttggatgtttctgaaaagaaggaccttgtggcagacaattccttcttttcagaaacatcc

SEQ ID NO: 6373 - protein, 206 aa, Zea mays subsp. mays
  peptide (1)..(206): Ceres Seq. ID no. 12367119
KSPKHFVESAVRSARLSLRSGALGRAKAPPSSDKMAGKGAKATAAKSADKDKGKKTGGPVSRSSRAAPQEKSAPKKDVYQLFAEKVRDNKQLESRWAIMQETRVEYFRGKDFNTFVKNHPEVREILGPDKDLEVEDIVNTLLTKNLVIRCDRVMKTVRPGKKKLSSWPAHLEIHNEQVFTENDGFFAWMFLKRRTLWQTIPSFQKH

SEQ ID NO: 6374 - protein, 172 aa, Zea mays subsp. mays
  peptide (1)..(172): Ceres Seq. ID no. 12367120
MAGKGAKATAAKSADKDKGKKTGGPVSRSSRAAPQEKSAPKKDVYQLFAEKVRDNKQLESRWAIMQETRVEYFRGKDFNTFVKNHPEVREILGPDKDLEVEDIVNTLLTKNLVIRCDRVMKTVRPGKKKLSSWPAHLEIHNEQVFTENDGFFAWMFLKRRTLWQTIPSFQKH

SEQ ID NO: 6375 - protein, 108 aa, Zea mays subsp. mays
  peptide (1)..(108): Ceres Seq. ID no. 12367121
MQETRVEYFRGKDFNTFVKNHPEVREILGPDKDLEVEDIVNTLLTKNLVIRCDRVMKTVRPGKKKLSSWPAHLEIHNEQVFTENDGFFAWMFLKRRTLWQTIPSFQKH

SEQ ID NO: 6376 - DNA, 1403 bp, Zea mays subsp. mays
  misc_feature (1)..(1403): Ceres Seq. ID no. 13498720
  misc_feature (1)..(1403): Ortholog of  Ceres SEQ ID NO 13658257 as cited in SEQ ID NO 66654
gtcttccctgatcccttcgctccccgaagcaaaagcgcagagcgcatcagcgcagagtaggacagccatggcgacggcggcggcgcagtcccatccggcatcgatggacgcgcgccggtgggacgagtcatcgtaccgccgcggcatcctccgtgcccgcgacctctcgtcccgcaccctcttccgtgccgtcttctttgaccacagcgacgacccggataccgacatcctactcgccgccgcctccagcgacggctccctcgcttccttctccctttcatcctgcatctccgcatgttccgctacctcccaggtggagaccgccgccactctggtagatcctgtctgcatcgtgcaagcgcacagcggacctgcctacgacgtcaggttttaccccgatcaacagcagccgctgctcttcagctgcggggacgatggccgcatcaagggttggaggtggcacgagatgcagagctgccttgtcccgctctccctgcaaggggatcatctggaaccagcacttgacttggtcaaccctcagcacgagggtccttggggtgctcgatctccagtacctgaaaacaatgccattgcaattaataaacaggatggatccattttggcagcagcgggtgatgcatgtgcttactgctgggatgtggagaccagtaaatgtaaaatcacattcaaggggcatgctgattatttgcacagcattgcagttcgtgagtcaaaccgccaggttgtaacaggatcagaggatgggacagctcgtatctgggattgcagaagtgggaagtgcactcgggttatacagccaggaaagagcaaggcatttgaaagctcatgggtcagctgtgttgctattgatccaagtgaaagttggctggcttgtggcacgtctagcggtatatcagtttggagtcttctctcaaatgagtgcatctttaatttggactgtcatgctcctgttcaagatttattgtttgacaagaatcatattttagcagttggcgctgaacctctgctctcccgtctcacaataaacgggacagtcctttcacaagtaaaatgtgcccctcagtcggcgttttctgtctccatccactcaactgggatagcagctgttgctggatacggaggtctggtggatgtgatctcagaagttgggagccatctgtgcacattcggtagccggggcctagacaagtaaatgacccatgagcattccttgcgaacagcgcgcggagaatgcgagggctgtatctctttgcactgcagttgcacaagtttcatggaacgttgtcgctgacaatgctctactgaacaaagatagctagacggtaaaaaaaaacatttgatactagttcgagctaaacaaagttctgctctgacatctcttc

SEQ ID NO: 6377 - protein, 403 aa, Zea mays subsp. mays
  peptide (1)..(403): Ceres Seq. ID no. 13498721
SSLIPSLPEAKAQSASAQSRTAMATAAAQSHPASMDARRWDESSYRRGILRARDLSSRTLFRAVFFDHSDDPDTDILLAAASSDGSLASFSLSSCISACSATSQVETAATLVDPVCIVQAHSGPAYDVRFYPDQQQPLLFSCGDDGRIKGWRWHEMQSCLVPLSLQGDHLEPALDLVNPQHEGPWGARSPVPENNAIAINKQDGSILAAAGDACAYCWDVETSKCKITFKGHADYLHSIAVRESNRQVVTGSEDGTARIWDCRSGKCTRVIQPGKSKAFESSWVSCVAIDPSESWLACGTSSGISVWSLLSNECIFNLDCHAPVQDLLFDKNHILAVGAEPLLSRLTINGTVLSQVKCAPQSAFSVSIHSTGIAAVAGYGGLVDVISEVGSHLCTFGSRGLDK

SEQ ID NO: 6378 - protein, 381 aa, Zea mays subsp. mays
  peptide (1)..(381): Ceres Seq. ID no. 13498722
MATAAAQSHPASMDARRWDESSYRRGILRARDLSSRTLFRAVFFDHSDDPDTDILLAAASSDGSLASFSLSSCISACSATSQVETAATLVDPVCIVQAHSGPAYDVRFYPDQQQPLLFSCGDDGRIKGWRWHEMQSCLVPLSLQGDHLEPALDLVNPQHEGPWGARSPVPENNAIAINKQDGSILAAAGDACAYCWDVETSKCKITFKGHADYLHSIAVRESNRQVVTGSEDGTARIWDCRSGKCTRVIQPGKSKAFESSWVSCVAIDPSESWLACGTSSGISVWSLLSNECIFNLDCHAPVQDLLFDKNHILAVGAEPLLSRLTINGTVLSQVKCAPQSAFSVSIHSTGIAAVAGYGGLVDVISEVGSHLCTFGSRGLDK

SEQ ID NO: 6379 - protein, 369 aa, Zea mays subsp. mays
  peptide (1)..(369): Ceres Seq. ID no. 13498723
MDARRWDESSYRRGILRARDLSSRTLFRAVFFDHSDDPDTDILLAAASSDGSLASFSLSSCISACSATSQVETAATLVDPVCIVQAHSGPAYDVRFYPDQQQPLLFSCGDDGRIKGWRWHEMQSCLVPLSLQGDHLEPALDLVNPQHEGPWGARSPVPENNAIAINKQDGSILAAAGDACAYCWDVETSKCKITFKGHADYLHSIAVRESNRQVVTGSEDGTARIWDCRSGKCTRVIQPGKSKAFESSWVSCVAIDPSESWLACGTSSGISVWSLLSNECIFNLDCHAPVQDLLFDKNHILAVGAEPLLSRLTINGTVLSQVKCAPQSAFSVSIHSTGIAAVAGYGGLVDVISEVGSHLCTFGSRGLDK

SEQ ID NO: 6380 - DNA, 1495 bp, Zea mays subsp. mays
  misc_feature (1)..(1495): Ceres Seq. ID no. 12366927
  misc_feature (1)..(1495): Ortholog of  Ceres SEQ ID NO 13648081 as cited in SEQ ID NO 165
  misc_feature (1)..(1495): Ortholog of  Ceres SEQ ID NO 15224803 as cited in SEQ ID NO 56572
  misc_feature (1)..(1495): Ortholog of  Ceres SEQ ID NO 13502952 as cited in SEQ ID NO 62271
  misc_feature (1)..(1495): Ortholog of  Ceres SEQ ID NO 13502973 as cited in SEQ ID NO 68052
  misc_feature (1)..(1495): Ortholog of  Ceres SEQ ID NO 13596000 as cited in SEQ ID NO 68188
acaacacctcatcacaaacacaaagacagccagccagagccagccagagccagccatcactgatcatagcatcagcagcttagtataccgtaccgctccacatccgagctagaagaagaagcccgcgcggccagtacctgcctagcggcgcgagcgaagcagagatggcgagagcgctgccgctggtgctcgcggcgtccgtcctgctggcggccgccgcgctgctgctggccgcggcgccggcgccggcggccgcggtcgacttcggcgcggaggacctggcgtcggaggaggcgctgtgggcgctgtacgagcgctggcgcggccgccacgcggtggcgcgggacctgggcgacaaggcgcgccgcttcaacgtcttcaaggccaacgtgcgcctcatccacgagttcaaccgccgggacgagccctacaagctccgcctcaaccgcttcggcgacatgaccgccgacgagttccgacgccactacgcgggctccagggtcgcgcaccaccgcatgttccgcggcgacaggcagggctcctcggcgtcggcgtcgttcatgtacgccgacgcgcgcgacgtcccggcctccgtcgactggaggcagaagggcgccgtcaccgacgtcaaggaccagggccagtgcggtagctgctgggcgttctcgacgatcgccgccgtggagggcatcaacgcgatcaagaccaagaacctgacgtcgctgtcggagcagcagctggtggactgcgacaccaaggccaacgccggctgcaacgggggcctcatggactacgcgttccagtacatcgccaagcacggcggggtggcggcggaggacgcgtacccgtacagagcgcgccaggcgtcctgcaagaagtcgccggccccggtcgtcaccatcgacggctacgaggacgtgccggccaacgacgagtcggcgctcaagaaggcggtggcgcaccagcccgtgtccgtcgccatcgaggccagtggctcgcacttccagttctactccgagggggtcttctccggcaggtgcgggacggagctggaccacggcgtcgcggcggtcggctacggggtcaccgcggacggcaccaagtactggctggtcaagaactcgtggggccccgagtggggcgagaaggggtacatccgcatggcgcgcgacgtggccgccaaggagggacactgcggcatcgccatggaggcatcctaccccgtcaagacctcgcccaaccccaaggtccacgccgtcgtcgacgaggacggctccagccacgacgagctctgaattgcgcactacactactacgtactagctatagcctatatagctatactatgattgatccatgtatgctcggacaggaacatcgccgactgtgaatgtctgaatggcatacgcacatcttacacctgcattcatgtaataccagtcgagagttgatcttccagcaactttcatttcattcggttattattatattatttg

SEQ ID NO: 6381 - protein, 376 aa, Zea mays subsp. mays
  peptide (1)..(376): Ceres Seq. ID no. 12366928
MARALPLVLAASVLLAAAALLLAAAPAPAAAVDFGAEDLASEEALWALYERWRGRHAVARDLGDKARRFNVFKANVRLIHEFNRRDEPYKLRLNRFGDMTADEFRRHYAGSRVAHHRMFRGDRQGSSASASFMYADARDVPASVDWRQKGAVTDVKDQGQCGSCWAFSTIAAVEGINAIKTKNLTSLSEQQLVDCDTKANAGCNGGLMDYAFQYIAKHGGVAAEDAYPYRARQASCKKSPAPVVTIDGYEDVPANDESALKKAVAHQPVSVAIEASGSHFQFYSEGVFSGRCGTELDHGVAAVGYGVTADGTKYWLVKNSWGPEWGEKGYIRMARDVAAKEGHCGIAMEASYPVKTSPNPKVHAVVDEDGSSHDEL

SEQ ID NO: 6382 - protein, 278 aa, Zea mays subsp. mays
  peptide (1)..(278): Ceres Seq. ID no. 12366929
MTADEFRRHYAGSRVAHHRMFRGDRQGSSASASFMYADARDVPASVDWRQKGAVTDVKDQGQCGSCWAFSTIAAVEGINAIKTKNLTSLSEQQLVDCDTKANAGCNGGLMDYAFQYIAKHGGVAAEDAYPYRARQASCKKSPAPVVTIDGYEDVPANDESALKKAVAHQPVSVAIEASGSHFQFYSEGVFSGRCGTELDHGVAAVGYGVTADGTKYWLVKNSWGPEWGEKGYIRMARDVAAKEGHCGIAMEASYPVKTSPNPKVHAVVDEDGSSHDEL

SEQ ID NO: 6383 - protein, 259 aa, Zea mays subsp. mays
  peptide (1)..(259): Ceres Seq. ID no. 12366930
MFRGDRQGSSASASFMYADARDVPASVDWRQKGAVTDVKDQGQCGSCWAFSTIAAVEGINAIKTKNLTSLSEQQLVDCDTKANAGCNGGLMDYAFQYIAKHGGVAAEDAYPYRARQASCKKSPAPVVTIDGYEDVPANDESALKKAVAHQPVSVAIEASGSHFQFYSEGVFSGRCGTELDHGVAAVGYGVTADGTKYWLVKNSWGPEWGEKGYIRMARDVAAKEGHCGIAMEASYPVKTSPNPKVHAVVDEDGSSHDEL

SEQ ID NO: 6384 - DNA, 1060 bp, Zea mays subsp. mays
  misc_feature (1)..(1060): Ceres Seq. ID no. 12344755
  misc_feature (1)..(1060): Ortholog of  Ceres SEQ ID NO 14312057 as cited in SEQ ID NO 58388
  misc_feature (1)..(1060): Ortholog of  Ceres SEQ ID NO 13598468 as cited in SEQ ID NO 63723
gtcagctcttgcgagaagcacccaaattggagtactgtgaagtctgaaccggctggcctggccgttgctgagggagaggataaaagaacaccgaaatgccactcctgctgctcccaccaccggcgtgcaccacggcagcgacgtcgctcgctttcttgcggccccggccttcgcgggcgcgttgggccaacctctcttacgcgttcccccgcctgaggaaatacgggcgtcgccaccgcgagcccgtggccggccccagcctcgatgatgatggcggcgaggaggatgagacggaggcagaggactgggagtccgacgagggcgaggaagagatggaggtagacgaggaggagtttctggcgatgcggcccaaaccggcgggatttggcgaggggaaaacatattccactgacattgaggagcagcttctccgggagatgggctttggtgggggcgcggcgcggcgaggagaggcggccccggccaatcgccgcgccggggatagttccaccaaagtagctgccgcagatgtcagtgccgatggtgttcaagttcgtgtttggaacctcccaaaaaagaaaaacatacacaaggacctgaagcaagcttttaaagggtttcatggccttttatccattgatccagcagtttccgcaaataagaaaacccgtgatcctatttgtaagggttttgcatatctcaaactagagtctgctgaggctgcaacaaggttcgtggagatatactctcatcaaactgtgtcatttggcaagattcagaagccaatcagttgcggtatcatcgataaacgcagctctgttgagcattcaaataagcatccagtagtcaggcaatccctcaattaatgtccaagcaccaaaacttggtagcggcaagttgagtaacacatatctgtcatctagcacaagtaatcacgcacttctagggatctcaagttttacgaaaaagctttgataaacagatagattagacagttctctgtattccaaataactgtttgtatcaagcaatttggtagtttggtcttgtttttttaggg

SEQ ID NO: 6385 - protein, 256 aa, Zea mays subsp. mays
  peptide (1)..(256): Ceres Seq. ID no. 12344756
MPLLLLPPPACTTAATSLAFLRPRPSRARWANLSYAFPRLRKYGRRHREPVAGPSLDDDGGEEDETEAEDWESDEGEEEMEVDEEEFLAMRPKPAGFGEGKTYSTDIEEQLLREMGFGGGAARRGEAAPANRRAGDSSTKVAAADVSADGVQVRVWNLPKKKNIHKDLKQAFKGFHGLLSIDPAVSANKKTRDPICKGFAYLKLESAEAATRFVEIYSHQTVSFGKIQKPISCGIIDKRSSVEHSNKHPVVRQSLN

SEQ ID NO: 6386 - protein, 177 aa, Zea mays subsp. mays
  peptide (1)..(177): Ceres Seq. ID no. 12344757
MEVDEEEFLAMRPKPAGFGEGKTYSTDIEEQLLREMGFGGGAARRGEAAPANRRAGDSSTKVAAADVSADGVQVRVWNLPKKKNIHKDLKQAFKGFHGLLSIDPAVSANKKTRDPICKGFAYLKLESAEAATRFVEIYSHQTVSFGKIQKPISCGIIDKRSSVEHSNKHPVVRQSLN

SEQ ID NO: 6387 - protein, 167 aa, Zea mays subsp. mays
  peptide (1)..(167): Ceres Seq. ID no. 12344758
MRPKPAGFGEGKTYSTDIEEQLLREMGFGGGAARRGEAAPANRRAGDSSTKVAAADVSADGVQVRVWNLPKKKNIHKDLKQAFKGFHGLLSIDPAVSANKKTRDPICKGFAYLKLESAEAATRFVEIYSHQTVSFGKIQKPISCGIIDKRSSVEHSNKHPVVRQSLN

SEQ ID NO: 6388 - DNA, 1320 bp, Zea mays subsp. mays
  misc_feature (1)..(1320): Ceres Seq. ID no. 12407729
  misc_feature (1)..(1320): Ortholog of  Ceres SEQ ID NO 12474685 as cited in SEQ ID NO 88
  misc_feature (1)..(1320): Ortholog of  Ceres SEQ ID NO 13638574 as cited in SEQ ID NO 51223
  misc_feature (1)..(1320): Ortholog of  Ceres SEQ ID NO 12610790 as cited in SEQ ID NO 56123
  misc_feature (1)..(1320): Ortholog of  Ceres SEQ ID NO 14315399 as cited in SEQ ID NO 57112
  misc_feature (1)..(1320): Ortholog of  Ceres SEQ ID NO 13596388 as cited in SEQ ID NO 62129
  misc_feature (1)..(1320): Ortholog of  Ceres SEQ ID NO 13655636 as cited in SEQ ID NO 63519
  misc_feature (1)..(1320): Ortholog of  Ceres SEQ ID NO 13655896 as cited in SEQ ID NO 64970
gtacaatccgatgtaaacgaacaaggcctaagacgtactgcagcggcagcgcaccacatctgaccctaccaccatggcatccgcggggacgacggcggtggtgcccgaggtggccctgcggtcgggcaacgcgaggacggcgatgccgatggtcggcatgggcacggcgtcgttccctctggtgcacgaggccgtcaaggacggccgtgctctccgccatcgaggtggggttccgccacttcgacactgcctccatgtacggcaccgagaagccgctgggcgacgccgtggccgaggcgctccggcgcgggaccctgcggtcccgggaggatctgttcgtgacgtccaagctgtggtgctcgcagaaccacccggacctcgtgctgccgtccctccgggaaacactcaagaacctgcagatggagtacgtggatctgtacctgatccactggccggtgtgcctgaaaccggggccgcccgagctcccgaccaggaaggagaacgccgtgccgctggacctcgcgggtgtgtggcgcgccatggaggagtgccagcggctgggcctcgccaaggcgatcggcgtgagcaacttcaccaccaggcacctcgacggggtcctggccgtcgccacggtcccgcccgcggtgaaccaggtggagctgaacccgggcgtggccagcagcggacgctcagggcgtactgcgccgacaggggcatccacgtcgcggcctactcgccgntggaagggcagaactgggacgggcagggcagcgccgtgctggactccgaggtgctcgccgcgatagccaaggcgagggggaaaaccgtcgcgcaggtggcgttgcgatggatacatgagcagggagtgacatgcatcgtcaagagttacagcaaggagaggctgaggcagaaccttgggatattcgactgggagctgaccgacgaggagcggctcaagatcagccagatcccgcagaggaaggttgtccagactagtagcttgttctcgcaagagggtgagttcacggctgttgatccagcggaacttaatattttagaggaatagggggaaaatgacccgccacacatacactgcatcagtgttgctgcatacaaaagtgtatttcgtagaccatttgaataaggctgttggaaacggtgacatctagtgctgtttggtttcgttgccgggacggtaacatctacagttaatgctgcaatccattaacggaacggaggggaatggatagcgctcgtttatgagtggtttcattactgttataagactgtttcagcaacatttactaaatttcattctct

SEQ ID NO: 6389 - protein, 330 aa, Zea mays subsp. mays
  peptide (1)..(330): Ceres Seq. ID no. 12407730
  misc_feature (223)..(223): Xaa is any aa, unknown or other
MASAGTTAVVPEVALRSGNARTAMPMVGMGTASFPLVHEAVKDGRALRHRGGVPPLRHCLHVRHREAAGRRRGRGAPARDPAVPGGSVRDVQAVVLAEPPGPRAAVPPGNTQEPADGVRGSVPDPLAGVPETGAARAPDQEGERRAAGPRGCVARHGGVPAAGPRQGDRREQLHHQAPRRGPGRRHGPARGEPGGAEPGRGQQRTLRAYCADRGIHVAAYSPXEGQNWDGQGSAVLDSEVLAAIAKARGKTVAQVALRWIHEQGVTCIVKSYSKERLRQNLGIFDWELTDEERLKISQIPQRKVVQTSSLFSQEGEFTAVDPAELNILEE

SEQ ID NO: 6390 - protein, 307 aa, Zea mays subsp. mays
  peptide (1)..(307): Ceres Seq. ID no. 12407731
  misc_feature (200)..(200): Xaa is any aa, unknown or other
MPMVGMGTASFPLVHEAVKDGRALRHRGGVPPLRHCLHVRHREAAGRRRGRGAPARDPAVPGGSVRDVQAVVLAEPPGPRAAVPPGNTQEPADGVRGSVPDPLAGVPETGAARAPDQEGERRAAGPRGCVARHGGVPAAGPRQGDRREQLHHQAPRRGPGRRHGPARGEPGGAEPGRGQQRTLRAYCADRGIHVAAYSPXEGQNWDGQGSAVLDSEVLAAIAKARGKTVAQVALRWIHEQGVTCIVKSYSKERLRQNLGIFDWELTDEERLKISQIPQRKVVQTSSLFSQEGEFTAVDPAELNILEE

SEQ ID NO: 6391 - protein, 305 aa, Zea mays subsp. mays
  peptide (1)..(305): Ceres Seq. ID no. 12407732
  misc_feature (198)..(198): Xaa is any aa, unknown or other
MVGMGTASFPLVHEAVKDGRALRHRGGVPPLRHCLHVRHREAAGRRRGRGAPARDPAVPGGSVRDVQAVVLAEPPGPRAAVPPGNTQEPADGVRGSVPDPLAGVPETGAARAPDQEGERRAAGPRGCVARHGGVPAAGPRQGDRREQLHHQAPRRGPGRRHGPARGEPGGAEPGRGQQRTLRAYCADRGIHVAAYSPXEGQNWDGQGSAVLDSEVLAAIAKARGKTVAQVALRWIHEQGVTCIVKSYSKERLRQNLGIFDWELTDEERLKISQIPQRKVVQTSSLFSQEGEFTAVDPAELNILEE

SEQ ID NO: 6392 - DNA, 1101 bp, Zea mays subsp. mays
  misc_feature (1)..(1101): Ceres Seq. ID no. 12356388
  misc_feature (1)..(1101): Ortholog of  Ceres SEQ ID NO 15178847 as cited in SEQ ID NO 1145
  misc_feature (1)..(1101): Ortholog of  Ceres SEQ ID NO 14311253 as cited in SEQ ID NO 56483
  misc_feature (1)..(1101): Ortholog of  Ceres SEQ ID NO 13597435 as cited in SEQ ID NO 64073
  misc_feature (1)..(1101): Ortholog of  Ceres SEQ ID NO 13656209 as cited in SEQ ID NO 64393
ctctcgcgtccccgtcttcctcttgtcgcctgcctctgcggctctgcctacctctctcgaagcttctcgctctcctgggtggccgtgtccagtctcccacgccaccgccccgaccgccggtaggtaataccagttccaagagcactcgacatggcggccgctaatgttggggaatcaacaagcggcggcggcagcagcagcagcagcggcgccgacgccgggggcggattcgagtgcaacatatgcttcgagctgccgcaggagccgatcgtgacgctgtgcgggcacctcttctgctggccgtgcctctacaagtggctgcgcatccactcgcactcgcccgagtgcccggtgtgcaaggccgtggtcgaggaggagaagctcgtgcccctgtacggccgcggcaaggaccgcgtcgacccgaggtccaagaacgtccccggggcggccgacatccccagccgtccggctgggcagaggccggccacggctccgcaggcggaccccaacaacgcccacttccccaacgccgccaacccggcgaacccgtggttcatgggcggcggcggcggaggcatcccgctggccaacgcgcgctgggggaactacaccttctcggcggcgttcggtgggctgttcccgctgctcagcttccaggtgcacgggttcccggacgccacggcctatggccagccagctgggttcccgtacgggtacggccacggccacgcttttcatggcgggcacgctggagcacatgcccacgccgcagctgcagctcctcgggcacgcgcagcaccagcagcagcaggcggatgtgtaccttaaggcgctgctcatcctagtcggcgttctggttatcgcgagcctcgtcacgttctagggcgtcgcctgttggtaggtgttcatcatattgttgctgccttgctggtaataaataagagagagagacagagacaacacgaccgaaactgaattattcagagcggtgcaatgtgttgatagaagggttgttgttgtacatgctgatacatgattgtatactgtggtctttgaacatacattattatcgaataataatctggaggctctgtttgaagt

SEQ ID NO: 6393 - protein, 225 aa, Zea mays subsp. mays
  peptide (1)..(225): Ceres Seq. ID no. 12356389
MAAANVGESTSGGGSSSSSGADAGGGFECNICFELPQEPIVTLCGHLFCWPCLYKWLRIHSHSPECPVCKAVVEEEKLVPLYGRGKDRVDPRSKNVPGAADIPSRPAGQRPATAPQADPNNAHFPNAANPANPWFMGGGGGGIPLANARWGNYTFSAAFGGLFPLLSFQVHGFPDATAYGQPAGFPYGYGHGHAFHGGHAGAHAHAAAAAPRARAAPAAAGGCVP

SEQ ID NO: 6394 - protein, 200 aa, Zea mays subsp. mays
  peptide (1)..(200): Ceres Seq. ID no. 12356390
MLRAAAGADRDAVRAPLLLAVPLQVAAHPLALARVPGVQGRGRGGEARAPVRPRQGPRRPEVQERPRGGRHPQPSGWAEAGHGSAGGPQQRPLPQRRQPGEPVVHGRRRRRHPAGQRALGELHLLGGVRWAVPAAQLPGARVPGRHGLWPASWVPVRVRPRPRFSWRARWSTCPRRSCSSSGTRSTSSSRRMCTLRRCSS

SEQ ID NO: 6395 - DNA, 781 bp, Zea mays subsp. mays
  misc_feature (1)..(781): Ceres Seq. ID no. 12401310
  misc_feature (1)..(781): Ortholog of  Ceres SEQ ID NO 15173531 as cited in SEQ ID NO 61851
  misc_feature (1)..(781): Ortholog of  Ceres SEQ ID NO 13587260 as cited in SEQ ID NO 0
agcacaagccgcaccgcaattagccgcgaccctccgcagaatcggctcacgtttccgatccagaggtccagactgttccccgagttttcctcgcgagtcccggcgaaccgcgaacatgtgccccactggaaggtacctggggctcgacctctccggcgctggcggcgacctgaggccggcgttcgacgtgcttgacgcggaccgggacggccgcatcagccgggacgacctcaagtccttctacgccgccgcggggcccgccgccggcgaccgggttcgacgacgacgacctcgcggccatgatcgcggccgccgacgccgaccgcgacggcttcgtgcagtacgacgagttcgagcgcctgctggccggccgcgccgcggcggccgccgccgcgggaggcgctgggcgccgctccgccatggagggcgccttccggctcatggaccgggacggggacggcatggtcggcttccaggacctcaaggcctacctcgactgggccgggatgcccgcggcggacgaggaggtccgcgccatgatccgcgtcgctggcggaggggacggcggtgaaggcgtggggctcgaggcgctagccggagtgctcgcggtcgacctggaaggcatcgccttttgattttgagagatccatggggatgttgtgcggagtactgtattctttttcttggggttttcggttggtgagcgtggtgcgttgtctgtcgattgtctgtggttgactggggttcacgaggaccattcaaaacgagataaaaagttcgc

SEQ ID NO: 6396 - protein, 189 aa, Zea mays subsp. mays
  peptide (1)..(189): Ceres Seq. ID no. 12401311
AQAAPQLAATLRRIGSRFRSRGPDCSPSFPRESRRTANMCPTGRYLGLDLSGAGGDLRPAFDVLDADRDGRISRDDLKSFYAAAGPAAGDRVRRRRPRGHDRGRRRRPRRLRAVRRVRAPAGRPRRGGRRRGRRWAPLRHGGRLPAHGPGRGRHGRLPGPQGLPRLGRDARGGRGGPRHDPRRWRRGRR

SEQ ID NO: 6397 - protein, 151 aa, Zea mays subsp. mays
  peptide (1)..(151): Ceres Seq. ID no. 12401312
MCPTGRYLGLDLSGAGGDLRPAFDVLDADRDGRISRDDLKSFYAAAGPAAGDRVRRRRPRGHDRGRRRRPRRLRAVRRVRAPAGRPRRGGRRRGRRWAPLRHGGRLPAHGPGRGRHGRLPGPQGLPRLGRDARGGRGGPRHDPRRWRRGRR

SEQ ID NO: 6398 - protein, 111 aa, Zea mays subsp. mays
  peptide (1)..(111): Ceres Seq. ID no. 12401313
MIAAADADRDGFVQYDEFERLLAGRAAAAAAAGGAGRRSAMEGAFRLMDRDGDGMVGFQDLKAYLDWAGMPAADEEVRAMIRVAGGGDGGEGVGLEALAGVLAVDLEGIAF

SEQ ID NO: 6399 - DNA, 1322 bp, Zea mays subsp. mays
  misc_feature (1)..(1322): Ceres Seq. ID no. 13491098
  misc_feature (1)..(1322): Ortholog of  Ceres SEQ ID NO 15179609 as cited in SEQ ID NO 0
atcgcaaaaaccccaatccatccaaacccatttccctcgctcccatcccgtcccgccccttgtctcttccgcttccccccgaccccgcgcgccgcggaccagcagccatgtcgtgctcccacctctccaccgcctggtcctcctcggcgctcgccagcagcgcctccaccacccgacggcgctcccccccgcgctcgggtctcctggtgcggtgttccctccgtgagctccgcacccgcatcgactccgtcaggaacacgcagaagatcacggaggccatgaagctggtggccgccgccaaggtccggcgcgcgcaggaggccgtcgtctcctctcgccctttctcggaggcgctggtggaggtgctcctacaacatgaaccaggagatccagacggaggacatcgacctgcccctcacccgcacccgccccgtcaagaaggtggccctcgtggtcctgaccggcgagcgcggcctctgcgggagcttcaacaacaacgtgctcaagaaggcggaaacccgcatcgatgagctcaagcagctgggcctccagtacaccgtcgtcagcgtggggaagaagggcaacgcctacttccagcgccgcccctacatcccgttggagcgcgatctagaggtgagcagcgtgcccaccgtcaaggactcgcaggccatctgcgacctcgtctactcgctcttcgtctccgaggaggtggacaaggtggagctgctctactccaagttcgtgtcgctggtgcgctccgaccccatcatccagacgctgctccccatgtcgcccaagggcgagatctgcgacgtcaacggcgtctgcgtggacgccaccgaggacgagctcttccgcctcaccaccaaggaggggaagctcaccgtggagcgcgagaaggtgaagatcgagacgcagcccttctcccccgtggtgcagttcgagcaggaccccgtgcagatcctggacgcgctgctcccgctctacctcaacagccagatcctccgtgccctgcaggagtcgctcgccagcgagctcgccgcccggatgagcgccatgagcagcgccaccgacaacgccatcgagctccgcaagaacctctccatcgcctacaaccgacagcgccaggccaagatcaccggggagatcctcgagatcgtcgccggtgccgacgccctcgctggctgagcctgagtccccttggtggtgcggtgctcctgctatatataattctttttcctcattttctccactctgcctgtaattcctgataatagcaaacacaacggagttctgtgttccttgcgacacacaagaatttc

SEQ ID NO: 6400 - protein, 270 aa, Zea mays subsp. mays
  peptide (1)..(270): Ceres Seq. ID no. 13491099
MNQEIQTEDIDLPLTRTRPVKKVALVVLTGERGLCGSFNNNVLKKAETRIDELKQLGLQYTVVSVGKKGNAYFQRRPYIPLERDLEVSSVPTVKDSQAICDLVYSLFVSEEVDKVELLYSKFVSLVRSDPIIQTLLPMSPKGEICDVNGVCVDATEDELFRLTTKEGKLTVEREKVKIETQPFSPVVQFEQDPVQILDALLPLYLNSQILRALQESLASELAARMSAMSSATDNAIELRKNLSIAYNRQRQAKITGEILEIVAGADALAG

SEQ ID NO: 6401 - protein, 175 aa, Zea mays subsp. mays
  peptide (1)..(175): Ceres Seq. ID no. 13491100
RKNPNPSKPISLAPIPSRPLSLPLPPDPARRGPAAMSCSHLSTAWSSSALASSASTTRRRSPPRSGLLVRCSLRELRTRIDSVRNTQKITEAMKLVAAAKVRRAQEAVVSSRPFSEALVEVLLQHEPGDPDGGHRPAPHPHPPRQEGGPRGPDRRARPLRELQQQRAQEGGNPHR

SEQ ID NO: 6402 - protein, 140 aa, Zea mays subsp. mays
  peptide (1)..(140): Ceres Seq. ID no. 13491101
MSCSHLSTAWSSSALASSASTTRRRSPPRSGLLVRCSLRELRTRIDSVRNTQKITEAMKLVAAAKVRRAQEAVVSSRPFSEALVEVLLQHEPGDPDGGHRPAPHPHPPRQEGGPRGPDRRARPLRELQQQRAQEGGNPHR

SEQ ID NO: 6403 - DNA, 1127 bp, Zea mays subsp. mays
  misc_feature (1)..(1127): Ceres Seq. ID no. 13492997
  misc_feature (1)..(1127): Ortholog of  Ceres SEQ ID NO 14315223 as cited in SEQ ID NO 52527
gcaaccgaacgaacaaggctagaagctagctagccaagttattagctactacatactagtggccggccggacacgatcgatgggaaggccgccgtgctgcgacagggcgggggttaagaaggggccatggacgccggaggaggacatcgtcctggtgtcctacgtccaggagcacggccccggcaactggcgcgccgtgcccgtcagcacgggcctcatgcgctgcagcaagagctgccgcctccgctggaccaactacctccgccccggcatccggcgcggcaacttcacaccccacgaggaaggcatcatcgtccacctccaggccttgctaggcaacagatgggcggccattgcttcttacctcccacagagaaccgacaacgacatcaagaactactggaacacccacctcaagaagaagctccggaagcagcaagccatcggcgccatcttagcgccacctcccccctccgaacccaccgccggccatgccgattgccatcacgacatgacccgctcctccaaggacagccacgcttgcctggccgacagcacaccagcggctgatgaggtcgtcacccagctcatcgcccagcagttcgccgccaccgacggtgacacctcgtcgtcgtcgtcgtactcgtacgcctccagcacggacaacatctccaagctgctcaacggcttcatgaagagcgcctcgccggcgcgggacgacgctaccgacaccatcaagacttcctcggccattgacatcgaccctttcgaccacaagtccggcggggcactactaccaccacccaagaagcggcagcagcagcagcagcatctgtcctccatagagaactggttgttcgacgatgccactgagcaggtcgttgtccagctgatggaggagatctccggcggctcttgctcagttcccatgctgctttattagcaccaagaaaaagaagcgaacatgcatgatagccgatcgatagatgtgacttggataggagaatgaatgtgtgcatgggtgcaagttacccagctgataggagaattttatatgcacccatgcatgtttggttttatttacacaagcatgagccatgagacaagaacaatatatatgcatagtt

SEQ ID NO: 6404 - protein, 287 aa, Zea mays subsp. mays
  peptide (1)..(287): Ceres Seq. ID no. 15222896
MGRPPCCDRAGVKKGPWTPEEDIVLVSYVQEHGPGNWRAVPVSTGLMRCSKSCRLRWTNYLRPGIRRGNFTPHEEGIIVHLQALLGNRWAAIASYLPQRTDNDIKNYWNTHLKKKLRKQQAIGAILAPPPPSEPTAGHADCHHDMTRSSKDSHACLADSTPAADEVVTQLIAQQFAATDGDTSSSSSYSYASSTDNISKLLNGFMKSASPARDDATDTIKTSSAIDIDPFDHKSGGALLPPPKKRQQQQQHLSSIENWLFDDATEQVVVQLMEEISGGSCSVPMLLY

SEQ ID NO: 6405 - protein, 241 aa, Zea mays subsp. mays
  peptide (1)..(241): Ceres Seq. ID no. 15222897
MRCSKSCRLRWTNYLRPGIRRGNFTPHEEGIIVHLQALLGNRWAAIASYLPQRTDNDIKNYWNTHLKKKLRKQQAIGAILAPPPPSEPTAGHADCHHDMTRSSKDSHACLADSTPAADEVVTQLIAQQFAATDGDTSSSSSYSYASSTDNISKLLNGFMKSASPARDDATDTIKTSSAIDIDPFDHKSGGALLPPPKKRQQQQQHLSSIENWLFDDATEQVVVQLMEEISGGSCSVPMLLY

SEQ ID NO: 6406 - protein, 147 aa, Zea mays subsp. mays
  peptide (1)..(147): Ceres Seq. ID no. 15222898
MDAGGGHRPGVLRPGARPRQLARRARQHGPHALQQELPPPLDQLPPPRHPARQLHTPRGRHHRPPPGLARQQMGGHCFLPPTENRQRHQELLEHPPQEEAPEAASHRRHLSATSPLRTHRRPCRLPSRHDPLLQGQPRLPGRQHTSG

SEQ ID NO: 6407 - DNA, 1359 bp, Zea mays subsp. mays
  misc_feature (1)..(1359): Ceres Seq. ID no. 12408140
  misc_feature (1)..(1359): Ortholog of  Ceres SEQ ID NO 13594549 as cited in SEQ ID NO 51707
  misc_feature (1)..(1359): Ortholog of  Ceres SEQ ID NO 13595294 as cited in SEQ ID NO 55998
  misc_feature (1)..(1359): Ortholog of  Ceres SEQ ID NO 14302012 as cited in SEQ ID NO 56618
  misc_feature (1)..(1359): Ortholog of  Ceres SEQ ID NO 12598102 as cited in SEQ ID NO 61029
  misc_feature (1)..(1359): Ortholog of  Ceres SEQ ID NO 12625361 as cited in SEQ ID NO 62928
  misc_feature (1)..(1359): Ortholog of  Ceres SEQ ID NO 13599424 as cited in SEQ ID NO 0
gcacgagaccattacctagaacatcctaatcgaaaaccattacggacacagccattccaccaaccaaccaagccaaacggtttatagccccgctcggttcaagccggtaccgtacacctccagagtagcttaccccaaccaaatccatccaaattcaatcggaattcgcgtgcgcaagcccaaatcggaccacggtaatccaaaggccgcggcgtagcggacgcgcgggcgctggtgataaagcgggggctgggcctcgacgcctctgctctgctctgctctccttgcataggttttatcttctcccctcctctgcccccatctcgcttctcgcacacggcagccggattccgaagcgcgccccctcggccccagccaaaagcatcgcagtttctaatcgtttggagagcacacaagaatgtcgttcgtgcagctctctggtgctggagtcgctgcagtggccttcacgaacaagagcctagtctctcggcacgcagcgctacgggtctgctcgtcgaggcgctcgatccgtagcctggtcgttaaggctgcaactgtcgtcaccccaaagtacacttcactgaagcctctgggagatagggtgcttgtgaagcttggtgccgcagaggagaagacagttggtggcattttgcttccatctactgcccagactaaaccacaaggaggtgaggttgttgctgttggagcaggaaggaccatcggggacaagaaaatagctgtggatatagagactggagcacaagtagtatactcaaagtatgctgggactgaggttgaattcaatgactcaaagcatcttattctcaaagaagacgatatcattggtattcttgagacagatgatgtgaaggacatgaagcctctcaatgaccgtgttctcatcaaggttgcagaagccgaagacaaaactcctgggggccttatcctcactgaaacaactaaagagaagccgtccataggaacggttgtagctgttggcccgggtcctctggacgaggaaggcaagagacagccactgtcagtgtcggcgggcagcacagtgctgtactccaagtatgcagggagtgagttcaagggcgcggatggcacggcctacattgtgttgagagcgtcggatgtgatggctgtcctgtcttgagcatttcgtttccggctcgttaatgtagtttgcagccaatagttgtcatgtggtatgaaacgatcgctttgtggtggtcatcacaccatgctggtgatcatcacaacatatgctgatactgttccggacaatcggctagaatttgttgtgtggcaggtataaacgtcagcatctgatagtgagagcactcggttacttct

SEQ ID NO: 6408 - protein, 246 aa, Zea mays subsp. mays
  peptide (1)..(246): Ceres Seq. ID no. 12408141
MSFVQLSGAGVAAVAFTNKSLVSRHAALRVCSSRRSIRSLVVKAATVVTPKYTSLKPLGDRVLVKLGAAEEKTVGGILLPSTAQTKPQGGEVVAVGAGRTIGDKKIAVDIETGAQVVYSKYAGTEVEFNDSKHLILKEDDIIGILETDDVKDMKPLNDRVLIKVAEAEDKTPGGLILTETTKEKPSIGTVVAVGPGPLDEEGKRQPLSVSAGSTVLYSKYAGSEFKGADGTAYIVLRASDVMAVLS

SEQ ID NO: 6409 - DNA, 913 bp, Zea mays subsp. mays
  misc_feature (1)..(913): Ceres Seq. ID no. 12352405
  misc_feature (1)..(913): Ortholog of  Ceres SEQ ID NO 15170395 as cited in SEQ ID NO 58055
agatctctagcactagctttgatcctttccgccgccaactttggcttgggatttgtctctgacttgggacactcgctgaagagagtacatctccgacttgggatttgtcttacgaccagcagcggcggcggcggcggcgcgccaggacaaggagcagcgggactacagactcatcgcaaaagccgtggacgaagcgtaccgggcggtggagtgcgacggcggcgggtaccccttcggcgcggtcgtcgtccacggcggcggcgacgacgaggtggtcagcagcagccacaactcggtccggaaggacgccgacccgtcggcgcacgccgaagtgaccgccatcagacaggcgtgcaagaagctggggaaaaccagcctcgccggctgcgagatctacacgtcctgcgagccgtgcccgatgtgcctggggctcattcgcctggccaagataaagaaggtggtgtacggagccaagtcggaggtcgccgctgccgccgggctcaacggcgtcctcccagaggtcttcagagagtactaccagaaatccggcgtggagatgaggcaggccgagggcgaggcggcaacccgggatcgccgaggaggtgttcgaggagaccaagggcaagtttcgcaacaagtaaacgcgctggagatggcgccgggcggatggctgttgcctgttgctagtggaatggttgccgtttccaagctttttgtccgggggacctttgatcagaggtcacatgcccagagaccggaataaattcacccctttccccccctaaaaaatactccatttcacatggtttgttgtatcagtgtgttatttctttttttaacgcccgcctcgaccgtgtgacattttttttcttaataatgtagggtgttacttgttgggaacataattaggtgt

SEQ ID NO: 6410 - protein, 228 aa, Zea mays subsp. mays
  peptide (1)..(228): Ceres Seq. ID no. 12352406
RSLALALILSAANFGLGFVSDLGHSLKRVHLRLGICLTTSSGGGGGAPGQGAAGLQTHRKSRGRSVPGGGVRRRRVPLRRGRRPRRRRRRGGQQQPQLGPEGRRPVGARRSDRHQTGVQEAGENQPRRLRDLHVLRAVPDVPGAHSPGQDKEGGVRSQVGGRRCRRAQRRPPRGLQRVLPEIRRGDEAGRGRGGNPGSPRRCSRRPRASFATSKRAGDGAGRMAVACC

SEQ ID NO: 6411 - protein, 114 aa, Zea mays subsp. mays
  peptide (1)..(114): Ceres Seq. ID no. 12352407
MCLGLIRLAKIKKVVYGAKSEVAAAAGLNGVLPEVFREYYQKSGVEMRQAEGEAATRDRRGGVRGDQGQVSQQVNALEMAPGGWLLPVASGMVAVSKLFVRGTFDQRSHAQRPE

SEQ ID NO: 6412 - DNA, 670 bp, Zea mays subsp. mays
  misc_feature (1)..(670): Ceres Seq. ID no. 13496088
  misc_feature (1)..(670): Ortholog of  Ceres SEQ ID NO 14306156 as cited in SEQ ID NO 0
aagacttcacaagaatctactcgtcgagtcaccaaagataaggctctatcggactcggagtctcggacagcacagcaaagcaagagccgctactcaagtatagtctgacaccggccgaccctgccccaacccaagccatggcggacaacaacaaccggcggaaccacgggcagaccttgctcgccggcgcgggcctgggcctgctcgccgtgaactcgggcctcgccatctaccgcgcgaggggcgacacggccgccgtcctcttcgtcgcggggtcctgcgccaccctgctcctcctcttcgcctgcctccgcgcctacgagcgggcggcgcccgggtcgccggcccgggaccgggcgcggcgcgccgtgtggccgctcgccacgctgctcacgctctcgttcgcctggaaggtggcggcggccatgccttccgccgccgcggccgccctcgtatggggcctggccgtggccaccaccgccggcggcttcgtggcactgtacgtgcagcaggcatgaacacgtgggcgcgggacggactaggcaagcagctgcagacttgcagctcgttcagggatctagatctgggcgccgcgcgcctgtgtagaaatgtacagtgtatttggctagcttttcgattttgtgcatatgtatgtagctgactggctgat

SEQ ID NO: 6413 - protein, 126 aa, Zea mays subsp. mays
  peptide (1)..(126): Ceres Seq. ID no. 13496089
MADNNNRRNHGQTLLAGAGLGLLAVNSGLAIYRARGDTAAVLFVAGSCATLLLLFACLRAYERAAPGSPARDRARRAVWPLATLLTLSFAWKVAAAMPSAAAAALVWGLAVATTAGGFVALYVQQA

SEQ ID NO: 6414 - protein, 68 aa, Zea mays subsp. mays
  peptide (1)..(68): Ceres Seq. ID no. 13496090
MGPGRGHHRRRLRGTVRAAGMNTWARDGLGKQLQTCSSFRDLDLGAARLCRNVQCIWLAFRFCAYVCS

SEQ ID NO: 6415 - DNA, 988 bp, Zea mays subsp. mays
  misc_feature (1)..(988): Ceres Seq. ID no. 12402534
  misc_feature (1)..(988): Ortholog of  Ceres SEQ ID NO 13595658 as cited in SEQ ID NO 59888
  misc_feature (1)..(988): Ortholog of  Ceres SEQ ID NO 13661330 as cited in SEQ ID NO 61614
  misc_feature (1)..(988): Ortholog of  Ceres SEQ ID NO 13596025 as cited in SEQ ID NO 62024
  misc_feature (1)..(988): Ortholog of  Ceres SEQ ID NO 13662324 as cited in SEQ ID NO 62162
  misc_feature (1)..(988): Ortholog of  Ceres SEQ ID NO 12625713 as cited in SEQ ID NO 64160
  misc_feature (1)..(988): Ortholog of  Ceres SEQ ID NO 15174373 as cited in SEQ ID NO 0
agcagcagcagcagcaagcttgagccactgctgcacgtatattattaagatcgaaagccaccaccatggccttggcctctaataagctcctcatcaacagcttcgtcacggtggcattcttagtcgccagcactcgtgggagtggcaccatccagctgatcttggtgaacaactgcgcggaatccatctggcccgggcttctgggcaccgccggccagccgacgccgcagtcgggcggcctccacctggcccccggcgacgaggcggccttcgacgtgccggtggggtggtccggccgcgtgtgnccgcggcgcggctgctccttcgaccagcgcgagcgggggcagtgcgcgacgggggactgtggcggcgtgctccgctgngacgggcggcccggcgccgccccggccacggtggtagagatgacgctgggcacccccaagtccccgntccacttnnacgacgtgtcgntggtggacggcttcaacgcgccggtgtccatggcccccgtgggcggcggcgccgggtgcggcgtgnncgggtgccagnnggacctgaacgtctgctgcccgtcggcgctcgaggnnagggaccgggaggggagggtggccggctgccggagcgcctgcaaggccatgggaggggacaggtactgctgcacgggggactacgcgtcgccggacnaggtgccgccccaccatcttngcccacgtcttcaaggccgtgtgccccaaggcctatcantacgcgtacgacgacgccacctcgctgaaccggtgcaaggccagccggtacctcatcaccttctgcccaccgccgacatccaggaaatgacgaccacatccatggattgcatcttcaaaataataatacttactaaatgtcctacggtttttatatatcagtcatgtagagcttgtttaattaggatacttatttaaacatattccaatccgagaggtctntatccaacgcatcaattgttcgt

SEQ ID NO: 6416 - protein, 291 aa, Zea mays subsp. mays
  peptide (1)..(291): Ceres Seq. ID no. 12402535
  misc_feature (80)..(80): Xaa is any aa, unknown or other
  misc_feature (106)..(106): Xaa is any aa, unknown or other
  misc_feature (129)..(129): Xaa is any aa, unknown or other
  misc_feature (131)..(131): Xaa is any aa, unknown or other
  misc_feature (132)..(132): Xaa is any aa, unknown or other
  misc_feature (136)..(136): Xaa is any aa, unknown or other
  misc_feature (158)..(158): Xaa is any aa, unknown or other
  misc_feature (162)..(162): Xaa is any aa, unknown or other
  misc_feature (174)..(174): Xaa is any aa, unknown or other
  misc_feature (207)..(207): Xaa is any aa, unknown or other
  misc_feature (214)..(214): Xaa is any aa, unknown or other
  misc_feature (227)..(227): Xaa is any aa, unknown or other
MALASNKLLINSFVTVAFLVASTRGSGTIQLILVNNCAESIWPGLLGTAGQPTPQSGGLHLAPGDEAAFDVPVGWSGRVXPRRGCSFDQRERGQCATGDCGGVLRXDGRPGAAPATVVEMTLGTPKSPXHXXDVSXVDGFNAPVSMAPVGGGAGCGVXGCQXDLNVCCPSALEXRDREGRVAGCRSACKAMGGDRYCCTGDYASPDXVPPHHLXPRLQGRVPQGLSXRVRRRHLAEPVQGQPVPHHLLPTADIQEMTTTSMDCIFKIIILTKCPTVFIYQSCRACLIRILI

SEQ ID NO: 6417 - protein, 172 aa, Zea mays subsp. mays
  peptide (1)..(172): Ceres Seq. ID no. 12402536
  misc_feature (10)..(10): Xaa is any aa, unknown or other
  misc_feature (12)..(12): Xaa is any aa, unknown or other
  misc_feature (13)..(13): Xaa is any aa, unknown or other
  misc_feature (17)..(17): Xaa is any aa, unknown or other
  misc_feature (39)..(39): Xaa is any aa, unknown or other
  misc_feature (43)..(43): Xaa is any aa, unknown or other
  misc_feature (55)..(55): Xaa is any aa, unknown or other
  misc_feature (88)..(88): Xaa is any aa, unknown or other
  misc_feature (95)..(95): Xaa is any aa, unknown or other
  misc_feature (108)..(108): Xaa is any aa, unknown or other
MTLGTPKSPXHXXDVSXVDGFNAPVSMAPVGGGAGCGVXGCQXDLNVCCPSALEXRDREGRVAGCRSACKAMGGDRYCCTGDYASPDXVPPHHLXPRLQGRVPQGLSXRVRRRHLAEPVQGQPVPHHLLPTADIQEMTTTSMDCIFKIIILTKCPTVFIYQSCRACLIRILI

SEQ ID NO: 6418 - protein, 146 aa, Zea mays subsp. mays
  peptide (1)..(146): Ceres Seq. ID no. 12402537
  misc_feature (13)..(13): Xaa is any aa, unknown or other
  misc_feature (17)..(17): Xaa is any aa, unknown or other
  misc_feature (29)..(29): Xaa is any aa, unknown or other
  misc_feature (62)..(62): Xaa is any aa, unknown or other
  misc_feature (69)..(69): Xaa is any aa, unknown or other
  misc_feature (82)..(82): Xaa is any aa, unknown or other
MAPVGGGAGCGVXGCQXDLNVCCPSALEXRDREGRVAGCRSACKAMGGDRYCCTGDYASPDXVPPHHLXPRLQGRVPQGLSXRVRRRHLAEPVQGQPVPHHLLPTADIQEMTTTSMDCIFKIIILTKCPTVFIYQSCRACLIRILI

SEQ ID NO: 6419 - DNA, 899 bp, Zea mays subsp. mays
  misc_feature (1)..(899): Ceres Seq. ID no. 12403444
  misc_feature (1)..(899): Ortholog of  Ceres SEQ ID NO 13594465 as cited in SEQ ID NO 51233
  misc_feature (1)..(899): Ortholog of  Ceres SEQ ID NO 13585110 as cited in SEQ ID NO 60647
aaaaccctagcccatcagggcagcgaccttctagaaccgtctccaatggcgctactccgagcgctccggcgagcccttccggcgctctcctcgccggcggcggttctcccccgtcgcgccccgcacccactacctcctccgcccgctcctcgtcggttcctggacccgatcgggctccgctccttctccgccgccgccgccaccgcgtcgcaggcgccgcccatgggggccaccctgttcggcgggctcatggacacccggttcccgaagcgccggccgggcttcgccaaccgccggaagagggctagcttgcgccccaaaggtccgtactactgggtgaagtgcaagcctgacgagcccataccagttagtcagccgaaccaagggagcgtacgagggaggaaggagaagaagcggatcaagcagcgcaaggactttatcatggctgagaagaagaagcgcagagctcagtattctgctgctgttaagagaaaggaggcagaacgaacagaaaggaagatggctgctgtggcaagagagcgggcatgggcagcaaggttgatagagctaaaacagattgaggaagacgttaaagctgtaatggcataagggcctgctctggaaaatggcaaggcgtctaacctgtttctgctgctctattttctcctcctttgttcctacatagtttaaattgtcacaattctttgtgatggaatggaagaccagtaccacttctttcaacagtaatatcaaatgccggaactgtttttttaatacagactctcattagaccatgtttggagtttgtttacttttgatgtaatttagaataagtgatgcgatggtatctgtgtgcttgacatctgagatggctgttgtctgcaatatatagttttggt

SEQ ID NO: 6420 - protein, 202 aa, Zea mays subsp. mays
  peptide (1)..(202): Ceres Seq. ID no. 12403445
KTLAHQGSDLLEPSPMALLRALRRALPALSSPAAVLPRRAPHPLPPPPAPRRFLDPIGLRSFSAAAATASQAPPMGATLFGGLMDTRFPKRRPGFANRRKRASLRPKGPYYWVKCKPDEPIPVSQPNQGSVRGRKEKKRIKQRKDFIMAEKKKRRAQYSAAVKRKEAERTERKMAAVARERAWAARLIELKQIEEDVKAVMA

SEQ ID NO: 6421 - protein, 187 aa, Zea mays subsp. mays
  peptide (1)..(187): Ceres Seq. ID no. 12403446
MALLRALRRALPALSSPAAVLPRRAPHPLPPPPAPRRFLDPIGLRSFSAAAATASQAPPMGATLFGGLMDTRFPKRRPGFANRRKRASLRPKGPYYWVKCKPDEPIPVSQPNQGSVRGRKEKKRIKQRKDFIMAEKKKRRAQYSAAVKRKEAERTERKMAAVARERAWAARLIELKQIEEDVKAVMA

SEQ ID NO: 6422 - protein, 128 aa, Zea mays subsp. mays
  peptide (1)..(128): Ceres Seq. ID no. 12403447
MGATLFGGLMDTRFPKRRPGFANRRKRASLRPKGPYYWVKCKPDEPIPVSQPNQGSVRGRKEKKRIKQRKDFIMAEKKKRRAQYSAAVKRKEAERTERKMAAVARERAWAARLIELKQIEEDVKAVMA

SEQ ID NO: 6423 - DNA, 1073 bp, Zea mays subsp. mays
  misc_feature (1)..(1073): Ceres Seq. ID no. 12368746
  misc_feature (1)..(1073): Ortholog of  Ceres SEQ ID NO 15225572 as cited in SEQ ID NO 61651
agttggagtcggagaattttggggtaacaggtgggttggcttcttggctgttagaaggaagggcgcctttgtgctgttctcctaatccaaaagtcgcgtgctgtgctctgctctcgcctcgcacggactcgtggtaaaggatggagaccatgtcggctctcgcgaggacggcgccgccccttgctgggaccattcgccggccgtcctgcgcgctgcggccgacggcgtccctctccttcgccgccgcttcaacgacgccccgcggccggctcgggctggggctgagcacggcgccggcggggagcgggagggcggccagggctcgcgccgtcccgcagcgcatcgtcgcctcctcggaggttgagcgaagctacattatgatcaaaccagatggtgttcagcgtggtctggttggagagattatttctcgctttgagaagaaagggtttttgttgaaaggcttaaaacttttccagtgccccaaggacttggcgcaggagcattacaaggatttgaaggataaacctttctttcctaagctgatcgattacataacttctggccctgttgtctgcatggcctgggagggtgctggtgttgttgcatcagctcgcaaattaataggagctactaacccccttcaagctgaaccagggactataaggggtgatcttgcagttcaaactggaaggaacgttgtccatggaagtgatagtcctgataatggcaagcgtgaaattgaactgtggttcaaagaaggcgagctctgccaatgggaatcagttcaagcaccgtggcttatagaataactcttgctaatcatttccagagttgtattcaatgtttttttttgtgttcgtcttgattcaaggagccatgcaagagtgtatgagtttagttcggctaagtaattagctcatgagggcttgaattatcggttctttttgaggattgaggatttttgcaactgaaacctttgatcagttgctcatgttgagaagctaatttcttgtcatatttacatgtaataaagtccctctactacagtaataaattagtatttcctatggtcc

SEQ ID NO: 6424 - protein, 222 aa, Zea mays subsp. mays
  peptide (1)..(222): Ceres Seq. ID no. 12368747
METMSALARTAPPLAGTIRRPSCALRPTASLSFAAASTTPRGRLGLGLSTAPAGSGRAARARAVPQRIVASSEVERSYIMIKPDGVQRGLVGEIISRFEKKGFLLKGLKLFQCPKDLAQEHYKDLKDKPFFPKLIDYITSGPVVCMAWEGAGVVASARKLIGATNPLQAEPGTIRGDLAVQTGRNVVHGSDSPDNGKREIELWFKEGELCQWESVQAPWLIE

SEQ ID NO: 6425 - protein, 219 aa, Zea mays subsp. mays
  peptide (1)..(219): Ceres Seq. ID no. 12368748
MSALARTAPPLAGTIRRPSCALRPTASLSFAAASTTPRGRLGLGLSTAPAGSGRAARARAVPQRIVASSEVERSYIMIKPDGVQRGLVGEIISRFEKKGFLLKGLKLFQCPKDLAQEHYKDLKDKPFFPKLIDYITSGPVVCMAWEGAGVVASARKLIGATNPLQAEPGTIRGDLAVQTGRNVVHGSDSPDNGKREIELWFKEGELCQWESVQAPWLIE

SEQ ID NO: 6426 - protein, 143 aa, Zea mays subsp. mays
  peptide (1)..(143): Ceres Seq. ID no. 12368749
MIKPDGVQRGLVGEIISRFEKKGFLLKGLKLFQCPKDLAQEHYKDLKDKPFFPKLIDYITSGPVVCMAWEGAGVVASARKLIGATNPLQAEPGTIRGDLAVQTGRNVVHGSDSPDNGKREIELWFKEGELCQWESVQAPWLIE

SEQ ID NO: 6427 - DNA, 962 bp, Zea mays subsp. mays
  misc_feature (1)..(962): Ceres Seq. ID no. 12349152
  misc_feature (1)..(962): Ortholog of  Ceres SEQ ID NO 14304183 as cited in SEQ ID NO 53725
  misc_feature (1)..(962): Ortholog of  Ceres SEQ ID NO 14305778 as cited in SEQ ID NO 57220
  misc_feature (1)..(962): Ortholog of  Ceres SEQ ID NO 14309452 as cited in SEQ ID NO 0
agtcagtgggatgtgtggatgctaaccagtgcagtggaggattagcgatcttctagaatcgtgtgcgagctggacagcaggaagagccgtagagttcgacgcgaggagcgagcgagtgattagctcgtgcgtgctgtgcaaggaaagtaaccaagcagatcgatcggtcgaggcgggtaggacaggatccagaggtagctagccatggcggaggaagcgtctgcgcctgcggcggggacggaagcgccgccggggaagatgacgatggtggtaggggtcgacgagagcgagcacagcttctacgcgctgcagtgggcactgcagcacttcttcccgccgggccagccgcagcagtaccgcctcgtcgtcgtcaccgccaagcccaccgccgcctccgccgtcggcctcgccggcccaggcgccgcggatgtgctgccgtacgtggaggcggatctcaagcgctccgccctgcgcgtcgtcgaaaaagccaaaggcctctgcacacaggcgagcgacgctgtgtttgaggcgctggagggggacgctaggaacgtcctctgcgaggctgtcgagaggcacggggccgagatgctcgtcgtcggcagccatggttacggagccattaaaagggctgttcttggaagtgtgagcgactactgtgcccatcacgcgcactgcaccgtgatgatagtaaagaagcccaagcagcacaagcactgatcaatgccgactgatcactacgtgtactgcaaataatttgtactactgcaaagttatgtgtgcgtccgtccgtttgtgaataattgggtcatcaaccatcacatcttcggttgcttctacaagtatccgatccaatccttctacgagtggattgggatttacaaataattgattgctctctgaacctgaaaacaatgtatttgtattaatgtgttggaacacgtatatgtagttgcaacttc

SEQ ID NO: 6428 - protein, 171 aa, Zea mays subsp. mays
  peptide (1)..(171): Ceres Seq. ID no. 12349153
MAEEASAPAAGTEAPPGKMTMVVGVDESEHSFYALQWALQHFFPPGQPQQYRLVVVTAKPTAASAVGLAGPGAADVLPYVEADLKRSALRVVEKAKGLCTQASDAVFEALEGDARNVLCEAVERHGAEMLVVGSHGYGAIKRAVLGSVSDYCAHHAHCTVMIVKKPKQHKH

SEQ ID NO: 6429 - protein, 153 aa, Zea mays subsp. mays
  peptide (1)..(153): Ceres Seq. ID no. 12349154
MTMVVGVDESEHSFYALQWALQHFFPPGQPQQYRLVVVTAKPTAASAVGLAGPGAADVLPYVEADLKRSALRVVEKAKGLCTQASDAVFEALEGDARNVLCEAVERHGAEMLVVGSHGYGAIKRAVLGSVSDYCAHHAHCTVMIVKKPKQHKH

SEQ ID NO: 6430 - protein, 151 aa, Zea mays subsp. mays
  peptide (1)..(151): Ceres Seq. ID no. 12349155
MVVGVDESEHSFYALQWALQHFFPPGQPQQYRLVVVTAKPTAASAVGLAGPGAADVLPYVEADLKRSALRVVEKAKGLCTQASDAVFEALEGDARNVLCEAVERHGAEMLVVGSHGYGAIKRAVLGSVSDYCAHHAHCTVMIVKKPKQHKH

SEQ ID NO: 6431 - DNA, 934 bp, Zea mays subsp. mays
  misc_feature (1)..(934): Ceres Seq. ID no. 12368601
  misc_feature (1)..(934): Ortholog of  Ceres SEQ ID NO 15170454 as cited in SEQ ID NO 52794
tactctctctctctgcctgcaaagctgcttgatccatcatcgatcacatcactccaccagccgcagcgcacgtaacgtacgactcatggcagatcgcgaccgcagcggcatctacggcggacgagcgcctacgggcagcagcaggggggcggccgcccgatgggtgagcaggtgaagggcatgatccacgacaaggggccgacggcgtcccaggcgctgacggtggcgacgctgttccctctgggcgggctgctcctggtgctgtcgggcctggcgctggcggcctccacggtggggctggccctggccacgcccgtgttcctgctcttcagccccgtgctcgtccccgccgcgctgctcatcggcacggccgtcgcggggttcctcacgtcgggcgcgctggggctcggcggcctgtcctcgctcacgtgcctcgccaacacggcgcggcaggcgttccagcgcaccccggactacgtcgaggaggcgcgccgcaggatggcggaggccgcggcgcacgcgggccacaagaccgcgcaggccgggcacggcatccagagcaaggcgcaggaggccggtgctggcactggcgccggcggcggcaggacttcctcgtaaataagcaaatcatccatggatgcgtgcgtgtcaatgtcagcagggtcgtcgtggaatgctcttctctgtacgtgggtaaccgtcttttggtcgtcttccccgagtgcgtgataaatatcctggtgttcgtcgtgtgtggtgctgccctaggctggggcctggggtcggctgtgtaccggtatctgttcatcgccgctccgtcgcgttcggagatgtgaataagtgatgtgaaggttaagtttcagctttgctattgctattgtggcttgtgcatcagcggtttgctcgttgactgttatggaaataagcattgggg

SEQ ID NO: 6432 - protein, 152 aa, Zea mays subsp. mays
  peptide (1)..(152): Ceres Seq. ID no. 12368602
MGEQVKGMIHDKGPTASQALTVATLFPLGGLLLVLSGLALAASTVGLALATPVFLLFSPVLVPAALLIGTAVAGFLTSGALGLGGLSSLTCLANTARQAFQRTPDYVEEARRRMAEAAAHAGHKTAQAGHGIQSKAQEAGAGTGAGGGRTSS

SEQ ID NO: 6433 - protein, 145 aa, Zea mays subsp. mays
  peptide (1)..(145): Ceres Seq. ID no. 12368603
MIHDKGPTASQALTVATLFPLGGLLLVLSGLALAASTVGLALATPVFLLFSPVLVPAALLIGTAVAGFLTSGALGLGGLSSLTCLANTARQAFQRTPDYVEEARRRMAEAAAHAGHKTAQAGHGIQSKAQEAGAGTGAGGGRTSS

SEQ ID NO: 6434 - DNA, 2103 bp, Zea mays subsp. mays
  misc_feature (1)..(2103): Ceres Seq. ID no. 12343158
  misc_feature (1)..(2103): Ortholog of  Ceres SEQ ID NO 14303850 as cited in SEQ ID NO 53464
  misc_feature (1)..(2103): Ortholog of  Ceres SEQ ID NO 14310452 as cited in SEQ ID NO 54426
  misc_feature (1)..(2103): Ortholog of  Ceres SEQ ID NO 15176262 as cited in SEQ ID NO 54751
  misc_feature (1)..(2103): Ortholog of  Ceres SEQ ID NO 15174626 as cited in SEQ ID NO 59393
  misc_feature (1)..(2103): Ortholog of  Ceres SEQ ID NO 15169663 as cited in SEQ ID NO 64659
  misc_feature (1)..(2103): Ortholog of  Ceres SEQ ID NO 13656177 as cited in SEQ ID NO 64997
acattggaacgcgaacgctctcggatccatccacctccaaagtccaaaagcgaagcctacgcccgccccaacggtgaaaacgtcggaaccctagatccctctcacggtcgcgcctgtgctccaaaaccttagatccgacatgcatcagcccagagcccgctacccacccgggtatggctccagcgggggaggcggtggcgggggaggcggtagtggaggaggaagaggaggcagcggcggcggaggaaaccacaactactacggccggaacacacatccacagcatcaacaccactaccagcagcagcagcagcactcgcataggaactcctcgcaccagcagcagtggctgcggcgagaccagggccccgccgttgcggggccagtgtctggaaacgctgtgcctaagacggcgcctcagcttgacgctgttgactcgagttctcaagattggaaggctcaactaaatataccagctccagacacacgctacaggacagaggatgtcactgcaacaaaaggcaatgagtttgaggattatttcttgaaacgtgagttgcttatgggaatatatgagaagggatttgaaaggccatctcctattcaagaagaaagcattcctattgcgttgactggaagtgatattcttgcaagggcgaaaaatggcactggaaagactgctgccttttgcattccggcacttgaaaaaattgatcctgaaaataatgcaattcaagttgttatactagtaccaacaagggaactggctctgcaaacttcacaagtgtgtaaagagcttgggaaatacctaaacattgaagttatggttagcactggaggaaccagcttgaaggatgacatcatgcgtttataccaacctgttcatctactcgttgggactcctggccgaatacttgatcttaccaggaagggcatttgtgtgctgaaagattgttcaatgcttgtcatggatgaggcagacaagctattagctccagagtttcagccttctgtggaggcacttattcatttccttccacctagtcgacaactgttgatgttttcagcaacctttcctgtaactgtcaaggaattcaaagagaaatatctgcctagaccttatgtgattaatctaatggacgaactgaccctgaaaggaatcacacaatattatgcttttgttgaagaaaggcagaaagttcattgcctgaatacacttttctcaaagcttcaaattaatcaatccattatattctgcaactctgttaatagagttgagctgctggctaaaaaaataactgaactcggttattcatgcttctacattcatgctaagatgttgcaagaccacagaaatcgagtatttcatgattttcgtaatggtgcttgcagaaaccttgtgtgcacagatctgtttaccagaggaattgatattcaggctgttaatgtggttattaattttgacttccctaagacatctgagacatatttacacagggttggccgttctgggagatatggacaccttggtttagcagtgaacttgatcacttatgaggaccgtttcaacttgtataggattgagcaagagcttggaacagaaattaagacaatacccccgcagatcgacctggccgtatactgccaatgatgaatgcgacattcaggagcatcaaacacttctctttctatttgagaaacttatcaggcaaatacgtttgtacatagcaacccatcagggctttgttttggcaccttgatgacgtttgtaagcttacctggattagtagaggaagtgcttcctgtaggcactgatactaacccgtttagctgaggacatgcacgctgggctgcttggaggcccagaactatgatgagatgagacaatatcttacctcacttgacattttcactcgacttgtttgccagtctcagttctacttgacttgcctgttctcatttgattcatcttccgttttcttctttcctaatgttatgatgcatatggatgtctttctgtagctgtatgatgtgttgagtttattttttcttggtgtatgtatacagcttaacttgaaattatttccatatcaacttctttgc

SEQ ID NO: 6435 - protein, 503 aa, Zea mays subsp. mays
  peptide (1)..(503): Ceres Seq. ID no. 12343159
MHQPRARYPPGYGSSGGGGGGGGGSGGGRGGSGGGGNHNYYGRNTHPQHQHHYQQQQQHSHRNSSHQQQWLRRDQGPAVAGPVSGNAVPKTAPQLDAVDSSSQDWKAQLNIPAPDTRYRTEDVTATKGNEFEDYFLKRELLMGIYEKGFERPSPIQEESIPIALTGSDILARAKNGTGKTAAFCIPALEKIDPENNAIQVVILVPTRELALQTSQVCKELGKYLNIEVMVSTGGTSLKDDIMRLYQPVHLLVGTPGRILDLTRKGICVLKDCSMLVMDEADKLLAPEFQPSVEALIHFLPPSRQLLMFSATFPVTVKEFKEKYLPRPYVINLMDELTLKGITQYYAFVEERQKVHCLNTLFSKLQINQSIIFCNSVNRVELLAKKITELGYSCFYIHAKMLQDHRNRVFHDFRNGACRNLVCTDLFTRGIDIQAVNVVINFDFPKTSETYLHRVGRSGRYGHLGLAVNLITYEDRFNLYRIEQELGTEIKTIPPQIDLAVYCQ

SEQ ID NO: 6436 - protein, 362 aa, Zea mays subsp. mays
  peptide (1)..(362): Ceres Seq. ID no. 12343160
MGIYEKGFERPSPIQEESIPIALTGSDILARAKNGTGKTAAFCIPALEKIDPENNAIQVVILVPTRELALQTSQVCKELGKYLNIEVMVSTGGTSLKDDIMRLYQPVHLLVGTPGRILDLTRKGICVLKDCSMLVMDEADKLLAPEFQPSVEALIHFLPPSRQLLMFSATFPVTVKEFKEKYLPRPYVINLMDELTLKGITQYYAFVEERQKVHCLNTLFSKLQINQSIIFCNSVNRVELLAKKITELGYSCFYIHAKMLQDHRNRVFHDFRNGACRNLVCTDLFTRGIDIQAVNVVINFDFPKTSETYLHRVGRSGRYGHLGLAVNLITYEDRFNLYRIEQELGTEIKTIPPQIDLAVYCQ

SEQ ID NO: 6437 - protein, 275 aa, Zea mays subsp. mays
  peptide (1)..(275): Ceres Seq. ID no. 12343161
MVSTGGTSLKDDIMRLYQPVHLLVGTPGRILDLTRKGICVLKDCSMLVMDEADKLLAPEFQPSVEALIHFLPPSRQLLMFSATFPVTVKEFKEKYLPRPYVINLMDELTLKGITQYYAFVEERQKVHCLNTLFSKLQINQSIIFCNSVNRVELLAKKITELGYSCFYIHAKMLQDHRNRVFHDFRNGACRNLVCTDLFTRGIDIQAVNVVINFDFPKTSETYLHRVGRSGRYGHLGLAVNLITYEDRFNLYRIEQELGTEIKTIPPQIDLAVYCQ

SEQ ID NO: 6438 - DNA, 1697 bp, Zea mays subsp. mays
  misc_feature (1)..(1697): Ceres Seq. ID no. 12387264
  misc_feature (1)..(1697): Ortholog of  Ceres SEQ ID NO 14311477 as cited in SEQ ID NO 51390
  misc_feature (1)..(1697): Ortholog of  Ceres SEQ ID NO 14302840 as cited in SEQ ID NO 62295
  misc_feature (1)..(1697): Ortholog of  Ceres SEQ ID NO 13596892 as cited in SEQ ID NO 62900
gtacctccggcgccccctccgacaccggtcctccggcctgcgcaggctagctagctctatataccaccgtgcctccgccgcgcaggcaggggagatccaagggtccgagcaaaaggccggcggcggcgagccagccagccagctaaagcgatcaatatatacatatatactatcgagcaacaagaaagaaaggaaaaaagaaggcaagcccaccagggccggcgaagagaggagctaataaggaaggaaggaaggaaggaaggaagatgatgagcaaggaggcagtggtgaacgcgttcctgggctgcttcatgcacgtggggctggcgctggtgctcgccgtctacctccccgtggcctttgtgtgccgcctcctccaccgcctcctcgtccgccccttcgccaggggcgaggacctccgcggcaaggtcatcctcgtcaccggcgcgtcctccggcatcggcgagcacctggtgtacgagtacgcgaggcacggcgcgtgcgtggcgctggtggcgcgcacggaggtggcgctgcgcgccgtggccaaggcggcgcgcgacctgggcgcccccgacgtgctggtcgtgccggccgacgtcaccaaggtcgacgacgccaagcgcgccgtcgaggagaccgtcgcgcacttcggcaaactgaatcacttggtggccaaacgccgggatctggtccagctgcttctttgaagagatcaccaacataaccgccttccataatgttattgatctcaacttctggggtgccgtgtacccgacctacttcgcgctgccgtacctcaaggccagccggggcaacatcgtggtgaccgcctccgtcgccggcagggtgccgacagccaggatgagcttctacaacgcaagcaaaggcgccgtgatacgtttctacgagacgctgagggctgagctggggtcccacgtgcacgtcaccatcctcacgcccggctacgtcgtctccaacctcaccaagggcaagggcctccagaaggacggccatgtcggcatcgacgaggaggcccgcgacgtacgtgatgagctcgatccaccgccctccctttatttatataatttcctcctcctacgtgcacgcgaacagtacagctacagcgacgaaatggcatgcatgcgcgcgcgcgcttgcagatcaacgtggggccgatgccggtgggcaagacggagtcgctggccgaggtggtggtggccagcgtgcgccgtcgggactactacgtcacgtggcccggctggtactggcccttccacatggtcatgtgcgccgcgccggagctggtggactggttctcccgcaccttctacgtctccaagtccggcgaccaggacggcggcggcggcgcgctcagcaagaagatcctggaggccgtcggcgggaagaagttcctctacccccagaccatacgctcacagaccgccatggcagccaataactgacaacttgcattgcactgtgttatatatatgtcattcatgagaatgcacggtcgatctgttgtttggattagaacacggtgatgatcgaacgggccagcacgggtcaaattgtttattcgtttcgtttcggattttttttccatttcctctgccttttctccacttccgattttacaaatggtcaatgtgtatcaagtaattaatacgaatgttcattcgtggttggcttgc

SEQ ID NO: 6439 - protein, 213 aa, Zea mays subsp. mays
  peptide (1)..(213): Ceres Seq. ID no. 12387265
MSFYNASKGAVIRFYETLRAELGSHVHVTILTPGYVVSNLTKGKGLQKDGHVGIDEEARDVRDELDPPPSLYLYNFLLLRAREQYSYSDEMACMRARACRSTWGRCRWARRSRWPRWWWPACAVGTTTSRGPAGTGPSTWSCAPRRSWWTGSPAPSTSPSPATRTAAAARSARRSWRPSAGRSSSTPRPYAHRPPWQPITDNLHCTVLYICHS

SEQ ID NO: 6440 - protein, 148 aa, Zea mays subsp. mays
  peptide (1)..(148): Ceres Seq. ID no. 12387266
MSASTRRPATYVMSSIHRPPFIYIISSSYVHANSTATATKWHACARALADQRGADAGGQDGVAGRGGGGQRAPSGLLRHVARLVLALPHGHVRRAGAGGLVLPHLLRLQVRRPGRRRRRAQQEDPGGRRREEVPLPPDHTLTDRHGSQ

SEQ ID NO: 6441 - protein, 147 aa, Zea mays subsp. mays
  peptide (1)..(147): Ceres Seq. ID no. 12387267
MMSKEAVVNAFLGCFMHVGLALVLAVYLPVAFVCRLLHRLLVRPFARGEDLRGKVILVTGASSGIGEHLVYEYARHGACVALVARTEVALRAVAKAARDLGAPDVLVVPADVTKVDDAKRAVEETVAHFGKLNHLVAKRRDLVQLLL

SEQ ID NO: 6442 - DNA, 1517 bp, Zea mays subsp. mays
  misc_feature (1)..(1517): Ceres Seq. ID no. 12404731
  misc_feature (1)..(1517): Ortholog of  Ceres SEQ ID NO 14301932 as cited in SEQ ID NO 67747
acacaatcacgctacagagcgcagagctgcacgctccaccggcgaactcacctcggccgccctcctctgccagatagcctccctctactattcaagcccaaaccctaaatcctcggttcccaaatggcgacgccgccgactgcgctgctgttgctcctcgcggcggcagcggcattccacggcgcgacggcgaagacgacgatcgagccgtgctctggcgcggacgcgtgcccggctcttctgggctacaagctctacgcggacatgaaggtgtccgaggtggcggcgctcttcggcgccgacccggcagcggtactggctgccaacgcgctcgacttcgcctctccaggcgccgccaaccgcatcctccccgcgggaacacccctccgcgtgcccacccgctgcgcctgcgccgacggcgtccgcaagtccgtcgccatccgctacgccgcccggccttccgacacgctcggctccatctccgaggtcgtcttcgccggcctcccctcggccgaccagatccgcaccgccaacgggctcgccgccgaggaccccgacgcgccgctcaacccgggccaggagctcgtcatcccgctcccctgcgtctgcttcaactccaccgacaacaacctccccgctgtgtacctctcctatgtcgtgcaggtcggggacaccgtggaatccatcgccgccagccacacaaccaccgtcactgatatcagcaatgtgaacgccatggggagccccattgtcgcaccaggcgacatccttgccataccattgtctgcttgtgcctcagcatttcctaactctgcttcggactatggattgcttgtggcaaatggaacctatgcactgactgctggtaactgtgtggagtgcagttgtgggccagcgaatctcaatttgtattgcatgccgtcttcactatcagcatcatgttcaagtatgcaatgctctaatagcagcctaattcttggtaatgtgactgcacaacccaccactggtggctgcagtgtctcatcttgcaactatggtggctatgtcaatggaaccattgcaacatcgctatcctcaggtcttcaacccatgtgtccaggaccgcatcaatttcccccactcacggcggtgccaactgcggcaaaccatgggtcttattccccatcacctgcaccaggacctggagatgctggtggtgccaccccaggaggttccagcctttctccatcaaatgagcctgctgggaacagctcacaagcggctgcgataaatcaaccatgccgtttcctcctcattttcattctttctgtgacattgtccttgcgggtgtggattcctgtgtagagtattgttttttttaaataactatgtagagtatttgttggctgtatttgtattgagcgtggaaggccttatttggggccaggtggaacctgaatgaagaatgcagtagcctgtcttcgttagtgtccggtgaaactttggtatgattttggtttctccagaatttgtatatg

SEQ ID NO: 6443 - protein, 406 aa, Zea mays subsp. mays
  peptide (1)..(406): Ceres Seq. ID no. 12404732
MATPPTALLLLLAAAAAFHGATAKTTIEPCSGADACPALLGYKLYADMKVSEVAALFGADPAAVLAANALDFASPGAANRILPAGTPLRVPTRCACADGVRKSVAIRYAARPSDTLGSISEVVFAGLPSADQIRTANGLAAEDPDAPLNPGQELVIPLPCVCFNSTDNNLPAVYLSYVVQVGDTVESIAASHTTTVTDISNVNAMGSPIVAPGDILAIPLSACASAFPNSASDYGLLVANGTYALTAGNCVECSCGPANLNLYCMPSSLSASCSSMQCSNSSLILGNVTAQPTTGGCSVSSCNYGGYVNGTIATSLSSGLQPMCPGPHQFPPLTAVPTAANHGSYSPSPAPGPGDAGGATPGGSSLSPSNEPAGNSSQAAAINQPCRFLLIFILSVTLSLRVWIPV

SEQ ID NO: 6444 - protein, 359 aa, Zea mays subsp. mays
  peptide (1)..(359): Ceres Seq. ID no. 12404733
MKVSEVAALFGADPAAVLAANALDFASPGAANRILPAGTPLRVPTRCACADGVRKSVAIRYAARPSDTLGSISEVVFAGLPSADQIRTANGLAAEDPDAPLNPGQELVIPLPCVCFNSTDNNLPAVYLSYVVQVGDTVESIAASHTTTVTDISNVNAMGSPIVAPGDILAIPLSACASAFPNSASDYGLLVANGTYALTAGNCVECSCGPANLNLYCMPSSLSASCSSMQCSNSSLILGNVTAQPTTGGCSVSSCNYGGYVNGTIATSLSSGLQPMCPGPHQFPPLTAVPTAANHGSYSPSPAPGPGDAGGATPGGSSLSPSNEPAGNSSQAAAINQPCRFLLIFILSVTLSLRVWIPV

SEQ ID NO: 6445 - DNA, 1061 bp, Zea mays subsp. mays
  misc_feature (1)..(1061): Ceres Seq. ID no. 13598842
  misc_feature (1)..(1061): Ortholog of  Ceres SEQ ID NO 13596975 as cited in SEQ ID NO 63097
gtgtctcctctcttcttcctccgctccacttcctgcacccgcttcttcccccaaaggccaaaaccctaaatctcctccctccctccctccaaacacctagctgccgccggttcccgcgtatgggagggtcgcggcgcaaattgaagcgctcgcgcactaaggtccgcgtggggcttccccgccggaaacccaatgaattcaaggcggccttcgaactccccgaggcactcgccgccgccgccggggccggggcgggctgggacgcggagggcagcgtagtgaagaactacgccgcgttcggggtggtggccaacccaaacctactcggtgcgcactcccgcggcacgccgcggctcgtccagagcgcggcgctgcaggcgcccgacgtcgccgccgcgcatgcacccgtcccggagttcgagccaatcgataccggcagcgatctcgagaacgacgacctgaagtctgctcttgggaagaaaaggaaggatggcaaatctgcaccattgcaaccacttactaaagttcaacgtgtttgcattggcagattaatagagaagtacggtgatgactacaaggccatgttcatggataccaagctgaacgcgatgcagcactctgtgggtacattgaagaaactatgcgaaagacaccacgttgatggcaagatctttgtctatccactttagtattgtgccggcacctacttcagcctcagtgtactcttttcgtcccgttaatggaacaagaacaattttgcaatttgccccaaagaggaagccgcaattcagaactattgtgtacttaanaaaaaaaaaaaaaaaaaaaaaaaaaaaaaaaaaaaaaaaaaaaaaaaaaaaaaaaaaaaaaaaaaaaaaaaaaaaaaaaaaaaaaaaaaaaaaaaagaagaatttttaaaaaaaaaaaaaattttttccccccccccccccggggggggggggcgggccccctttccccctttggggggggtttttccccgccccccgggggggggtttttaccccggggggggggggaaaccccggggggccccccttttt

SEQ ID NO: 6446 - protein, 228 aa, Zea mays subsp. mays
  peptide (1)..(228): Ceres Seq. ID no. 13598843
VSSLLPPLHFLHPLLPPKAKTLNLLPPSLQTPSCRRFPRMGGSRRKLKRSRTKVRVGLPRRKPNEFKAAFELPEALAAAAGAGAGWDAEGSVVKNYAAFGVVANPNLLGAHSRGTPRLVQSAALQAPDVAAAHAPVPEFEPIDTGSDLENDDLKSALGKKRKDGKSAPLQPLTKVQRVCIGRLIEKYGDDYKAMFMDTKLNAMQHSVGTLKKLCERHHVDGKIFVYPL

SEQ ID NO: 6447 - protein, 189 aa, Zea mays subsp. mays
  peptide (1)..(189): Ceres Seq. ID no. 13598844
MGGSRRKLKRSRTKVRVGLPRRKPNEFKAAFELPEALAAAAGAGAGWDAEGSVVKNYAAFGVVANPNLLGAHSRGTPRLVQSAALQAPDVAAAHAPVPEFEPIDTGSDLENDDLKSALGKKRKDGKSAPLQPLTKVQRVCIGRLIEKYGDDYKAMFMDTKLNAMQHSVGTLKKLCERHHVDGKIFVYPL

SEQ ID NO: 6448 - DNA, 889 bp, Zea mays subsp. mays
  misc_feature (1)..(889): Ceres Seq. ID no. 12365562
  misc_feature (1)..(889): Ortholog of  Ceres SEQ ID NO 13664333 as cited in SEQ ID NO 61344
gttttacaaaaggcactaggcaccacctttcgtggcttcctctgctctcctccacaaaggcagggaagcagcaacactgtagcagggaggagagggtaggcagtctgtccactgtccacgctgcagaagagagagatgggggtgcgggcggcggcggcagcagtggcgctggtggcgatgatgggcatgctggcgccccgagcggcggcgcagacgccgaactgcgcggcgaagctggtcccgtgctcgtcgtacatgaacacgacggggacgccgccggacacctgctgcggcccgctcaaggacgccgtcaagaacgacctcaagtgcctctgcgatctctacgccacgccggagatcttcaaggccttcaacatcagcctcgacgaggccctcggcctctccaagcgttgcggcctcagcgacaccaccgccgcctgcaagggcctttcacctacccaatctcctccaggttcaccatcaggtggtggcagtggcagcaactccggtcatcacactctgtcggtcggtttctcaggattcatgagcttcttgtcgctagccttgtggtctgtattagcataaagtttaggatgctgcagtggacattgcctgtcttatcccacaagatgatttgcacctacgacacaatcaacatttgtcttgctgtgtattgatatggccagccagtagactgatgtctctgaaccatgtgcttgcattagactgcacaattggtccttcgcccaattgttccaaagagtgcttccatgaacttagaccgaagagtgtctccaaggtcagctgtgggaaggttcttaagtccttcgcccaattgttccaaacctctgcaagattattggtaatgtgatcacattttatctcctcc

SEQ ID NO: 6449 - protein, 224 aa, Zea mays subsp. mays
  peptide (1)..(224): Ceres Seq. ID no. 12365563
FTKGTRHHLSWLPLLSSTKAGKQQHCSREERVGSLSTVHAAEERDGGAGGGGSSGAGGDDGHAGAPSGGADAELRGEAGPVLVVHEHDGDAAGHLLRPAQGRRQERPQVPLRSLRHAGDLQGLQHQPRRGPRPLQALRPQRHHRRLQGPFTYPISSRFTIRWWQWQQLRSSHSVGRFLRIHELLVASLVVCISIKFRMLQWTLPVLSHKMICTYDTINICLAVY

SEQ ID NO: 6450 - protein, 149 aa, Zea mays subsp. mays
  peptide (1)..(149): Ceres Seq. ID no. 12365564
MGVRAAAAAVALVAMMGMLAPRAAAQTPNCAAKLVPCSSYMNTTGTPPDTCCGPLKDAVKNDLKCLCDLYATPEIFKAFNISLDEALGLSKRCGLSDTTAACKGLSPTQSPPGSPSGGGSGSNSGHHTLSVGFSGFMSFLSLALWSVLA

SEQ ID NO: 6451 - protein, 135 aa, Zea mays subsp. mays
  peptide (1)..(135): Ceres Seq. ID no. 12365565
MMGMLAPRAAAQTPNCAAKLVPCSSYMNTTGTPPDTCCGPLKDAVKNDLKCLCDLYATPEIFKAFNISLDEALGLSKRCGLSDTTAACKGLSPTQSPPGSPSGGGSGSNSGHHTLSVGFSGFMSFLSLALWSVLA

SEQ ID NO: 6452 - DNA, 1565 bp, Zea mays subsp. mays
  misc_feature (1)..(1565): Ceres Seq. ID no. 12344180
  misc_feature (1)..(1565): Ortholog of  Ceres SEQ ID NO 15225493 as cited in SEQ ID NO 65438
  misc_feature (1)..(1565): Ortholog of  Ceres SEQ ID NO 14313344 as cited in SEQ ID NO 69148
aaacgatctccggggaatattttattccgtgggattccgatgcggccagtcgtcctcctcctcctcccctctctctcccgtttcttctagtagtagtacaaataaagaagaagctgagctgctcgaggcacggcgagggaggggagggagacacaaggcgagtgtccctactccgagggcagtccggtgtgcaagcgcatagcatagcaggagccacaagaaaaaaagccccatggattccttctcgccgagtggccggatgacacggacggcagcatcatctctggcagcgcgcgcggtcctcgcgctcctcctcatcggggtatccggttccggagccacccaggcagcgtctccccacacccaccacagtcggcagctggatgtgaaccacaaggagccagtccagacgtttcggcccatcaacattgcccaccgagggtcaaatggcgaactgcccgaagagacagcggccgcctacctgagggcgatcgaagaaggcgcggacttcatcgagacgaacgtactcgcgtccaaggacgggcatctcgtctgcttccacgatgtgacgctggacgcgaccaccgacgtcgcggaccacgcggagttcgctggcaggaagaggacctacgaggtccaaggagaagatgtcaccggatggttcatcgtggacttcactcttgaagagctcagatcactgagggtgaagcagcggttcagtttcagggaccagcggtacaacggcaagtaccagatcattacgttcgaagagtacatcctgatcgcgctctacgctgacaggaccgtcgggatctacccggagatcaagaaccccgtgttcatcaaccagcacgtgaagtggtcggacggaaagcgattcgaggacaagttcgtggagacgctgctcaggtacggctacggaggcgagtacatgtccgatggctggctccggcagccgctgttcatccagtccttcgcgccgacctcgctcatctacgtctccaacatgacggactcccccaagctgctcctgatcgacgacacgacggtcccgacgcaggacaccaaccagtcgtaccacgagataacctcggacgcctacctcgcgttcatcgggagctacgtggtggggatcgggccgtggaaggacacgctggtgcctccggacccgacagacaaccgcctgggacgccccgccgacctcgtcgcgcgagcgcacgctctgcgtctccaggtgcacccgtacaccttcaggaacgagaaccagtacctgcacttcgacttccggcaggacccctacgccgagtacgcgtactggctcgacgaggtcgccgtcgacgggctgttcaccgatttcactggtagtctgcacaagtaccaggagtggactaggccgtaccggaaggagcaggagaagacgagcccggaggcactcttgcgcgagatcgcgggcatgctcaagaacgacggctatgactgatgacttaggttgccttcagttttccccgtctgtcactctctctgtaatggttaactaaataataaagcgacggtttcatggatgc

SEQ ID NO: 6453 - protein, 415 aa, Zea mays subsp. mays
  peptide (1)..(415): Ceres Seq. ID no. 12344181
MDSFSPSGRMTRTAASSLAARAVLALLLIGVSGSGATQAASPHTHHSRQLDVNHKEPVQTFRPINIAHRGSNGELPEETAAAYLRAIEEGADFIETNVLASKDGHLVCFHDVTLDATTDVADHAEFAGRKRTYEVQGEDVTGWFIVDFTLEELRSLRVKQRFSFRDQRYNGKYQIITFEEYILIALYADRTVGIYPEIKNPVFINQHVKWSDGKRFEDKFVETLLRYGYGGEYMSDGWLRQPLFIQSFAPTSLIYVSNMTDSPKLLLIDDTTVPTQDTNQSYHEITSDAYLAFIGSYVVGIGPWKDTLVPPDPTDNRLGRPADLVARAHALRLQVHPYTFRNENQYLHFDFRQDPYAEYAYWLDEVAVDGLFTDFTGSLHKYQEWTRPYRKEQEKTSPEALLREIAGMLKNDGYD

SEQ ID NO: 6454 - protein, 406 aa, Zea mays subsp. mays
  peptide (1)..(406): Ceres Seq. ID no. 12344182
MTRTAASSLAARAVLALLLIGVSGSGATQAASPHTHHSRQLDVNHKEPVQTFRPINIAHRGSNGELPEETAAAYLRAIEEGADFIETNVLASKDGHLVCFHDVTLDATTDVADHAEFAGRKRTYEVQGEDVTGWFIVDFTLEELRSLRVKQRFSFRDQRYNGKYQIITFEEYILIALYADRTVGIYPEIKNPVFINQHVKWSDGKRFEDKFVETLLRYGYGGEYMSDGWLRQPLFIQSFAPTSLIYVSNMTDSPKLLLIDDTTVPTQDTNQSYHEITSDAYLAFIGSYVVGIGPWKDTLVPPDPTDNRLGRPADLVARAHALRLQVHPYTFRNENQYLHFDFRQDPYAEYAYWLDEVAVDGLFTDFTGSLHKYQEWTRPYRKEQEKTSPEALLREIAGMLKNDGYD

SEQ ID NO: 6455 - DNA, 1295 bp, Zea mays subsp. mays
  misc_feature (1)..(1295): Ceres Seq. ID no. 12409068
  misc_feature (1)..(1295): Ortholog of  Ceres SEQ ID NO 15174669 as cited in SEQ ID NO 59656
aatcaagtgacggttacattcttatcgtaaatagtttttgcacaaatagaacggaaaaaaggaacaatttttgtggaggtgactcctcgcctgtgtcgtcaaatcctccacaccctggactggagtggctgctgctcgtgcccggcgatgagcggcggcgggcccggaggtgcgtgcgggccggactcccgcgtggagaccatctcccggctggcgcagtggcgcatcgataccttcggcccctgctcctaccgccggtcggacccctttaagctcggcatctggaactggtacctgtcggtggagaagagccgctccatctttgtgcgcctcttcccggagcccggccgggtggccaaggagcagccccctctcgcgcgcttcctgctccgcgtctcctgggccggcccgccgcgacgctcctgcgtctcccctgtgcacgagcatctcctgcgtaccagcgatgattttatatggcaagtcgatgcgatgccccatgggcgttttacgattgatgttgagtttctagacctgaggatagccacgaacaatgctacggaatcgtcatcggtgtggccaaacgaaggcatggtgcagaagatcgcgagcaagagcgccctgggctgcctgtcgcacatgctggcggactccatccacgcggacgtgaccatcaacacgacggacggggtgctgaaggcgcacaaggcggtgctggcggcgtgctcccccgtgttcaagagcatgttcgtgcacgacctgagggagaaggagtcgtcgacggtggacatcggcgacatgtgcgtggagtcgtgctcggcgctgctgggtttcgtgtacgggacgatcgagcaggggcagttctggaagcaccggctgccgctgctggcggcggcggacaagtacgggatcggcgacatcaaggactgctgcgaggagagcctgctggaggacataggctcgggcaacgtgctggagcggctccacgtggcgtggctgtaccggctggagcggctgaagaaagggtgcctcacctacctgttcgtgttcgggaagatctatgacgtgagggacgagatgcacggcttcttccaccacgcggaccgcgagctcatgcacgacatgttccaggaggtgctcagcgtgtggaagcccatgtgaatggaagtgtccctttccacgcgagctgtgtgtgtgtgtgtgtgtcgtgcttgttcagtcagcagtgtgtggagagcatgctggttatgcatatttgaaacgaaaaggatgctcagaatttgaatggaagctaaatt

SEQ ID NO: 6456 - protein, 336 aa, Zea mays subsp. mays
  peptide (1)..(336): Ceres Seq. ID no. 12409069
MSGGGPGGACGPDSRVETISRLAQWRIDTFGPCSYRRSDPFKLGIWNWYLSVEKSRSIFVRLFPEPGRVAKEQPPLARFLLRVSWAGPPRRSCVSPVHEHLLRTSDDFIWQVDAMPHGRFTIDVEFLDLRIATNNATESSSVWPNEGMVQKIASKSALGCLSHMLADSIHADVTINTTDGVLKAHKAVLAACSPVFKSMFVHDLREKESSTVDIGDMCVESCSALLGFVYGTIEQGQFWKHRLPLLAAADKYGIGDIKDCCEESLLEDIGSGNVLERLHVAWLYRLERLKKGCLTYLFVFGKIYDVRDEMHGFFHHADRELMHDMFQEVLSVWKPM

SEQ ID NO: 6457 - protein, 222 aa, Zea mays subsp. mays
  peptide (1)..(222): Ceres Seq. ID no. 12409070
MPHGRFTIDVEFLDLRIATNNATESSSVWPNEGMVQKIASKSALGCLSHMLADSIHADVTINTTDGVLKAHKAVLAACSPVFKSMFVHDLREKESSTVDIGDMCVESCSALLGFVYGTIEQGQFWKHRLPLLAAADKYGIGDIKDCCEESLLEDIGSGNVLERLHVAWLYRLERLKKGCLTYLFVFGKIYDVRDEMHGFFHHADRELMHDMFQEVLSVWKPM

SEQ ID NO: 6458 - protein, 189 aa, Zea mays subsp. mays
  peptide (1)..(189): Ceres Seq. ID no. 12409071
MVQKIASKSALGCLSHMLADSIHADVTINTTDGVLKAHKAVLAACSPVFKSMFVHDLREKESSTVDIGDMCVESCSALLGFVYGTIEQGQFWKHRLPLLAAADKYGIGDIKDCCEESLLEDIGSGNVLERLHVAWLYRLERLKKGCLTYLFVFGKIYDVRDEMHGFFHHADRELMHDMFQEVLSVWKPM

SEQ ID NO: 6459 - DNA, 621 bp, Zea mays subsp. mays
  misc_feature (1)..(621): Ceres Seq. ID no. 12403452
  misc_feature (1)..(621): Ortholog of  Ceres SEQ ID NO 13500385 as cited in SEQ ID NO 67583
atgagaggagagaagaaaggccatcagtgatgaacgctttcgagttaatctctacgtctcagggcctcaatctcgggacgctcttcgagaagcaaacgggttctgttaagcgagaaacaaggtttgcgtcaaggcttcctgcaaatgagatactgtcgaagatcgaagcagcagcgggacccatgggcttcaacgttcagaagcgcaactataagctgaagctgcaaggggagaaccctggaaggaaaggtcagctggccatcgcaacagaggttttcgaggtcacgccttccctgtacatggttgagctgcgcaagtccaacggcgacacccttgaattccacaagttctaccacaacatctcaaatggactgaaggacgtgatgtggaagccggagagcggcatcgtggaaggcgacgaggcgcggcaaaggaggtccccgtgatgggggtctgcaaccaagttttagaagtagcgctgcagataactagtcatcagggagcctggcgggaactgagcctgtgactgcttcctgtttgtttggatgttttgtttttgtctaaggtgctttctgactaaagtatgctggataatgtgaatgaagaatgtgcagagttttc

SEQ ID NO: 6460 - protein, 147 aa, Zea mays subsp. mays
  peptide (1)..(147): Ceres Seq. ID no. 12403453
ERREERPSVMNAFELISTSQGLNLGTLFEKQTGSVKRETRFASRLPANEILSKIEAAAGPMGFNVQKRNYKLKLQGENPGRKGQLAIATEVFEVTPSLYMVELRKSNGDTLEFHKFYHNISNGLKDVMWKPESGIVEGDEARQRRSP

SEQ ID NO: 6461 - protein, 138 aa, Zea mays subsp. mays
  peptide (1)..(138): Ceres Seq. ID no. 12403454
MNAFELISTSQGLNLGTLFEKQTGSVKRETRFASRLPANEILSKIEAAAGPMGFNVQKRNYKLKLQGENPGRKGQLAIATEVFEVTPSLYMVELRKSNGDTLEFHKFYHNISNGLKDVMWKPESGIVEGDEARQRRSP

SEQ ID NO: 6462 - protein, 87 aa, Zea mays subsp. mays
  peptide (1)..(87): Ceres Seq. ID no. 12403455
MGFNVQKRNYKLKLQGENPGRKGQLAIATEVFEVTPSLYMVELRKSNGDTLEFHKFYHNISNGLKDVMWKPESGIVEGDEARQRRSP

SEQ ID NO: 6463 - DNA, 1252 bp, Zea mays subsp. mays
  misc_feature (1)..(1252): Ceres Seq. ID no. 12360523
  misc_feature (1)..(1252): Ortholog of  Ceres SEQ ID NO 13655656 as cited in SEQ ID NO 63731
gcacgagaccattacctagaacatcctaatcgaaaaaaccccgtcagcccgtgcggccgtgccctctgcctcctctgccactcctcgcccaaagcgccagaggcgcagcccgagccacaggttgcctcctctccctctcctcgtggcctcgtccttctcgttcaagacgaaaccgtacgcgagcgagctggtgagggaggaagagcagggaggtgggatcaggccggctccatggacgccacgctcctcctcctccccgccaactgcacggccgccgccagcgggcggatgcggcctcgactgcctgcaggcccacatgtggcttcccctggtccctccgcgcggccaaggacctccatccgggcctcagccgtgtccgcagccctcgccgttcgtggcctcccgcaacacgcttccgtggccgggcaaagcactggaagttatagggttggtgatgttatgaccaaaagggaagagctccatgttgtgaaaccaacaacttcagttgatgacgcccttgagatgctggtgaagcataggatctctggctttcctgttattgatgatgactggaatttggttggcgttgtgtcagattatgatttattggcactggatacaatatcaggagctggaccggctgaagcagacatatttcctgaggtggatagcacttggaagacatttcatgagatacagaagcttttgagcaaaaccaacgggaaggttattgctgatgttatgaccccagcgcctctcgtggtgcgtgaaacaactaaccttgaagatgctgcaaggttactccttgtgactaagtaccgcaggcttccagtggtcgatagctcaggcaaactggttgggatcattacaagagggaacgtcgtccaagccgccctcgaaatcaagaaaaaggttgaagggacactctgagatgactacctccaggtatcctttttgctgccacatggggggcttaggacttggacacatctctagttggcaactgatcaatcaaagcgactgtcagagtgagcgatgaaagtcgctatgtttatgaagatttgcccggagaagcacaggtgtatgtgtagtgtttgttatatatgctgatgcagtccttgctggccaaaacacaggttaccgattgttctggtttcctgggcttctttggacaccaaattcttaacctaggtcttgtttgggtgcacacgtatctagttcaacttacttgtattgaggttcattgaagtgc

SEQ ID NO: 6464 - protein, 309 aa, Zea mays subsp. mays
  peptide (1)..(309): Ceres Seq. ID no. 12360524
ARDHYLEHPNRKNPVSPCGRALCLLCHSSPKAPEAQPEPQVASSPSPRGLVLLVQDETVRERAGEGGRAGRWDQAGSMDATLLLLPANCTAAASGRMRPRLPAGPHVASPGPSARPRTSIRASAVSAALAVRGLPQHASVAGQSTGSYRVGDVMTKREELHVVKPTTSVDDALEMLVKHRISGFPVIDDDWNLVGVVSDYDLLALDTISGAGPAEADIFPEVDSTWKTFHEIQKLLSKTNGKVIADVMTPAPLVVRETTNLEDAARLLLVTKYRRLPVVDSSGKLVGIITRGNVVQAALEIKKKVEGTL

SEQ ID NO: 6465 - protein, 232 aa, Zea mays subsp. mays
  peptide (1)..(232): Ceres Seq. ID no. 12360525
MDATLLLLPANCTAAASGRMRPRLPAGPHVASPGPSARPRTSIRASAVSAALAVRGLPQHASVAGQSTGSYRVGDVMTKREELHVVKPTTSVDDALEMLVKHRISGFPVIDDDWNLVGVVSDYDLLALDTISGAGPAEADIFPEVDSTWKTFHEIQKLLSKTNGKVIADVMTPAPLVVRETTNLEDAARLLLVTKYRRLPVVDSSGKLVGIITRGNVVQAALEIKKKVEGTL

SEQ ID NO: 6466 - protein, 213 aa, Zea mays subsp. mays
  peptide (1)..(213): Ceres Seq. ID no. 12360526
MRPRLPAGPHVASPGPSARPRTSIRASAVSAALAVRGLPQHASVAGQSTGSYRVGDVMTKREELHVVKPTTSVDDALEMLVKHRISGFPVIDDDWNLVGVVSDYDLLALDTISGAGPAEADIFPEVDSTWKTFHEIQKLLSKTNGKVIADVMTPAPLVVRETTNLEDAARLLLVTKYRRLPVVDSSGKLVGIITRGNVVQAALEIKKKVEGTL

SEQ ID NO: 6467 - DNA, 759 bp, Zea mays subsp. mays
  misc_feature (1)..(759): Ceres Seq. ID no. 12343174
  misc_feature (1)..(759): Ortholog of  Ceres SEQ ID NO 13582876 as cited in SEQ ID NO 68251
  misc_feature (1)..(759): Ortholog of  Ceres SEQ ID NO 15179090 as cited in SEQ ID NO 0
aggatgctgcggctgcgctggcgtgccgtcctccccccactcccactccctccgctgcctggcttgcttcgccgcctgcctccgcaccggcgcgccctctcgtcctcttccggctctatcccgcttccaccgccggtgatggaggcttcctacaagtttgggccctacaaaatcgacgccagggaggtcttccacgccacgcccctctcctacgccatggtgaatctccgcccgctgctcccgggtcatgttcttgtgtgccccaagcgtgaagtgaaaagattcgccgatctaagttctgatgagattagtgacttatgggttactgcaaaggaagttggtgcacgtcttgagcagtaccacaaagcatcttcacttacctttgctatccaggatggtcctcaagctggccaaacagttgcacatgtccacatccacctcatcccaaggaagaaaggggattttgagaaaaatgatgaaatatatgatgcgattgatgtgaaggagaaagaattgaaggagaagcttgacctggacatcgagaggaaagataggagcatggaagagatggctaatgaggccaatgagtaccgtgctctttttagttagtttctaagctgagctgactgtttgctagaaataaggtttgctacctgttcttcattgttgcagttcagttatggttgcgcactgacattgtgatgatgtcccgttctgtaccgtggagaattaataatttgttgcaaggaatgcattctc

SEQ ID NO: 6468 - protein, 202 aa, Zea mays subsp. mays
  peptide (1)..(202): Ceres Seq. ID no. 12343175
RMLRLRWRAVLPPLPLPPLPGLLRRLPPHRRALSSSSGSIPLPPPVMEASYKFGPYKIDAREVFHATPLSYAMVNLRPLLPGHVLVCPKREVKRFADLSSDEISDLWVTAKEVGARLEQYHKASSLTFAIQDGPQAGQTVAHVHIHLIPRKKGDFEKNDEIYDAIDVKEKELKEKLDLDIERKDRSMEEMANEANEYRALFS

SEQ ID NO: 6469 - protein, 201 aa, Zea mays subsp. mays
  peptide (1)..(201): Ceres Seq. ID no. 12343176
MLRLRWRAVLPPLPLPPLPGLLRRLPPHRRALSSSSGSIPLPPPVMEASYKFGPYKIDAREVFHATPLSYAMVNLRPLLPGHVLVCPKREVKRFADLSSDEISDLWVTAKEVGARLEQYHKASSLTFAIQDGPQAGQTVAHVHIHLIPRKKGDFEKNDEIYDAIDVKEKELKEKLDLDIERKDRSMEEMANEANEYRALFS

SEQ ID NO: 6470 - protein, 156 aa, Zea mays subsp. mays
  peptide (1)..(156): Ceres Seq. ID no. 12343177
MEASYKFGPYKIDAREVFHATPLSYAMVNLRPLLPGHVLVCPKREVKRFADLSSDEISDLWVTAKEVGARLEQYHKASSLTFAIQDGPQAGQTVAHVHIHLIPRKKGDFEKNDEIYDAIDVKEKELKEKLDLDIERKDRSMEEMANEANEYRALFS

SEQ ID NO: 6471 - DNA, 692 bp, Zea mays subsp. mays
  misc_feature (1)..(692): Ceres Seq. ID no. 12401633
  misc_feature (1)..(692): Ortholog of  Ceres SEQ ID NO 14301738 as cited in SEQ ID NO 61201
atcatcgcttgcacttgcagcgtcacaagcaaaccgaagctagtcagtcacacacagctctccagcttccatccacaaagaagaaggaaacaagctaaccatgatgatgagcgccaagaagattgctcatctcgccaagaaatggcagaggatggccgcgcaagggaggaagcgcctcaccttgggggcggcggcggcaaaggaagtcgacgagtgctgcggctctgtggcgagcaagggccattgtgcggtgtacacggccgacggggcacggttcgaggtgccgctggcgtgccttagcacccctgtcttcagggagctcctgcagatgtcacaggaggagttcggcttcgcgggcggcgatggcaggatcacgctgccctgcgacgcggcggtcatggagtacgccatgtgtttgctcaggagaggagcctctgctgagctagagcaggcgttccttagcaccatggccatgtcatgccactgtgccatctacatggcgccgtatgttggacgagccaggcagcagcagatcgttgtttagttagttgctgttccgtgtatgtagacgtgtagtgtagagcaatgattttaactaggtgggtactattattcaaagccttctgatccagcaaccgatcaagtgaggtgttgtaagtacaagagaataaagagatatgattcttgtttcg

SEQ ID NO: 6472 - protein, 147 aa, Zea mays subsp. mays
  peptide (1)..(147): Ceres Seq. ID no. 12401634
MMMSAKKIAHLAKKWQRMAAQGRKRLTLGAAAAKEVDECCGSVASKGHCAVYTADGARFEVPLACLSTPVFRELLQMSQEEFGFAGGDGRITLPCDAAVMEYAMCLLRRGASAELEQAFLSTMAMSCHCAIYMAPYVGRARQQQIVV

SEQ ID NO: 6473 - protein, 146 aa, Zea mays subsp. mays
  peptide (1)..(146): Ceres Seq. ID no. 12401635
MMSAKKIAHLAKKWQRMAAQGRKRLTLGAAAAKEVDECCGSVASKGHCAVYTADGARFEVPLACLSTPVFRELLQMSQEEFGFAGGDGRITLPCDAAVMEYAMCLLRRGASAELEQAFLSTMAMSCHCAIYMAPYVGRARQQQIVV

SEQ ID NO: 6474 - protein, 145 aa, Zea mays subsp. mays
  peptide (1)..(145): Ceres Seq. ID no. 12401636
MSAKKIAHLAKKWQRMAAQGRKRLTLGAAAAKEVDECCGSVASKGHCAVYTADGARFEVPLACLSTPVFRELLQMSQEEFGFAGGDGRITLPCDAAVMEYAMCLLRRGASAELEQAFLSTMAMSCHCAIYMAPYVGRARQQQIVV

SEQ ID NO: 6475 - DNA, 1765 bp, Zea mays subsp. mays
  misc_feature (1)..(1765): Ceres Seq. ID no. 13492636
  misc_feature (1)..(1765): Ortholog of  Ceres SEQ ID NO 14315241 as cited in SEQ ID NO 52516
  misc_feature (1)..(1765): Ortholog of  Ceres SEQ ID NO 13594349 as cited in SEQ ID NO 58161
  misc_feature (1)..(1765): Ortholog of  Ceres SEQ ID NO 13663419 as cited in SEQ ID NO 66561
  misc_feature (1)..(1765): Ortholog of  Ceres SEQ ID NO 15177892 as cited in SEQ ID NO 0
ctccccaaaattctcatctagtcaccggccattccgttgtgtccataggctgtcagtcacttccagtcctagcccactcctccgatgctccaatcatcaacactctctacctgtgtccgtgtgctcttctcctctgcaccaccaaccaaccagtgctgtcctccgccgatccactgacctaccgcgagcgccaatggcgacccgccgcggtcctcgccgccacattagcgctgttcctcggcgccgccgccgcaacggccgcgacggctgcggcggaggcggaccggatcggcaggctgccgggccagccgccggtcaacttctccatgtactccggctacgtcaccgtggacgcggcggcggggcgggccctcttctactggttcatcgaggcggccggcgtgcccgcggagtccgcgccgctcgtgctgtggctcaacggcgggcccgggtgctcctccgtcggctacggcgcgtcagaggagctcggcgccttccggatcaacgccgacggcaggacgctctacttgaacccctacccctggaataaagtggcgaacatgctgttcttggactcgccggccggcgtcggctactcatactccaactccacctccgatctgtacactgccggtgacaacaagacagcccatgactcgtacaatttcttggtgaactggctggagcggtttccacaatacaagcatcgcgatttctacatcacaggagagagctacgcaggccactacgtgcctcagttgtctcagctagtctaccggaacaacaaaggcatcgagaagccgatcctaaacttcaaaggcttcatggttggaaatgcggtaattgacgattaccacgacttcatcggcacattcgagtacttgtggacgcacgggctgatctctgacgaaacctacgagaagctgcggcttgcctgccagttcgacgtatctgagcatgcgtcgaaggagtgcaacaaggtcttcgacatcgccgaggccgaggaaggcaatatcgatgcgtacagcatctacacgccgacttgcaagaagacttcactccacaagcgcaggctaatcagaggaagaacgccctggttgcccagagggtacgatccctgcacggagaagtactccacgaagtactacaacctacctgaggtgcagagagctctacacgccaatgtcaccggaataccgtatccctgggtaacctgcagtgacccagtgtatgatttttggaaagattcaccgaggtccatgcttcctatctaccgtgaactcatcgccgcgggcataaggatatgggttttcagtggcgacgctgattccgttgtcccgctcaccgcgacaaggtactccattgacgccctctttctaccgactatcacgaactggtatccttggtacgacgacgaagaggtcggtgggtggtgccaggtgtacgaggggctgacactggtgacggtccgaggcgcagggcacgaggttcccctgcaccggccgcggcagggcctgaagctgttcgagcacttcctgcggggtgagcccatgcccaggcctgtagatagcgtccagtcgttttagaactggttgctgtctccccgcttggtgaaggaggagacctggctgcgctgcgcattcttgttgctgtaaactcatccgtcacactccgttgttaggatggatttgctgaaaatcagaacataatgttgctcgtttcagtgagcagattgggtatttagcaatgtctcgttttgacagtg

SEQ ID NO: 6476 - protein, 527 aa, Zea mays subsp. mays
  peptide (1)..(527): Ceres Seq. ID no. 13492637
PQNSHLVTGHSVVSIGCQSLPVLAHSSDAPIINTLYLCPCALLLCTTNQPVLSSADPLTYRERQWRPAAVLAATLALFLGAAAATAATAAAEADRIGRLPGQPPVNFSMYSGYVTVDAAAGRALFYWFIEAAGVPAESAPLVLWLNGGPGCSSVGYGASEELGAFRINADGRTLYLNPYPWNKVANMLFLDSPAGVGYSYSNSTSDLYTAGDNKTAHDSYNFLVNWLERFPQYKHRDFYITGESYAGHYVPQLSQLVYRNNKGIEKPILNFKGFMVGNAVIDDYHDFIGTFEYLWTHGLISDETYEKLRLACQFDVSEHASKECNKVFDIAEAEEGNIDAYSIYTPTCKKTSLHKRRLIRGRTPWLPRGYDPCTEKYSTKYYNLPEVQRALHANVTGIPYPWVTCSDPVYDFWKDSPRSMLPIYRELIAAGIRIWVFSGDADSVVPLTATRYSIDALFLPTITNWYPWYDDEEVGGWCQVYEGLTLVTVRGAGHEVPLHRPRQGLKLFEHFLRGEPMPRPVDSVQSF

SEQ ID NO: 6477 - protein, 419 aa, Zea mays subsp. mays
  peptide (1)..(419): Ceres Seq. ID no. 13492638
MYSGYVTVDAAAGRALFYWFIEAAGVPAESAPLVLWLNGGPGCSSVGYGASEELGAFRINADGRTLYLNPYPWNKVANMLFLDSPAGVGYSYSNSTSDLYTAGDNKTAHDSYNFLVNWLERFPQYKHRDFYITGESYAGHYVPQLSQLVYRNNKGIEKPILNFKGFMVGNAVIDDYHDFIGTFEYLWTHGLISDETYEKLRLACQFDVSEHASKECNKVFDIAEAEEGNIDAYSIYTPTCKKTSLHKRRLIRGRTPWLPRGYDPCTEKYSTKYYNLPEVQRALHANVTGIPYPWVTCSDPVYDFWKDSPRSMLPIYRELIAAGIRIWVFSGDADSVVPLTATRYSIDALFLPTITNWYPWYDDEEVGGWCQVYEGLTLVTVRGAGHEVPLHRPRQGLKLFEHFLRGEPMPRPVDSVQSF

SEQ ID NO: 6478 - protein, 341 aa, Zea mays subsp. mays
  peptide (1)..(341): Ceres Seq. ID no. 13492639
MLFLDSPAGVGYSYSNSTSDLYTAGDNKTAHDSYNFLVNWLERFPQYKHRDFYITGESYAGHYVPQLSQLVYRNNKGIEKPILNFKGFMVGNAVIDDYHDFIGTFEYLWTHGLISDETYEKLRLACQFDVSEHASKECNKVFDIAEAEEGNIDAYSIYTPTCKKTSLHKRRLIRGRTPWLPRGYDPCTEKYSTKYYNLPEVQRALHANVTGIPYPWVTCSDPVYDFWKDSPRSMLPIYRELIAAGIRIWVFSGDADSVVPLTATRYSIDALFLPTITNWYPWYDDEEVGGWCQVYEGLTLVTVRGAGHEVPLHRPRQGLKLFEHFLRGEPMPRPVDSVQSF

SEQ ID NO: 6479 - DNA, 1318 bp, Zea mays subsp. mays
  misc_feature (1)..(1318): Ceres Seq. ID no. 12365566
  misc_feature (1)..(1318): Ortholog of  Ceres SEQ ID NO 13596816 as cited in SEQ ID NO 62287
aagcaaccagaaccatacaattcttgccaaagcagaatctatttaacggcgacaacacaaccaaagcgtggcattcttccttccttctttccttcaccaatggccacgagaatagccttgtgtcttctcggccacgtcctcctcgccgtcgcgtcgatggcagtggcggcggcggccggtgacgcgggcaagatcggcatctgccacggccgcgttggcagtaacctcccgccgccgtcggccgccgcggcactgctcaagcggaacgggatcaccaaggcgcggctcttcctgccggacccggccgtgctcccggccttcgccgcggcgggcatcgacctcatggtgggcgtgcccaacgagaacctcaccttcctggccgcggcggggcccgagggcgcggcgcagtggctgcggtccgcggtcctgggcccacgcccccgccgagcgcgtccggtgcctcgccgtcggcaacgaggtgctgtacaacaaccagttctatgcgcctcacctcgtgccggccatgcggaacctgcacgccgcgctcgccaccctggggctggacggcagggtcaaggtctcctccgcgcacgcctcctcggtgctggccgcctcgtacccgccctccgccggcgcgttcgacgccgcctccctccccgtcctccgccccatgctgcggttcctggccgacaccggtgcgcccttcatggtgaacgcctaccctttcatcagccacgtgaacgacccggcgaacgtgcagctcgcgtacgcgctcttcggagcgggcgcggcgccggtgcaggacggcgcgctggtgtacacgaacctgttcgacgccacggtagacgcgctggtggccgcgctggagaaggaggggttcggcggcgtgccggtcgcggtgaccgagaccgggtggccaaccgcggggcacccggccgccaccccgcagaacgccgcagcgtacaacgccaagattgtggagagggcggcgcgcggcgtcggcacgccgaagcggcccggcgtgcccgtggaggtgttcctgttcgacttgtacgacgaggacggcaagcccggccccgagttcgagcgccactttggcatcttcagggcggacggcagtaaggcgtatgacatcaactttgcctagagctggtagtttctggagcgatggacggcttgttgattagtggatcaactggtgtatgctgaagaaaaaatgcctcacatcccctcttgttttacatgtctcgtgactactgtgtcgtttattgatttattatagttgcccacatgcgaagactaataactgattcttagc

SEQ ID NO: 6480 - protein, 373 aa, Zea mays subsp. mays
  peptide (1)..(373): Ceres Seq. ID no. 12365567
KQPEPYNSCQSRIYLTATTQPKRGILPSFFPSPMATRIALCLLGHVLLAVASMAVAAAAGDAGKIGICHGRVGSNLPPPSAAAALLKRNGITKARLFLPDPAVLPAFAAAGIDLMVGVPNENLTFLAAAGPEGAAQWLRSAVLGPRPRRARPVPRRRQRGAVQQPVLCASPRAGHAEPARRARHPGAGRQGQGLLRARLLGAGRLVPALRRRVRRRLPPRPPPHAAVPGRHRCALHGERLPFHQPRERPGERAARVRALRSGRGAGAGRRAGVHEPVRRHGRRAGGRAGEGGVRRRAGRGDRDRVANRGAPGRHPAERRSVQRQDCGEGGARRRHAEAARRARGGVPVRLVRRGRQARPRVRAPLWHLQGGRQ

SEQ ID NO: 6481 - protein, 340 aa, Zea mays subsp. mays
  peptide (1)..(340): Ceres Seq. ID no. 12365568
MATRIALCLLGHVLLAVASMAVAAAAGDAGKIGICHGRVGSNLPPPSAAAALLKRNGITKARLFLPDPAVLPAFAAAGIDLMVGVPNENLTFLAAAGPEGAAQWLRSAVLGPRPRRARPVPRRRQRGAVQQPVLCASPRAGHAEPARRARHPGAGRQGQGLLRARLLGAGRLVPALRRRVRRRLPPRPPPHAAVPGRHRCALHGERLPFHQPRERPGERAARVRALRSGRGAGAGRRAGVHEPVRRHGRRAGGRAGEGGVRRRAGRGDRDRVANRGAPGRHPAERRSVQRQDCGEGGARRRHAEAARRARGGVPVRLVRRGRQARPRVRAPLWHLQGGRQ

SEQ ID NO: 6482 - protein, 321 aa, Zea mays subsp. mays
  peptide (1)..(321): Ceres Seq. ID no. 12365569
MAVAAAAGDAGKIGICHGRVGSNLPPPSAAAALLKRNGITKARLFLPDPAVLPAFAAAGIDLMVGVPNENLTFLAAAGPEGAAQWLRSAVLGPRPRRARPVPRRRQRGAVQQPVLCASPRAGHAEPARRARHPGAGRQGQGLLRARLLGAGRLVPALRRRVRRRLPPRPPPHAAVPGRHRCALHGERLPFHQPRERPGERAARVRALRSGRGAGAGRRAGVHEPVRRHGRRAGGRAGEGGVRRRAGRGDRDRVANRGAPGRHPAERRSVQRQDCGEGGARRRHAEAARRARGGVPVRLVRRGRQARPRVRAPLWHLQGGRQ

SEQ ID NO: 6483 - DNA, 1287 bp, Zea mays subsp. mays
  misc_feature (1)..(1287): Ceres Seq. ID no. 12403690
  misc_feature (1)..(1287): Ortholog of  Ceres SEQ ID NO 14308120 as cited in SEQ ID NO 58423
  misc_feature (1)..(1287): Ortholog of  Ceres SEQ ID NO 15169380 as cited in SEQ ID NO 58483
  misc_feature (1)..(1287): Ortholog of  Ceres SEQ ID NO 15177787 as cited in SEQ ID NO 59431
  misc_feature (1)..(1287): Ortholog of  Ceres SEQ ID NO 12617197 as cited in SEQ ID NO 63406
  misc_feature (1)..(1287): Ortholog of  Ceres SEQ ID NO 13597804 as cited in SEQ ID NO 64182
  misc_feature (1)..(1287): Ortholog of  Ceres SEQ ID NO 14301622 as cited in SEQ ID NO 65156
  misc_feature (1)..(1287): Ortholog of  Ceres SEQ ID NO 13596284 as cited in SEQ ID NO 68273
aaacacccagtggttcaggctggccaaagttatgagttatctgccctgtcctcccaaactaatctagtcccaggaaactaatttcaacacacaactggacgacggtgcgttgcgttggtggccgccggcgacgatgtcgtcgtccgcgggcgacaagaggaagaagacggcgtgcgtgaccggagggaacgggtacatcggctccgcgctcatcaagatgctgctggaggacggatacgccgtcaagacgacggtcaggaacccagacgacatggacaagaactcccacctcaagggcctgcagcagctcgggccgctgacggtcctccgcggcgacatggacgaggagggcagcttcgacgacgccgtcgccggctgcgactacgtcttcctcgtcgccgcaccggtgaacctcgcagcacaggatccagagaaagagcagatcgagccgtccgtccgaggcacgctgaacgcgatgaggtcgtgcgcgaaggccgggacggtgcggcgcgtgatcctgacctcgtcggtggccggagtctacatcaggccggacctgctgcaactgcgaggcgacgggcacgtgctggacgaggagtcctggtccgacgtcgagtacctcagagccaacaggccaccgacctgggggtactgcgtgtcgaaggtgctcctcgagaaggaggcgtgcaggttcgcgggcgagcacggcatcagcctggtcaccgtctgccccgtcatcaccgtgggcgcggcgccggcgcccaaggtccgcacgagcatcatcgacagcctctccatgctgtccggcgacgagcgagggctcgccgtgctcaaaggcatcgagaagacctccggcgcggtgcagctggtccacgtcgacgacctctgccgcgccgagctgttcctggcagaggcggcggcggccgacgggaggtacatctgctgcggcctcaacacgaccgtcctcgagctcgcgcgtttcctggcacacaagtacccgcagtacggcgtgaaaacaaacctccacgacgatgaacagcagctactcgagaagccgagggtgaaggtgtcgtcggagaagctcgtccgggaagggtttgagtacaggcacaacacgctggacgagatctacgacaatgtggtcgagtacgtcaaggcgttagggattctgccctactgatacttagatgcccgagcttaattaagtaggagggcagcatatatgttgtcggacatatacgagtcttggaaagtacttaaataatttatggacatatttttcattgg

SEQ ID NO: 6484 - protein, 348 aa, Zea mays subsp. mays
  peptide (1)..(348): Ceres Seq. ID no. 12403691
MSSSAGDKRKKTACVTGGNGYIGSALIKMLLEDGYAVKTTVRNPDDMDKNSHLKGLQQLGPLTVLRGDMDEEGSFDDAVAGCDYVFLVAAPVNLAAQDPEKEQIEPSVRGTLNAMRSCAKAGTVRRVILTSSVAGVYIRPDLLQLRGDGHVLDEESWSDVEYLRANRPPTWGYCVSKVLLEKEACRFAGEHGISLVTVCPVITVGAAPAPKVRTSIIDSLSMLSGDERGLAVLKGIEKTSGAVQLVHVDDLCRAELFLAEAAAADGRYICCGLNTTVLELARFLAHKYPQYGVKTNLHDDEQQLLEKPRVKVSSEKLVREGFEYRHNTLDEIYDNVVEYVKALGILPY

SEQ ID NO: 6485 - protein, 320 aa, Zea mays subsp. mays
  peptide (1)..(320): Ceres Seq. ID no. 12403692
MLLEDGYAVKTTVRNPDDMDKNSHLKGLQQLGPLTVLRGDMDEEGSFDDAVAGCDYVFLVAAPVNLAAQDPEKEQIEPSVRGTLNAMRSCAKAGTVRRVILTSSVAGVYIRPDLLQLRGDGHVLDEESWSDVEYLRANRPPTWGYCVSKVLLEKEACRFAGEHGISLVTVCPVITVGAAPAPKVRTSIIDSLSMLSGDERGLAVLKGIEKTSGAVQLVHVDDLCRAELFLAEAAAADGRYICCGLNTTVLELARFLAHKYPQYGVKTNLHDDEQQLLEKPRVKVSSEKLVREGFEYRHNTLDEIYDNVVEYVKALGILPY

SEQ ID NO: 6486 - protein, 302 aa, Zea mays subsp. mays
  peptide (1)..(302): Ceres Seq. ID no. 12403693
MDKNSHLKGLQQLGPLTVLRGDMDEEGSFDDAVAGCDYVFLVAAPVNLAAQDPEKEQIEPSVRGTLNAMRSCAKAGTVRRVILTSSVAGVYIRPDLLQLRGDGHVLDEESWSDVEYLRANRPPTWGYCVSKVLLEKEACRFAGEHGISLVTVCPVITVGAAPAPKVRTSIIDSLSMLSGDERGLAVLKGIEKTSGAVQLVHVDDLCRAELFLAEAAAADGRYICCGLNTTVLELARFLAHKYPQYGVKTNLHDDEQQLLEKPRVKVSSEKLVREGFEYRHNTLDEIYDNVVEYVKALGILPY

SEQ ID NO: 6487 - DNA, 1190 bp, Zea mays subsp. mays
  misc_feature (1)..(1190): Ceres Seq. ID no. 12351164
  misc_feature (1)..(1190): Ortholog of  Ceres SEQ ID NO 13594298 as cited in SEQ ID NO 57803
  misc_feature (1)..(1190): Ortholog of  Ceres SEQ ID NO 14301894 as cited in SEQ ID NO 61677
  misc_feature (1)..(1190): Ortholog of  Ceres SEQ ID NO 12578438 as cited in SEQ ID NO 62201
agaaccacagaccaagaagtgccctccactttgtaagctcgtttccgaaaagagctctagagccgccacacacacacacaccatggcaccgcgttctctgctggcagtgctcgccgtcgccgccctcgcgctcttgcacgccgcctcggccaagtcgtcgtggcttgacaggaggttcaccacggacggcaccgtccgcacgggatacgacgattcgggccagcaggtggtgatgctccgcctcgaccagcactccggcgctgccggcttcaactccaaggagcagtacctttacggcgagttcagcgtcgagatgaagctcatccgggggaactccgccggcaccgtctcgtgcttctacctctcttccggcgacggcgacgggtcgcgacgagatcgacatggagttcatgggcaactcgagcggggcagccggtggtgctgaacaccaacgtgtgggccagcggcgacggcaagaaggagcaccagttcgacctctggttcgacccctccgccgactaccacacctacaccatcatctggaacccgaccaacatcctgttcaaggtcgacgacctcttcatccgctccttcaagcgctacgccgacctgccgtacccgagctccaggcccatgacgctgcacgccacgctgtgggacggcagctactgggccaccgagaagggcagggtcggcatcgactggtccgacgcgcccttcgtcgtctcctaccgcagctactacgccagcgcctgcgtcagcggcggcgcgtgccgggccgccggcagcggcgggtggatgaacaggcagcttgacagcgccgagtggggcaccgtcaggtgggcggagcgcaacttcatgcgctacaactactgccaggatgggtggaggttcccgcaaggactccccgccgagtgcgcccgccactgatatgcgtccgccggttaattcttcgtcgacgatccagcttggcgtcgtttgttctttgttttgttgggtattcttttttttctacgggtatatgattcttgctcttctttgtggatttgtgattaaaaagcagccctgcagcttgcaacgtgtgggcggttgttgtacaccttgcttttcctaaaccgaagcatgtattttatttttaatcgtgcctttggacgatacaggcatgcagcatatatagtatttacgtacgc

SEQ ID NO: 6488 - protein, 147 aa, Zea mays subsp. mays
  peptide (1)..(147): Ceres Seq. ID no. 12351165
EPQTKKCPPLCKLVSEKSSRAATHTHTMAPRSLLAVLAVAALALLHAASAKSSWLDRRFTTDGTVRTGYDDSGQQVVMLRLDQHSGAAGFNSKEQYLYGEFSVEMKLIRGNSAGTVSCFYLSSGDGDGSRRDRHGVHGQLERGSRWC

SEQ ID NO: 6489 - protein, 137 aa, Zea mays subsp. mays
  peptide (1)..(137): Ceres Seq. ID no. 12351166
MEFMGNSSGAAGGAEHQRVGQRRRQEGAPVRPLVRPLRRLPHLHHHLEPDQHPVQGRRPLHPLLQALRRPAVPELQAHDAARHAVGRQLLGHREGQGRHRLVRRALRRLLPQLLRQRLRQRRRVPGRRQRRVDEQAA

SEQ ID NO: 6490 - protein, 134 aa, Zea mays subsp. mays
  peptide (1)..(134): Ceres Seq. ID no. 12351167
MGNSSGAAGGAEHQRVGQRRRQEGAPVRPLVRPLRRLPHLHHHLEPDQHPVQGRRPLHPLLQALRRPAVPELQAHDAARHAVGRQLLGHREGQGRHRLVRRALRRLLPQLLRQRLRQRRRVPGRRQRRVDEQAA

SEQ ID NO: 6491 - protein, 120 aa, Zea mays subsp. mays
  peptide (1)..(120): Ceres Seq. ID no. 12351168
MAPRSLLAVLAVAALALLHAASAKSSWLDRRFTTDGTVRTGYDDSGQQVVMLRLDQHSGAAGFNSKEQYLYGEFSVEMKLIRGNSAGTVSCFYLSSGDGDGSRRDRHGVHGQLERGSRWC

SEQ ID NO: 6492 - DNA, 1035 bp, Zea mays subsp. mays
  misc_feature (1)..(1035): Ceres Seq. ID no. 12403456
  misc_feature (1)..(1035): Ortholog of  Ceres SEQ ID NO 14313662 as cited in SEQ ID NO 54162
  misc_feature (1)..(1035): Ortholog of  Ceres SEQ ID NO 14302123 as cited in SEQ ID NO 0
  misc_feature (1)..(1035): Ortholog of  Ceres SEQ ID NO 15179452 as cited in SEQ ID NO 0
aacatataaattacgtgctccctcttcgccgccgtctctcgcgccgccacttccctcccgacccactcgcccaaaaccgtagcgccctcgcctgctcgccgccgccgtcgttgcgagctccccatcttcctccgttaaccatggcgacccagatcagcaagaagaagaagttcgtcagcgacggcgtgttctacgccgagctcaatgagatgctgacgcgggagctcgcggaggacggctactccggcgtggaggtgcgtgtcacaccgatgcgcacggagatcatcatccgcgcaacgcgcacgcagaacgtgctcggcgagaagggccgcaggatcagggagctcacgtctgtggtccagaagaggttcaacttccccgagaacggcgtcgagctctacgccgagaaggtcgtcaaccgcggcctctgcgccatcgcgcaggctgagtccctccgctacaagctcctcggaggccttgccgtccggagggcctgctatggtgttcttcgctttgttatggagagtggtgccgagggttgtgaggtcattgtgagtggaaagctcagggctcaaagagccaagtccatgaagttcaaggatggctacatgatctcatctggtcagccagtgaatgagtacatcgactcagctgtgagacacgtcctcctcagacagggtgttctgggtatcaaggtgaagatcatgcttgactgggacccgaagggcaaggttggcccgatcacccctcttccggacctggtgaccatccataccccgaaggaggaggacgagctgcgccctcctgtcttggcagctgaggtctaaggtcccaacagcgtcctcgaaatggcagtttgatcgggtcctagctaggtttgatcttatgataagggcagtgctaagacagttcgttccgtgtcacttctgtttaaaattaagttttgccgagacaagctatatgtaccggatgaaagtgtggttccttattgtatgctctggaattttatttttggtatgtttatttttttgccct

SEQ ID NO: 6493 - protein, 274 aa, Zea mays subsp. mays
  peptide (1)..(274): Ceres Seq. ID no. 12403457
HINYVLPLRRRLSRRHFPPDPLAQNRSALACSPPPSLRAPHLPPLTMATQISKKKKFVSDGVFYAELNEMLTRELAEDGYSGVEVRVTPMRTEIIIRATRTQNVLGEKGRRIRELTSVVQKRFNFPENGVELYAEKVVNRGLCAIAQAESLRYKLLGGLAVRRACYGVLRFVMESGAEGCEVIVSGKLRAQRAKSMKFKDGYMISSGQPVNEYIDSAVRHVLLRQGVLGIKVKIMLDWDPKGKVGPITPLPDLVTIHTPKEEDELRPPVLAAEV

SEQ ID NO: 6494 - protein, 228 aa, Zea mays subsp. mays
  peptide (1)..(228): Ceres Seq. ID no. 12403458
MATQISKKKKFVSDGVFYAELNEMLTRELAEDGYSGVEVRVTPMRTEIIIRATRTQNVLGEKGRRIRELTSVVQKRFNFPENGVELYAEKVVNRGLCAIAQAESLRYKLLGGLAVRRACYGVLRFVMESGAEGCEVIVSGKLRAQRAKSMKFKDGYMISSGQPVNEYIDSAVRHVLLRQGVLGIKVKIMLDWDPKGKVGPITPLPDLVTIHTPKEEDELRPPVLAAEV

SEQ ID NO: 6495 - protein, 205 aa, Zea mays subsp. mays
  peptide (1)..(205): Ceres Seq. ID no. 12403459
MLTRELAEDGYSGVEVRVTPMRTEIIIRATRTQNVLGEKGRRIRELTSVVQKRFNFPENGVELYAEKVVNRGLCAIAQAESLRYKLLGGLAVRRACYGVLRFVMESGAEGCEVIVSGKLRAQRAKSMKFKDGYMISSGQPVNEYIDSAVRHVLLRQGVLGIKVKIMLDWDPKGKVGPITPLPDLVTIHTPKEEDELRPPVLAAEV

SEQ ID NO: 6496 - DNA, 1491 bp, Zea mays subsp. mays
  misc_feature (1)..(1491): Ceres Seq. ID no. 12408460
  misc_feature (1)..(1491): Ortholog of  Ceres SEQ ID NO 15174669 as cited in SEQ ID NO 59656
accaccagtagtcctactggtccttgacgtccgtggccactcaggttgtgttctcggagttctttcgccgggtggggaggcggagtgcgcggtcgaggaaggccttagcggtcgatcgatcggcgccgcgcttgactgcctgtacatgaggagcggctgcggcggcggcggagggagacaacctggggaaggaggcgggggaggcgctggggctgctgggctgcgtcaatgaggtggtggcggcggtggcggccacgtgggggcccatgaccgacggcgcgcgcgtcgagacggcgcccaggctcgcccaatggcgcgtcgacccgctcccctgctacacctaccgcaagtcactccccttcctcatcggcctctggaactggtgcatatctgtggagagaaataacaagcaaacctgtgttaagctctttgcagagaatacaagttctctcaagaacggttcctcagccccaatagcttcctttatcgccaaacttattgtatctcttccacctaatcagcagaccatagtccacccaggaatttttgacaaacagctgaaatacgacggttttgtgtggacaatcgatagcaccgtcactgggaggtttgtgattgagatagagtttcttgacctgaaggtcgctgatccgtctggcggcgagccggcctcgatttgggcctcccgccaggtcaagcagtgctcggatagcacggccctgtcgtccctggctcggatgctgcacgaggacgtcctcaccgacatcaccatcaacgcggcggacggcagcgtgggcgcgcaccgcgcggtcctggcgacgcggtcgccggtgttccggagcatgttctcgcacgacctgagggagaaggagctctccaccgtggacatcaccgacatgtccctggacgcgtgccgcgccttcctcagctacatctacggcgacgtgcgcggcggcgaggagttcctggcgaaccggctggcgctcctccgcgccgccgacaagtacgacatcggcgacctcagggaggcctgccacgagagcctgctggaagacatcgacgcgcgcaacgtgctggagcggctgcagacggcgcacctgtaccggctgccgaggctcaagggcggctgcctgaggttccttgtggacttcaggaaggtgtacgagatgcacgacgacgacctcaacgcgttcctgcagacggccgacagggaactcgtggccgaggtgttccatggcgttcttgccgcgtggagcgggcggtaagccgggcgcatgccatggcactgccgctctgctgcaggtgttgcacatctggttggttcagttcgtcacaactcagaagcgttgtttgcaactgcaggattcttgctgggaaagcgtgtaaatatttgcaactgtacatgcgtgccagtggttggtctaaaatttactgtgcatgccttgattggattttgttcctatgatgtggaaatcagctcatatgctgctc

SEQ ID NO: 6497 - protein, 332 aa, Zea mays subsp. mays
  peptide (1)..(332): Ceres Seq. ID no. 12408461
MTDGARVETAPRLAQWRVDPLPCYTYRKSLPFLIGLWNWCISVERNNKQTCVKLFAENTSSLKNGSSAPIASFIAKLIVSLPPNQQTIVHPGIFDKQLKYDGFVWTIDSTVTGRFVIEIEFLDLKVADPSGGEPASIWASRQVKQCSDSTALSSLARMLHEDVLTDITINAADGSVGAHRAVLATRSPVFRSMFSHDLREKELSTVDITDMSLDACRAFLSYIYGDVRGGEEFLANRLALLRAADKYDIGDLREACHESLLEDIDARNVLERLQTAHLYRLPRLKGGCLRFLVDFRKVYEMHDDDLNAFLQTADRELVAEVFHGVLAAWSGR

SEQ ID NO: 6498 - protein, 175 aa, Zea mays subsp. mays
  peptide (1)..(175): Ceres Seq. ID no. 12408462
MLHEDVLTDITINAADGSVGAHRAVLATRSPVFRSMFSHDLREKELSTVDITDMSLDACRAFLSYIYGDVRGGEEFLANRLALLRAADKYDIGDLREACHESLLEDIDARNVLERLQTAHLYRLPRLKGGCLRFLVDFRKVYEMHDDDLNAFLQTADRELVAEVFHGVLAAWSGR

SEQ ID NO: 6499 - DNA, 1765 bp, Zea mays subsp. mays; identical to SEQ ID NO: 6475
  misc_feature (1)..(1765): Ceres Seq. ID no. 13492636
  misc_feature (1)..(1765): Ortholog of  Ceres SEQ ID NO 14315241 as cited in SEQ ID NO 52516
  misc_feature (1)..(1765): Ortholog of  Ceres SEQ ID NO 13594349 as cited in SEQ ID NO 58161
  misc_feature (1)..(1765): Ortholog of  Ceres SEQ ID NO 13663419 as cited in SEQ ID NO 66561
  misc_feature (1)..(1765): Ortholog of  Ceres SEQ ID NO 15177892 as cited in SEQ ID NO 0

SEQ ID NO: 6500 - protein, 527 aa, Zea mays subsp. mays; identical to SEQ ID NO: 6476
  peptide (1)..(527): Ceres Seq. ID no. 13492637

SEQ ID NO: 6501 - protein, 419 aa, Zea mays subsp. mays; identical to SEQ ID NO: 6477
  peptide (1)..(419): Ceres Seq. ID no. 13492638

SEQ ID NO: 6502 - protein, 341 aa, Zea mays subsp. mays; identical to SEQ ID NO: 6478
  peptide (1)..(341): Ceres Seq. ID no. 13492639

SEQ ID NO: 6503 - DNA, 1449 bp, Zea mays subsp. mays
  misc_feature (1)..(1449): Ceres Seq. ID no. 12353868
  misc_feature (1)..(1449): Ortholog of  Ceres SEQ ID NO 15177079 as cited in SEQ ID NO 51989
  misc_feature (1)..(1449): Ortholog of  Ceres SEQ ID NO 14315354 as cited in SEQ ID NO 58232
  misc_feature (1)..(1449): Ortholog of  Ceres SEQ ID NO 13596392 as cited in SEQ ID NO 62136
  misc_feature (1)..(1449): Ortholog of  Ceres SEQ ID NO 15226223 as cited in SEQ ID NO 65500
  misc_feature (1)..(1449): Ortholog of  Ceres SEQ ID NO 14313244 as cited in SEQ ID NO 66802
  misc_feature (1)..(1449): Ortholog of  Ceres SEQ ID NO 13654360 as cited in SEQ ID NO 67980
  misc_feature (1)..(1449): Ortholog of  Ceres SEQ ID NO 13596394 as cited in SEQ ID NO 68561
ttttttttctactcccgcgcccctccgcgagctccctacccctcgcgctcacgccggcgacaagtttccgccagagttaggtagatcaggtgctgcgccggcagccgtggaagggatggaggacctcgcgagttcgcgtggcggcgggggatgcggtggtcttgatgcgcagatcgaacagctcatggagtgccgcccgctcccagagacggaggttaaaacactgtgtgagaaggccaaggagatattaatggaggaaagcaatgttcagccagttaaaagccctgtgacgatttgtggtgatattcatggccaattccatgatcttttagaacttttccggattggtgggaagtgtccagatacaaattatttgtttatgggtgattatgtggatcgtggctattactctgttgagacagtaacgcttttagttgcacttaaggtgcggtacccgcaacgcattacaattcttcgtggaaaccatgaaagtaggcagatcacacaggtgtatggcttctatgatgaatgcctacgaaaatatggcagtgcaaatgtctggaagatcttcactgatctttttgattattttccgttgacagcattggtggaatcagaaattttctgcctccatggtggtttatctccatccattgagaatcttgataacgttcgcagtttagaccgtgtccaagaggtccctcatgagggacctatgtgcgaccttctgtggtctgatccagacgatagatgtggctggggcatatctccacgtggtgctggatacacttttggccaagacatatcggagcagtttaatcacaccaacaatcttaaactcgtagctcgggctcaccagttggttatggagggatacaactgggcacatgaacaaaaggtggtgaccatattcagcgcacctaactactgttaccggtgcggcaacatggcgtccatcctcgaggtcgatgactgcaggaatcacacatttattcagtttgagccagctcctaggagaggtgaaccagacgtgacgcggaggacacctgattatttcctttgagttatctgccagaccatttttggaatttgcccaatgttggaatagtgatgctagccagtaacaatttttgttggatctatatgataacttaaccgaccagcaacagtaagaaaatgtggaagctgcatctgtcattgcaagaggtgctcgctaacagtaacaggtcgacgacctatacaccccaagctgtcaaaagatccgcttgtctacccaacccaccaagtggtgcctcccttgggctttgggacgtcgagtttacgctttcagcgtagagttgcctcagttctgtcttgtgtgtcagctagttttgtgtttgtgtcttgtgtggttgctcgttgtagcttctgtgattaaatgacaacagacaagctggtctcgagtgttgc

SEQ ID NO: 6504 - protein, 353 aa, Zea mays subsp. mays
  peptide (1)..(353): Ceres Seq. ID no. 12353869
FFSTPAPLRELPTPRAHAGDKFPPELGRSGAAPAAVEGMEDLASSRGGGGCGGLDAQIEQLMECRPLPETEVKTLCEKAKEILMEESNVQPVKSPVTICGDIHGQFHDLLELFRIGGKCPDTNYLFMGDYVDRGYYSVETVTLLVALKVRYPQRITILRGNHESRQITQVYGFYDECLRKYGSANVWKIFTDLFDYFPLTALVESEIFCLHGGLSPSIENLDNVRSLDRVQEVPHEGPMCDLLWSDPDDRCGWGISPRGAGYTFGQDISEQFNHTNNLKLVARAHQLVMEGYNWAHEQKVVTIFSAPNYCYRCGNMASILEVDDCRNHTFIQFEPAPRRGEPDVTRRTPDYFL

SEQ ID NO: 6505 - protein, 315 aa, Zea mays subsp. mays
  peptide (1)..(315): Ceres Seq. ID no. 12353870
MEDLASSRGGGGCGGLDAQIEQLMECRPLPETEVKTLCEKAKEILMEESNVQPVKSPVTICGDIHGQFHDLLELFRIGGKCPDTNYLFMGDYVDRGYYSVETVTLLVALKVRYPQRITILRGNHESRQITQVYGFYDECLRKYGSANVWKIFTDLFDYFPLTALVESEIFCLHGGLSPSIENLDNVRSLDRVQEVPHEGPMCDLLWSDPDDRCGWGISPRGAGYTFGQDISEQFNHTNNLKLVARAHQLVMEGYNWAHEQKVVTIFSAPNYCYRCGNMASILEVDDCRNHTFIQFEPAPRRGEPDVTRRTPDYFL

SEQ ID NO: 6506 - protein, 292 aa, Zea mays subsp. mays
  peptide (1)..(292): Ceres Seq. ID no. 12353871
MECRPLPETEVKTLCEKAKEILMEESNVQPVKSPVTICGDIHGQFHDLLELFRIGGKCPDTNYLFMGDYVDRGYYSVETVTLLVALKVRYPQRITILRGNHESRQITQVYGFYDECLRKYGSANVWKIFTDLFDYFPLTALVESEIFCLHGGLSPSIENLDNVRSLDRVQEVPHEGPMCDLLWSDPDDRCGWGISPRGAGYTFGQDISEQFNHTNNLKLVARAHQLVMEGYNWAHEQKVVTIFSAPNYCYRCGNMASILEVDDCRNHTFIQFEPAPRRGEPDVTRRTPDYFL

SEQ ID NO: 6507 - DNA, 749 bp, Zea mays subsp. mays
  misc_feature (1)..(749): Ceres Seq. ID no. 12344461
  misc_feature (1)..(749): Ortholog of  Ceres SEQ ID NO 14309686 as cited in SEQ ID NO 58523
atctcttctttcccctctccctcccctcgccgtcgctgtcgtcgccgtccgtgctagccatggatctaggcgctcccgctcgacggcgcttaccgatccgcctcttgctggtgtcgctcgccgtcctcatggtcctcaccgcgcgttccagtgccgaagtcatcaccctcaccgaagagaccttctccgacaagataaaggagaaggacacggtgtggtttgtgcagttctgcgtcccctggtgtaaacactgcaagaaccttggaacactatgggaggacctgggaaaggttatggaaggtgcggatgaaattgagattgggcaagttgactgtggtgtcagcaaaccagtatgctcaaaggtcgatatacactcctacccaacattcaaggtgttttatgaaggcgaagaagtagtaaaatataaaggacctaggaatgtggaatcgctgaagaacttcgtgttgaatgaagctgagaaagcaggtgaggcaaagcttcaagctgattgaggcaggggagtttcagcaagcatgtggcgtagacaaggaacaatgctgtgcaacattgtcttctatcctgtcatttacaaagccaatttacaggaaagaaatgatcttatgaccccgtatcagagtattcctcttcgaaagtaactccgaatcagttcatagaagctgtactccattccatagtttttatcacattgacaaactccgaatcagttaatagaagctgtactccattcg

SEQ ID NO: 6508 - protein, 169 aa, Zea mays subsp. mays
  peptide (1)..(169): Ceres Seq. ID no. 12344462
LFFPLSLPSPSLSSPSVLAMDLGAPARRRLPIRLLLVSLAVLMVLTARSSAEVITLTEETFSDKIKEKDTVWFVQFCVPWCKHCKNLGTLWEDLGKVMEGADEIEIGQVDCGVSKPVCSKVDIHSYPTFKVFYEGEEVVKYKGPRNVESLKNFVLNEAEKAGEAKLQAD

SEQ ID NO: 6509 - protein, 150 aa, Zea mays subsp. mays
  peptide (1)..(150): Ceres Seq. ID no. 12344463
MDLGAPARRRLPIRLLLVSLAVLMVLTARSSAEVITLTEETFSDKIKEKDTVWFVQFCVPWCKHCKNLGTLWEDLGKVMEGADEIEIGQVDCGVSKPVCSKVDIHSYPTFKVFYEGEEVVKYKGPRNVESLKNFVLNEAEKAGEAKLQAD

SEQ ID NO: 6510 - protein, 127 aa, Zea mays subsp. mays
  peptide (1)..(127): Ceres Seq. ID no. 12344464
MVLTARSSAEVITLTEETFSDKIKEKDTVWFVQFCVPWCKHCKNLGTLWEDLGKVMEGADEIEIGQVDCGVSKPVCSKVDIHSYPTFKVFYEGEEVVKYKGPRNVESLKNFVLNEAEKAGEAKLQAD

SEQ ID NO: 6511 - DNA, 1319 bp, Zea mays subsp. mays
  misc_feature (1)..(1319): Ceres Seq. ID no. 12594090
  misc_feature (1)..(1319): Ortholog of  Ceres SEQ ID NO 15175666 as cited in SEQ ID NO 54985
  misc_feature (1)..(1319): Ortholog of  Ceres SEQ ID NO 14310460 as cited in SEQ ID NO 55105
  misc_feature (1)..(1319): Ortholog of  Ceres SEQ ID NO 13597740 as cited in SEQ ID NO 64482
  misc_feature (1)..(1319): Ortholog of  Ceres SEQ ID NO 15179888 as cited in SEQ ID NO 66879
  misc_feature (1)..(1319): Ortholog of  Ceres SEQ ID NO 13596056 as cited in SEQ ID NO 68307
  misc_feature (1)..(1319): Ortholog of  Ceres SEQ ID NO 12388689 as cited in SEQ ID NO 0
atcaatcctccggacctccgtcctttataaaccgccggggagcgtggcggccattcgacgcaggcaccccagcagctcttgcggtcgtccctcagccgcgtcgcaccgcatcgcattctacgattcgaagctctctgctcgcaggggaccatggcgaagaactacccaaccgtgagcgccgagtacagcgaggccgtcgagaaggccaggcgcaagctccgcgccctcatcgccgagaagagctgcgcacccctcatgctccgcctcgcgtggcactccgcggggacgttcgacgtgtcgtcgaggaccggcggtcccttcggtactatgaagtgcccggcggaactggctcacggcgccaacgcggggctggacatcgcggtgcggctgctcgagcccatcaaggaggagttccccaccctctcctatgccgacttctaccagcttgccggagttgtggccgtcgaggtcaccggtgggcctgagatccccttccacccaggcagggaggacaagcctcagccgccacctgagggccgtcttcctgatgccaccaagggttctgaccacctgaggcaagtctttggcaagcagatgggtttgagtgatcaggacatcgttgccctctctggtggccacaccttgggaaggtgccacaaagagcggtctggttttgagggtgcctggactacgaaccctttggtctttgacaactcttacttcaaggaacttctgagtggtgacaaggagggccttcttcagctcccaagtgacaaagccctgctgagcgaccctgtcttccgccctcttgtggagaaatatgctgcagatgagaaggcattctttgatgactacaaagaggcccacctcaagctctccgaactggggtatgctgatgcttaaatggtccatatcctggagcgggacacaaactgctgcctgtatggactcgtgcgattcagggtgaaccatcagattgtctagtgtcttctctgtaataaatttatctgttcttggtactttgtctatggttgaatcggaacccattttccgtttgcctagattcttaatttctggtgctgtatccagctgaaactagtagatctatgatcttgtggctgcagcatgttcttgtcacttaccttttatctggtctccgttggttcggttcacaggttgtgtgctttaaaaggctgtgcttaagtcctgcaattcgagtccaccaaactgtagggtgcaagtcgagattttattagtgatgcaagttgctggtattggtgcattatcgggctaatacgcttgcgttgccttcggatttt

SEQ ID NO: 6512 - protein, 250 aa, Zea mays subsp. mays
  peptide (1)..(250): Ceres Seq. ID no. 12594091
MAKNYPTVSAEYSEAVEKARRKLRALIAEKSCAPLMLRLAWHSAGTFDVSSRTGGPFGTMKCPAELAHGANAGLDIAVRLLEPIKEEFPTLSYADFYQLAGVVAVEVTGGPEIPFHPGREDKPQPPPEGRLPDATKGSDHLRQVFGKQMGLSDQDIVALSGGHTLGRCHKERSGFEGAWTTNPLVFDNSYFKELLSGDKEGLLQLPSDKALLSDPVFRPLVEKYAADEKAFFDDYKEAHLKLSELGYADA

SEQ ID NO: 6513 - protein, 215 aa, Zea mays subsp. mays
  peptide (1)..(215): Ceres Seq. ID no. 12594092
MLRLAWHSAGTFDVSSRTGGPFGTMKCPAELAHGANAGLDIAVRLLEPIKEEFPTLSYADFYQLAGVVAVEVTGGPEIPFHPGREDKPQPPPEGRLPDATKGSDHLRQVFGKQMGLSDQDIVALSGGHTLGRCHKERSGFEGAWTTNPLVFDNSYFKELLSGDKEGLLQLPSDKALLSDPVFRPLVEKYAADEKAFFDDYKEAHLKLSELGYADA

SEQ ID NO: 6514 - protein, 191 aa, Zea mays subsp. mays
  peptide (1)..(191): Ceres Seq. ID no. 12594093
MKCPAELAHGANAGLDIAVRLLEPIKEEFPTLSYADFYQLAGVVAVEVTGGPEIPFHPGREDKPQPPPEGRLPDATKGSDHLRQVFGKQMGLSDQDIVALSGGHTLGRCHKERSGFEGAWTTNPLVFDNSYFKELLSGDKEGLLQLPSDKALLSDPVFRPLVEKYAADEKAFFDDYKEAHLKLSELGYADA

SEQ ID NO: 6515 - DNA, 1825 bp, Zea mays subsp. mays
  misc_feature (1)..(1825): Ceres Seq. ID no. 12367918
  misc_feature (1)..(1825): Ortholog of  Ceres SEQ ID NO 12613725 as cited in SEQ ID NO 68196
accacacacgcgcgcagctgtggcgcagggggggcgcggcaatggacgccaacactctcctcctgccctgctccgacggcgccgtcgccggcgcggtggacttccgcgggcgccccgcgtcccggtccggcaccggccgatggtccgccgcgatgttcgtcctcggggtggagatagcggagaggttcgcgtaccacggggtgtcggcgaacctgatcagctacctgacggggccgctcggggaatccaccgcgggcgcggcggctgcgatcaacgcgtggagcggggtgtcgaccatgctgccgctgctgatggcgtgtgtggccgacgcctggctcgggcggtaccgcaccatcgtcctcgcctccctcctcttcgtcgtgagcatgggcatgctgaccgtctccgcgctcccggcgttccaccacgacggctgcagcagctacgcctccgcctccagaccgctggcctgctccccgccccccgtgcaagtgggcgtcttctacgtctccctgtacctggtggcgctcgcggaggccgggcacaagccctgcgcgcaggcgttcggcgcggaccagttcgaccagaacgaccccaaggagtccgcgtccaggagctccttcttcaactggtggtacttcggcatgtgctccggcaccgccgtcaccaccctggtgtccagctacatccaggacaacgtcggctggggcctcggcttcggcgtcccctgcctcgtcatgctcttcgcgctcctcatgttcttgctcggtaccaggaattaccgctactacacgtctactgaatcgagcccatttgctcgcctcgccacagctttcgttgcgctcatcaaaggctccaaatcgagacaacatgacggcactcttgcgagcgacgacgccgggcaccgtgaagaagtgaaaggcgtgctgcgcctgttccccatctgggcgacgtgcatcatctacgccgtcatcttctcgcagtcgtccacgttcttcacgaagcaggccgcgacgctggaccggcgggtcggctcgactctgcgcgtgccgccggcggcgctgcagacgttcatcagtgtgaccatcatggccttcatcccggtctacgaccgcgcgttcgtgccccttgcgcggcggcttacgcgcctctcgtccggtatcaccatgctgcagcggatcggcacggggctcgtcctggccctggttgccatggtcgtggcggcgctggtggagatgcggcggctcgccgtggcgagggacgccggtctcgtggaccagcccaaggcggcgctgccgatgagcctgtggtggatggtcccgcagtacgtgctgttcgggctctccgacgtgttcgccatgatcggcctgcaggagttcttctacgaccaggtccccgacgcgctgcgcagcctcgggctggccttctttctcagcatctttcggcgtaggacacttgttcagcagcttcatcatctccgccatcgacggtgccaccaagaagagcggagcgagctggttctccaacaacctcaatcgcgcgcacctcgactacttctactggctgctcgccgggctctgcgccgtggagttggctgctttcatcatcgtctcgcgcgtttacgtgtacaagaagaggatgtctcacgacaataatgctgctgccatgtagatcagtagacgtgacttttaccgtgctgtgaatggcgatacaatatgattgaggtgtagagaaagagaacgaaaaaaccttttgtacgctaaacctggacactaaactgacttttacggacggtcggcaatcggcataatagtgccggtttgtt

SEQ ID NO: 6516 - protein, 550 aa, Zea mays subsp. mays
  peptide (1)..(550): Ceres Seq. ID no. 12367919
HTRAQLWRRGGAAMDANTLLLPCSDGAVAGAVDFRGRPASRSGTGRWSAAMFVLGVEIAERFAYHGVSANLISYLTGPLGESTAGAAAAINAWSGVSTMLPLLMACVADAWLGRYRTIVLASLLFVVSMGMLTVSALPAFHHDGCSSYASASRPLACSPPPVQVGVFYVSLYLVALAEAGHKPCAQAFGADQFDQNDPKESASRSSFFNWWYFGMCSGTAVTTLVSSYIQDNVGWGLGFGVPCLVMLFALLMFLLGTRNYRYYTSTESSPFARLATAFVALIKGSKSRQHDGTLASDDAGHREEVKGVLRLFPIWATCIIYAVIFSQSSTFFTKQAATLDRRVGSTLRVPPAALQTFISVTIMAFIPVYDRAFVPLARRLTRLSSGITMLQRIGTGLVLALVAMVVAALVEMRRLAVARDAGLVDQPKAALPMSLWWMVPQYVLFGLSDVFAMIGLQEFFYDQVPDALRSLGLAFFLSIFRRRTLVQQLHHLRHRRCHQEERSELVLQQPQSRAPRLLLLAARRALRRGVGCFHHRLARLRVQEEDVSRQ

SEQ ID NO: 6517 - protein, 537 aa, Zea mays subsp. mays
  peptide (1)..(537): Ceres Seq. ID no. 12367920
MDANTLLLPCSDGAVAGAVDFRGRPASRSGTGRWSAAMFVLGVEIAERFAYHGVSANLISYLTGPLGESTAGAAAAINAWSGVSTMLPLLMACVADAWLGRYRTIVLASLLFVVSMGMLTVSALPAFHHDGCSSYASASRPLACSPPPVQVGVFYVSLYLVALAEAGHKPCAQAFGADQFDQNDPKESASRSSFFNWWYFGMCSGTAVTTLVSSYIQDNVGWGLGFGVPCLVMLFALLMFLLGTRNYRYYTSTESSPFARLATAFVALIKGSKSRQHDGTLASDDAGHREEVKGVLRLFPIWATCIIYAVIFSQSSTFFTKQAATLDRRVGSTLRVPPAALQTFISVTIMAFIPVYDRAFVPLARRLTRLSSGITMLQRIGTGLVLALVAMVVAALVEMRRLAVARDAGLVDQPKAALPMSLWWMVPQYVLFGLSDVFAMIGLQEFFYDQVPDALRSLGLAFFLSIFRRRTLVQQLHHLRHRRCHQEERSELVLQQPQSRAPRLLLLAARRALRRGVGCFHHRLARLRVQEEDVSRQ

SEQ ID NO: 6518 - protein, 500 aa, Zea mays subsp. mays
  peptide (1)..(500): Ceres Seq. ID no. 12367921
MFVLGVEIAERFAYHGVSANLISYLTGPLGESTAGAAAAINAWSGVSTMLPLLMACVADAWLGRYRTIVLASLLFVVSMGMLTVSALPAFHHDGCSSYASASRPLACSPPPVQVGVFYVSLYLVALAEAGHKPCAQAFGADQFDQNDPKESASRSSFFNWWYFGMCSGTAVTTLVSSYIQDNVGWGLGFGVPCLVMLFALLMFLLGTRNYRYYTSTESSPFARLATAFVALIKGSKSRQHDGTLASDDAGHREEVKGVLRLFPIWATCIIYAVIFSQSSTFFTKQAATLDRRVGSTLRVPPAALQTFISVTIMAFIPVYDRAFVPLARRLTRLSSGITMLQRIGTGLVLALVAMVVAALVEMRRLAVARDAGLVDQPKAALPMSLWWMVPQYVLFGLSDVFAMIGLQEFFYDQVPDALRSLGLAFFLSIFRRRTLVQQLHHLRHRRCHQEERSELVLQQPQSRAPRLLLLAARRALRRGVGCFHHRLARLRVQEEDVSRQ

SEQ ID NO: 6519 - DNA, 1338 bp, Zea mays subsp. mays
  misc_feature (1)..(1338): Ceres Seq. ID no. 12349185
  misc_feature (1)..(1338): Ortholog of  Ceres SEQ ID NO 14314869 as cited in SEQ ID NO 58320
gacagggtgactccgtgaccgtgagtgcctacccgccgaccgcacgaaccccactcggtcggtcactcccagtctccatctcccactacggcactaccccatccccggtgcggcgccaccttcccggcttccccttccggccttccccctctcgtcacttatggtgcccagccgctcgctgcgcaactactagcgcaccgtcccctcctcagccatggccgcggcgtcgttcgcccgcgccttatgtctccacatgctcctcctcttcctcgtggttggctcggcgcgctgcaagacggtgaagagagacgtgaaagcattgaatgagatcaaatcttcactaggctggagagttgtatactcatgggtcggtgatgatccttgtgggcatggtgatctacccccctggtctggtgtgacatgttctcagcaaggggattacagagttgtgacggaactggaagtctatgctgtatcaatagttggccctttcccaacagcagtaactaacctgttggatctaagaagattggatctccacaataacaagttgacaggaccaattcccccacagattggacggttgaaacatctcaggatattgaacctgaggtggaataagcttcaagatgtgcttccacctgaaattggtgaactgaagaaactgacacacttgtatttgagcttcaacaacttcaaaggcgagattccagtggagcttgcaaacctgccagaactccgttacctttatcttcacgagaaccgcttcaccgggcgaatcccccctgaacttggaacgctaaagaacctacgtcacctcgacgtgggcaacaaccacctgacaggcactctcagggattttatcggcaacgggaacggcttcccgtccctgagaaatctataccttaacaacaatgagctgactggtgtgctgccagaccagattgcaaacctgacaaaccttgagattctgcacttgtccaataacaagatgatcgggtcgatatcgcctaagctagttcacattccaaggctgatctacttgtacttggacaataacaacttcattgggaggataccggaagggttgtacaggcatccatttctgaaggagctgtacatcgaaggaaaccacttcagaccaggaaccagatcgaagggaacgcacaaggtgctggaactgcctgacgccgacattctagtctagcaagctcgtttaggggacctgaggtcttggcgtcctgcagtagtagactgctgccggtaccaggatcacttctgtctgtcgctgtactattccgtggcaaaactacagttgagaaaaaaaaattctctttg

SEQ ID NO: 6520 - protein, 330 aa, Zea mays subsp. mays
  peptide (1)..(330): Ceres Seq. ID no. 12349186
MAAASFARALCLHMLLLFLVVGSARCKTVKRDVKALNEIKSSLGWRVVYSWVGDDPCGHGDLPPWSGVTCSQQGDYRVVTELEVYAVSIVGPFPTAVTNLLDLRRLDLHNNKLTGPIPPQIGRLKHLRILNLRWNKLQDVLPPEIGELKKLTHLYLSFNNFKGEIPVELANLPELRYLYLHENRFTGRIPPELGTLKNLRHLDVGNNHLTGTLRDFIGNGNGFPSLRNLYLNNNELTGVLPDQIANLTNLEILHLSNNKMIGSISPKLVHIPRLIYLYLDNNNFIGRIPEGLYRHPFLKELYIEGNHFRPGTRSKGTHKVLELPDADILV

SEQ ID NO: 6521 - protein, 317 aa, Zea mays subsp. mays
  peptide (1)..(317): Ceres Seq. ID no. 12349187
MLLLFLVVGSARCKTVKRDVKALNEIKSSLGWRVVYSWVGDDPCGHGDLPPWSGVTCSQQGDYRVVTELEVYAVSIVGPFPTAVTNLLDLRRLDLHNNKLTGPIPPQIGRLKHLRILNLRWNKLQDVLPPEIGELKKLTHLYLSFNNFKGEIPVELANLPELRYLYLHENRFTGRIPPELGTLKNLRHLDVGNNHLTGTLRDFIGNGNGFPSLRNLYLNNNELTGVLPDQIANLTNLEILHLSNNKMIGSISPKLVHIPRLIYLYLDNNNFIGRIPEGLYRHPFLKELYIEGNHFRPGTRSKGTHKVLELPDADILV

SEQ ID NO: 6522 - DNA, 2059 bp, Zea mays subsp. mays
  misc_feature (1)..(2059): Ceres Seq. ID no. 12365570
  misc_feature (1)..(2059): Ortholog of  Ceres SEQ ID NO 15171212 as cited in SEQ ID NO 56899
  misc_feature (1)..(2059): Ortholog of  Ceres SEQ ID NO 12613725 as cited in SEQ ID NO 68196
  misc_feature (1)..(2059): Ortholog of  Ceres SEQ ID NO 14301486 as cited in SEQ ID NO 69222
cgtgttcttaggcttcgctgcccctaccgcgtcttcgccgggatcggtccatggccggcgccgagcgcgcggaggcggtcgcgctggaacaagggctcctcgatccggaggaatccaaccaagtagtatacactggagatggatcagtcgacttttctggaaatcctgttgtcaaggaaagaacgggtagatggaaggcatgtccattcatattaggtaatgaatgctgtgaacgactggcctactatggcatctccacaaaccttgttacttacttgacaaaaaaactgcatgctggcaatgcctctgctgctagcagtgtgactacatggtcgggaacttgctacctaactccacttattggagcaatcctggctgatgcatactgggggaggtactggacaatcgcaacattttccacagtatacttcatcgggatgacactgctgactctttcagcatcagttcctatgctcatgcctccatcttgtgaaggatccttttgcccagcagcaagcccttttcagtatactgtcttttttcttggtctttatctgattgccctgggtactggtggaattaagccgtgtgtctcatcctttggagcggatcaatttgatgatacagatccagctgagcgaatccagaagggctctttcttcaattggttttatttttcaataaacattggtgctctcatatcaagcagctttctggtttgggtgcaagacaatgtaggatggggactggggtttggcattccgactgtattcatggggctggcaatcataagcttcttctctggtacatcactttataggttccaaaaaccaggaggtagtccaattacacgagtatgtcaggtgattgttgcctctttgcgcaagtggaatgtgcctgtcccagaggatagctctctcttgtatgagctacctaatggggtatcaacaattgaggggagtcggcaaatagagcacacagatgaactcagatgtttagataaggctgctacagttaccgaagttgatgtgaaaacggctgacttcaacaacccatggcggatatgcactgtcacccaggtggaagaactgaagatactagtaaggatgttccctgtctgggcaacaacaatagtgttttctgctgtatatgctcagatgtcaacaatgtttgtggaaacaagggatggtgcttgacccatccttgggctctttcaagatccctccagcttcactatctactttcgacaccctaagtgtcatcatatgtgtcccgatgtatgattacatcgtggttccgatagccaggagattcactggcaacgagaggggctttacagagttgcagaggatgggtattggcctggtaatttccatcatggctatgtcagtcgccgcagtcctcgaaatcaagcggctagcagttgccagggaagcacacctggtggatcagaatgtcccggtcccactgagcatattctggcaaatccctcagtatttcctgattggtctagcggagattttcacattcattggggcgctcgagttcttctatgaccagtcaccagacgccatgaggagcctctgcagcgcgcttaatcttctcactactgcgtttgggaactatctcagcacgttcattttgacaatggttgcgtactttactacgaggggaggtaaccctgggtggattcctgacaacttgaacgaaggccatcttgattacttcttcttgctcatcgctggcatcagttttctgaacctgattgtttatgtcctctgtgctggcaaatacaagagcaagaaggcagcttgagttgtgaaggccaggggctggatggcgtgctgcgcgccatgttatggtggacacttcagttcaaaatctgtatatatgtttcccgcattaaccaccctagctgaagcaaccatctgcaattgttgcaaagtttatattcttcattgtgctggactaagttgattatacattcgtgcttctactttgtgtatgtatatatctgacctaaagttgctgaacatagacaatttcacttgcctctggc

SEQ ID NO: 6523 - protein, 381 aa, Zea mays subsp. mays
  peptide (1)..(381): Ceres Seq. ID no. 12365571
MAGAERAEAVALEQGLLDPEESNQVVYTGDGSVDFSGNPVVKERTGRWKACPFILGNECCERLAYYGISTNLVTYLTKKLHAGNASAASSVTTWSGTCYLTPLIGAILADAYWGRYWTIATFSTVYFIGMTLLTLSASVPMLMPPSCEGSFCPAASPFQYTVFFLGLYLIALGTGGIKPCVSSFGADQFDDTDPAERIQKGSFFNWFYFSINIGALISSSFLVWVQDNVGWGLGFGIPTVFMGLAIISFFSGTSLYRFQKPGGSPITRVCQVIVASLRKWNVPVPEDSSLLYELPNGVSTIEGSRQIEHTDELRCLDKAATVTEVDVKTADFNNPWRICTVTQVEELKILVRMFPVWATTIVFSAVYAQMSTMFVETRDGA

SEQ ID NO: 6524 - protein, 252 aa, Zea mays subsp. mays
  peptide (1)..(252): Ceres Seq. ID no. 12365572
MTLLTLSASVPMLMPPSCEGSFCPAASPFQYTVFFLGLYLIALGTGGIKPCVSSFGADQFDDTDPAERIQKGSFFNWFYFSINIGALISSSFLVWVQDNVGWGLGFGIPTVFMGLAIISFFSGTSLYRFQKPGGSPITRVCQVIVASLRKWNVPVPEDSSLLYELPNGVSTIEGSRQIEHTDELRCLDKAATVTEVDVKTADFNNPWRICTVTQVEELKILVRMFPVWATTIVFSAVYAQMSTMFVETRDGA

SEQ ID NO: 6525 - protein, 241 aa, Zea mays subsp. mays
  peptide (1)..(241): Ceres Seq. ID no. 12365573
MLMPPSCEGSFCPAASPFQYTVFFLGLYLIALGTGGIKPCVSSFGADQFDDTDPAERIQKGSFFNWFYFSINIGALISSSFLVWVQDNVGWGLGFGIPTVFMGLAIISFFSGTSLYRFQKPGGSPITRVCQVIVASLRKWNVPVPEDSSLLYELPNGVSTIEGSRQIEHTDELRCLDKAATVTEVDVKTADFNNPWRICTVTQVEELKILVRMFPVWATTIVFSAVYAQMSTMFVETRDGA

SEQ ID NO: 6526 - DNA, 1711 bp, Zea mays subsp. mays
  misc_feature (1)..(1711): Ceres Seq. ID no. 12566006
  misc_feature (1)..(1711): Ortholog of  Ceres SEQ ID NO 15176081 as cited in SEQ ID NO 65838
  misc_feature (1)..(1711): Ortholog of  Ceres SEQ ID NO 13660287 as cited in SEQ ID NO 67316
aagcaagctgcaaagagaacgcttgttggtagaacaaagtatatgcccccatgacaccgagtccaagcagcaggctcgagcatagctggagaagcccccacatccgcatgggctggatgcccatttcatgaggaggcttgtgagccggagctgggaggaatccaggctgctatggcgccttgccttcccggcgctcctgacggaggtgtttcagttctccatcggtttcgtcaccaccgccttcgttgggcacctcggagaggtggagctcgcggctgtcagcgtcgtggagaacatcttggattcctctgcctatggggtcctgtttggcatgggcagcgcgctggacacgctgagcgggcaggccgtcggcgccgggcagctggacaggctgggcacctacacgcagcagtcgtggatcatctgcggcgccaccgcgctggcgctggcgccggcgtacgccttcgccccgcggctcctgcactcgttcctccaccagcccgaccacgtgtcgcgcgccgccgggccgtacgcccgctgggcgatcccgaggctgttcgcgcacgccgtgaacataccgctcctcatgttcttccaggcccagagcaggatctgggccgtggcggccatctccggcgcggtcctcggcgtgcacgccgcgctcacctacgtcgccgtcacgaggctcgggtacggcctgcccggggccgccgtcgccggggacatctcccactggctcgtcgtcgccgctcagttcgcctacatgaccggcggccgcttccccgacgcgtggaagggcttcaccgtgcgtgcgttcgacaacctcggcgccttcgtcaagctgtcgctcgggtccgccgtcatgatctgcttggagttttggtactacaccacgcttctcgtcctcgtgggtctcctcaaacatggcaaactccaaatcgacatcatgtcagtctgcctcaacttcgagttcttgactgtaatggttgcgctgggcttcagcacagcaatcgggattagagtgtccaacgagctgggtgcaaacaggccgaaggaggcaaagtttgcagtgcttgtggcagtatcaacatccatgttcatgggagcagtctttatgtgcgtcgtcctcatctggaggacgagcctgccaaagctcttcagcgacagcgaagaggtgaaacgtggagcttccaagctggggcatctcctcgctctcaccgtatgcgtcagcagcatctggcctgtgctatcaggcgtggccgtaggagctgggtggcaagtgcgtgtggcgatcataaacgtcggttgctactacctagtgggcattccgatgggtatcctgcttgttcaagctaaaacacggcacaatgggcatatggatgggcatgttgtcaggcacgtttctccaaatgtcaatacttctcgccactatcttcacaacaaagtgggataaacaggccgcgctggcagaagtgagaatggcggagtggggaggaaagaacgagaacctaacactgacggaaacaacacatacagatgatctgatggctcctgtgcaagagaaaatgttggcgaatgatagccagaagaatgtagaattagtgcgcatagattgatcatagagtatattcatttcagctcgagacattatttcattgtttactaggatgatagtatgaatctatttttttataaataatctctccgttcc

SEQ ID NO: 6527 - protein, 441 aa, Zea mays subsp. mays
  peptide (1)..(441): Ceres Seq. ID no. 12566007
MRRLVSRSWEESRLLWRLAFPALLTEVFQFSIGFVTTAFVGHLGEVELAAVSVVENILDSSAYGVLFGMGSALDTLSGQAVGAGQLDRLGTYTQQSWIICGATALALAPAYAFAPRLLHSFLHQPDHVSRAAGPYARWAIPRLFAHAVNIPLLMFFQAQSRIWAVAAISGAVLGVHAALTYVAVTRLGYGLPGAAVAGDISHWLVVAAQFAYMTGGRFPDAWKGFTVRAFDNLGAFVKLSLGSAVMICLEFWYYTTLLVLVGLLKHGKLQIDIMSVCLNFEFLTVMVALGFSTAIGIRVSNELGANRPKEAKFAVLVAVSTSMFMGAVFMCVVLIWRTSLPKLFSDSEEVKRGASKLGHLLALTVCVSSIWPVLSGVAVGAGWQVRVAIINVGCYYLVGIPMGILLVQAKTRHNGHMDGHVVRHVSPNVNTSRHYLHNKVG

SEQ ID NO: 6528 - protein, 373 aa, Zea mays subsp. mays
  peptide (1)..(373): Ceres Seq. ID no. 12566008
MGSALDTLSGQAVGAGQLDRLGTYTQQSWIICGATALALAPAYAFAPRLLHSFLHQPDHVSRAAGPYARWAIPRLFAHAVNIPLLMFFQAQSRIWAVAAISGAVLGVHAALTYVAVTRLGYGLPGAAVAGDISHWLVVAAQFAYMTGGRFPDAWKGFTVRAFDNLGAFVKLSLGSAVMICLEFWYYTTLLVLVGLLKHGKLQIDIMSVCLNFEFLTVMVALGFSTAIGIRVSNELGANRPKEAKFAVLVAVSTSMFMGAVFMCVVLIWRTSLPKLFSDSEEVKRGASKLGHLLALTVCVSSIWPVLSGVAVGAGWQVRVAIINVGCYYLVGIPMGILLVQAKTRHNGHMDGHVVRHVSPNVNTSRHYLHNKVG

SEQ ID NO: 6529 - protein, 288 aa, Zea mays subsp. mays
  peptide (1)..(288): Ceres Seq. ID no. 12566009
MFFQAQSRIWAVAAISGAVLGVHAALTYVAVTRLGYGLPGAAVAGDISHWLVVAAQFAYMTGGRFPDAWKGFTVRAFDNLGAFVKLSLGSAVMICLEFWYYTTLLVLVGLLKHGKLQIDIMSVCLNFEFLTVMVALGFSTAIGIRVSNELGANRPKEAKFAVLVAVSTSMFMGAVFMCVVLIWRTSLPKLFSDSEEVKRGASKLGHLLALTVCVSSIWPVLSGVAVGAGWQVRVAIINVGCYYLVGIPMGILLVQAKTRHNGHMDGHVVRHVSPNVNTSRHYLHNKVG

SEQ ID NO: 6530 - DNA, 1655 bp, Zea mays subsp. mays
  misc_feature (1)..(1655): Ceres Seq. ID no. 12352419
  misc_feature (1)..(1655): Ortholog of  Ceres SEQ ID NO 13593968 as cited in SEQ ID NO 54626
gcgtcgtcgtcgtccgattctgtctccctcaggtcgagattcgagagttcccgtgttcgtccatccgcgctgtgaggttctccgatggccgagaagtcacccagctccgcgccgcagggtggttctggtgggaatgaatcattcgataatcttgtaattcaagctccacagcttatgagggaggattacatacagaatgctgtgaagtttctttcacatccgaaagtgaagggttctccagtatttcacaggcgttccttcctggaaaagaaaggccttacaagtgaagaaattgatgaggccttttgtagagttcctgaccctaagccaaatggaacagatgctgtagctgctggtaggcaacaagcaaacaatcccagtcaatctgttgtgctgcaaccttatacagaagttcaaccacaagcagctactgcctctgccactgctggaccaattgttccacatacaaaggcacagttgagctgggtaaacacactccttggtgcaggtctttttcttggtttaggggctagtgctgccataaccctaaagaaattggtcatccctagtctgaaatcttggactcgtagagtcgttgctgaaggagatgaaaatgcaaagagtgaacatacttccaaactttgtgaagaaattagggaagccataaaagtttctgcatcagccttttctgatattgctaaaataaaccaagaagtgcttgcttcaaaagatgaagataggaaggtactcatgaagttaacagaagcattcgagtcacaagaaaatgtgtttaaatcattgagtgagaccttaaatcgtatcagggagaatcagctttcacaacacagcctattggaagagcatgttcagccttcatcatggaacgggccaattgactatcaagggagagcttttcagcaaactaatatgtatgcaacaccaccaaacaacagttttgacacagggaggaactcattcatgccattagctgctgaatcttcttatggaccatttccaggatcctactctgagcgggtgcagaggcctggtggatacggattccagcaacagacaagcagcgaccgattgaatgttgttggcccacggagcagctaccaagggggttcttctaatcaccatgctggtagtaatgccatggatgacccggcagcggttgcagcagaattgcagcgccgctgggttcccccacagccaccaggcgtcatcatgccagaggctgcggccgccatccgacaggccaggtcggttccgaggcagctgccaagcggcgatgggcgcctgggcgctgatgtcccgagacagcctgagcctgccattgccatggcgacaacagagcacgtgaacgttgcccctgaagcacctggcggggagttgccaagcgatggtggtggtgccatgactgctgatgccagcaacggtggtgggagtggagagcagcaggagcaggaagcctcttgagtgaagctttttggacgccctttgatttggttctttgagaggatctagcttgcacctgtacctgtgtgtgtagcatatgcatatgcatctgcataggtttgtgacataatgtgcctcgtgttcgaaactgcagctgtattgtagatatataaactgatcaactttacacgtgtgtt

SEQ ID NO: 6531 - protein, 464 aa, Zea mays subsp. mays
  peptide (1)..(464): Ceres Seq. ID no. 12352420
MAEKSPSSAPQGGSGGNESFDNLVIQAPQLMREDYIQNAVKFLSHPKVKGSPVFHRRSFLEKKGLTSEEIDEAFCRVPDPKPNGTDAVAAGRQQANNPSQSVVLQPYTEVQPQAATASATAGPIVPHTKAQLSWVNTLLGAGLFLGLGASAAITLKKLVIPSLKSWTRRVVAEGDENAKSEHTSKLCEEIREAIKVSASAFSDIAKINQEVLASKDEDRKVLMKLTEAFESQENVFKSLSETLNRIRENQLSQHSLLEEHVQPSSWNGPIDYQGRAFQQTNMYATPPNNSFDTGRNSFMPLAAESSYGPFPGSYSERVQRPGGYGFQQQTSSDRLNVVGPRSSYQGGSSNHHAGSNAMDDPAAVAAELQRRWVPPQPPGVIMPEAAAAIRQARSVPRQLPSGDGRLGADVPRQPEPAIAMATTEHVNVAPEAPGGELPSDGGGAMTADASNGGGSGEQQEQEAS

SEQ ID NO: 6532 - protein, 434 aa, Zea mays subsp. mays
  peptide (1)..(434): Ceres Seq. ID no. 12352421
MREDYIQNAVKFLSHPKVKGSPVFHRRSFLEKKGLTSEEIDEAFCRVPDPKPNGTDAVAAGRQQANNPSQSVVLQPYTEVQPQAATASATAGPIVPHTKAQLSWVNTLLGAGLFLGLGASAAITLKKLVIPSLKSWTRRVVAEGDENAKSEHTSKLCEEIREAIKVSASAFSDIAKINQEVLASKDEDRKVLMKLTEAFESQENVFKSLSETLNRIRENQLSQHSLLEEHVQPSSWNGPIDYQGRAFQQTNMYATPPNNSFDTGRNSFMPLAAESSYGPFPGSYSERVQRPGGYGFQQQTSSDRLNVVGPRSSYQGGSSNHHAGSNAMDDPAAVAAELQRRWVPPQPPGVIMPEAAAAIRQARSVPRQLPSGDGRLGADVPRQPEPAIAMATTEHVNVAPEAPGGELPSDGGGAMTADASNGGGSGEQQEQEAS

SEQ ID NO: 6533 - protein, 242 aa, Zea mays subsp. mays
  peptide (1)..(242): Ceres Seq. ID no. 12352422
MKLTEAFESQENVFKSLSETLNRIRENQLSQHSLLEEHVQPSSWNGPIDYQGRAFQQTNMYATPPNNSFDTGRNSFMPLAAESSYGPFPGSYSERVQRPGGYGFQQQTSSDRLNVVGPRSSYQGGSSNHHAGSNAMDDPAAVAAELQRRWVPPQPPGVIMPEAAAAIRQARSVPRQLPSGDGRLGADVPRQPEPAIAMATTEHVNVAPEAPGGELPSDGGGAMTADASNGGGSGEQQEQEAS

SEQ ID NO: 6534 - DNA, 1248 bp, Zea mays subsp. mays
  misc_feature (1)..(1248): Ceres Seq. ID no. 12402523
  misc_feature (1)..(1248): Ortholog of  Ceres SEQ ID NO 13594048 as cited in SEQ ID NO 58604
aagcataccagagcacacacagaacganncctcgatcgctcatagtctcctctgctccggtttcgttggagatccaggcaatggccgacgaatgcagcaactcaccagggccttctcaggccttggcgggctcggcgtggacgagccggcgatggtgtcggcgctggcacggtggcgcgggcagcccgagaagcggtccgcgttccgcaggggattcccgggcttcttcagcagccacggcggcgacatggaccggcgcgaggaggagtacatgctgcacctggccgccgagttcgcgcggttcagggacctggtggtgctgtgggcgacgcacccgtgggancgcgacgccggnctggcgcaccacgtcctgcaccaccaccaccaccacccgcccgccgtcgtcgtggaggtcgcctgcgcgcggtccgccgacgagctgctgggcgcgcgccgggcgtaccaggcgctcttccaccgctccctcgaggaggacgtcgcgcaccgcgcccgggacaagccctactgcagcctgctggtcgggctggtgagcgcgtacaggtacgagggcccgcgggtggacaaggaggtggcgaaggcggaggccgaggcgctgggtgccgccgtgaagcgcgccgggaacgggaagctggtggagaacgacgaggtgctccgcatcctgaccaccaggagcaagccccacctcgtgcagacgttcatgtactacaaggagatgcacngcaggcacntcgaggaggacctgggccaacgcggggaggagaccctgctgggaaaccgtgctctgcctcgtcgcgccgggnccagtacttcagccaggtgattgagggcgcgctgagggacggcgccgaccaccacgggaaggaggccctgacgagggtggcggtgacgcggtcggaccacgacatggacgacatcagagccgcctaccaccagcagttcggggccaagctggaggacgtcatcgcggccaaggcgcacggacactacagggnacgcgctgctctccttggtgggcgccggcaattcatcagtgtgaagcgctgcttcctgctcaggagtcgtcaggcccaataagatgtgcaagagtttctttattacgcactttcgcgaggaaaaaaagtcgcattttccactcgatgaggaaaggttgttgcttgttcttttgcttctcctatgcgtttcgtctatcattgactacaggattcccaataaacatttttaatttct

SEQ ID NO: 6535 - protein, 279 aa, Zea mays subsp. mays
  peptide (1)..(279): Ceres Seq. ID no. 12402524
  misc_feature (9)..(9): Xaa is any aa, unknown or other
  misc_feature (10)..(10): Xaa is any aa, unknown or other
  misc_feature (114)..(114): Xaa is any aa, unknown or other
  misc_feature (118)..(118): Xaa is any aa, unknown or other
  misc_feature (247)..(247): Xaa is any aa, unknown or other
  misc_feature (250)..(250): Xaa is any aa, unknown or other
  misc_feature (274)..(274): Xaa is any aa, unknown or other
SIPEHTQNXXSIAHSLLCSGFVGDPGNGRRMQQLTRAFSGLGGLGVDEPAMVSALARWRGQPEKRSAFRRGFPGFFSSHGGDMDRREEEYMLHLAAEFARFRDLVVLWATHPWXRDAXLAHHVLHHHHHHPPAVVVEVACARSADELLGARRAYQALFHRSLEEDVAHRARDKPYCSLLVGLVSAYRYEGPRVDKEVAKAEAEALGAAVKRAGNGKLVENDEVLRILTTRSKPHLVQTFMYYKEMHXRHXEEDLGQRGEETLLGNRALPRRAGXSTSAR

SEQ ID NO: 6536 - protein, 249 aa, Zea mays subsp. mays
  peptide (1)..(249): Ceres Seq. ID no. 12402525
  misc_feature (84)..(84): Xaa is any aa, unknown or other
  misc_feature (88)..(88): Xaa is any aa, unknown or other
  misc_feature (217)..(217): Xaa is any aa, unknown or other
  misc_feature (220)..(220): Xaa is any aa, unknown or other
  misc_feature (244)..(244): Xaa is any aa, unknown or other
MQQLTRAFSGLGGLGVDEPAMVSALARWRGQPEKRSAFRRGFPGFFSSHGGDMDRREEEYMLHLAAEFARFRDLVVLWATHPWXRDAXLAHHVLHHHHHHPPAVVVEVACARSADELLGARRAYQALFHRSLEEDVAHRARDKPYCSLLVGLVSAYRYEGPRVDKEVAKAEAEALGAAVKRAGNGKLVENDEVLRILTTRSKPHLVQTFMYYKEMHXRHXEEDLGQRGEETLLGNRALPRRAGXSTSAR

SEQ ID NO: 6537 - protein, 229 aa, Zea mays subsp. mays
  peptide (1)..(229): Ceres Seq. ID no. 12402526
  misc_feature (64)..(64): Xaa is any aa, unknown or other
  misc_feature (68)..(68): Xaa is any aa, unknown or other
  misc_feature (197)..(197): Xaa is any aa, unknown or other
  misc_feature (200)..(200): Xaa is any aa, unknown or other
  misc_feature (224)..(224): Xaa is any aa, unknown or other
MVSALARWRGQPEKRSAFRRGFPGFFSSHGGDMDRREEEYMLHLAAEFARFRDLVVLWATHPWXRDAXLAHHVLHHHHHHPPAVVVEVACARSADELLGARRAYQALFHRSLEEDVAHRARDKPYCSLLVGLVSAYRYEGPRVDKEVAKAEAEALGAAVKRAGNGKLVENDEVLRILTTRSKPHLVQTFMYYKEMHXRHXEEDLGQRGEETLLGNRALPRRAGXSTSAR

SEQ ID NO: 6538 - DNA, 1023 bp, Zea mays subsp. mays
  misc_feature (1)..(1023): Ceres Seq. ID no. 12365599
  misc_feature (1)..(1023): Ortholog of  Ceres SEQ ID NO 14309627 as cited in SEQ ID NO 493
  misc_feature (1)..(1023): Ortholog of  Ceres SEQ ID NO 14302111 as cited in SEQ ID NO 68773
agattacaaaagccattccttcaatcactcaaatccactgtgactccgtgagctccctgcctgctgccctgcactgctgcacactccccgcccagccgcaccagctcagctcagctcagctcagcagtcatggctcgcccctgccgcagcagcagcgccgctgcccgcctcctgctgctgctcgccgccgtcgcagcggcgctccaggccgcggccgccgcgccgccggtggccagcggcttcatccgcaaatcctgccgcgcgacgcagtacccgtcggtgtgcgagcagagcctcgcggcgtacggaggctccccgccgccgcggagcccgcgtgagctggcgcgcgccgcgctggcggtgagcgcggaccgcgctcgggcagcgtccgcgtacgtgggccgcctgtgcggctcccggtccggatccggcgacggcagcccccgccgcggcgccggcgcgatgaaggggtcggcggccgcggggtcccgtgcgcgactgtctggagaatctagcggacagcgtgggccacctccgcgacgcggcgcaggagataggcggcgccgggatggcccgcgccgggacgcgcgcgttcaggtggcacctcagcaacgtgcagacctggtgcagcgccgcgctcacggacgagaacacctgcctggacgggctctcgtcccgcgccgtggacgccgccacgcgcgccgccgtccgcggcagggtcgtcgaggtcgcgcaggtcaccagcaacgcgctcgcactcgtcaacaaggtcgggcctgggtactagtagcccagggcggcctgggtgctactactactgcctcctccacgacgttggttgtttctgcctcggcggttaactagttctgttattatcaatgtgtgtgtgtttctttgcatataagtatatgctttgtatctgttgtgtgaggtaatttatatatagttaaggccttaagggcaattagcttgtatattgtattatgggtggcgagaagtacacgaagacggataatccttctt

SEQ ID NO: 6539 - protein, 244 aa, Zea mays subsp. mays
  peptide (1)..(244): Ceres Seq. ID no. 12365600
MARPCRSSSAAARLLLLLAAVAAALQAAAAAPPVASGFIRKSCRATQYPSVCEQSLAAYGGSPPPRSPRELARAALAVSADRARAASAYVGRLCGSRSGSGDGSPRRGAGAMKGSAAAGSRARLSGESSGQRGPPPRRGAGDRRRRDGPRRDARVQVAPQQRADLVQRRAHGREHLPGRALVPRRGRRHARRRPRQGRRGRAGHQQRARTRQQGRAWVLVAQGGLGATTTASSTTLVVSASAVN

SEQ ID NO: 6540 - protein, 133 aa, Zea mays subsp. mays
  peptide (1)..(133): Ceres Seq. ID no. 12365601
MKGSAAAGSRARLSGESSGQRGPPPRRGAGDRRRRDGPRRDARVQVAPQQRADLVQRRAHGREHLPGRALVPRRGRRHARRRPRQGRRGRAGHQQRARTRQQGRAWVLVAQGGLGATTTASSTTLVVSASAVN

SEQ ID NO: 6541 - DNA, 1685 bp, Zea mays subsp. mays
  misc_feature (1)..(1685): Ceres Seq. ID no. 12356347
  misc_feature (1)..(1685): Ortholog of  Ceres SEQ ID NO 13648081 as cited in SEQ ID NO 165
  misc_feature (1)..(1685): Ortholog of  Ceres SEQ ID NO 15224803 as cited in SEQ ID NO 56572
  misc_feature (1)..(1685): Ortholog of  Ceres SEQ ID NO 14308598 as cited in SEQ ID NO 60416
  misc_feature (1)..(1685): Ortholog of  Ceres SEQ ID NO 13502952 as cited in SEQ ID NO 62271
  misc_feature (1)..(1685): Ortholog of  Ceres SEQ ID NO 13502973 as cited in SEQ ID NO 68052
  misc_feature (1)..(1685): Ortholog of  Ceres SEQ ID NO 13596000 as cited in SEQ ID NO 68188
  misc_feature (1)..(1685): Ortholog of  Ceres SEQ ID NO 15179420 as cited in SEQ ID NO 0
accccacaccaaaagaaaccaactaaaatcccaaaagagaggaaaggcacaaacagacggtacaaagaaagggacgctcgtctcgtctcgtcacgtgccgccgccatggctgctctgggccgtggcctgcccctcctcctcctgctcctcctcctcgccgtatcgggggccgccaacgccgcggcggcgcccggcggcatgtccatcatcacctacaacgaggagcacggcgcgcgggggctggagcggacggagccggaggtgcgggccatgtacgacctctggctcgcggagcacggccgcgcctacaacgcgctgggcgagggcgagggcgagcgcgaccgccgcttcctcgtcttctgggacaacctccgcttcgtcgacgcgcacaacgagcgcgccggcgcccgcggcttccgcctcgggatgaaccagttcgccgacctcaccaacgacgagttccgcgccgcgtacctcggcgccatggtccccgccgcccgccggggagccgtcgtgggggagaggtaccgccacgacggcgccgccgaggagctgccggagagcgtcgactggagggagaagggcgccgtcgcgcccgtcaagaaccaggggcaatgcggaagttgctgggctttctctgcagtaagctcagtggaaagcgttaaccagatcgtcaccggtgagatggtgacactgtctgaacaggagctcgtagagtgctcgactgacggagggaacagcggctgcaacggcgggctcatggacgccgctttcgatttcatcataaagaacgggggcatcgataccgaagatgactacccttacagagccgtggacgggaagtgcgacatgaacaggaaaaatgccagggttgtgagcatcgatggctttgaagacgtgcctgagaacgacgagaagtcgctgcagaaggcggttgctcaccagccagttagcgttgccattgaggccggaggccgggagttccagctctacaaatcgggtgtcttcagcggaagctgcaccacgaaccttgaccatggtgtcgtcgcggtcggctacggcgccgagaacgggaaggactactggatcgtccgcaactcgtggggcccgaagtggggcgaggctggttacatccgtatggagaggaacgtcaacgccagcactgggaagtgcgggatcgcgatgatggcgtcctacccgacgaagaagggcgcgaaccctcccaggccgtctccaaccccgccaacaccgccggctgcccctgacaatgtctgcgacgagaacttctcgtgctccgcgggcagcacctgctgctgcgcgtttggcttcaggaacgtctgcttggtctggggctgctgcccggtcgagggcgccacctgctgcaaggatcacgccagctgctgcccgccgggctaccctgtctgcaacgtcagagctggaacttgctcggtgagcaagaacagcccactgagcgtcaaggccttgaagcgcactctcgccaagctgagcaccgcatgaggacctcgatctgggactgcccattgctttttctgactcatgggcgttcagatcaccaagagcaagatttcatagattatctatatgtttgtataagtactattaccgtcccatgaatccgctgtaaataactagtacctctgattaaaaggataatattatttgtc

SEQ ID NO: 6542 - protein, 505 aa, Zea mays subsp. mays
  peptide (1)..(505): Ceres Seq. ID no. 12356348
TPHQKKPTKIPKERKGTNRRYKERDARLVSSRAAAMAALGRGLPLLLLLLLLAVSGAANAAAAPGGMSIITYNEEHGARGLERTEPEVRAMYDLWLAEHGRAYNALGEGEGERDRRFLVFWDNLRFVDAHNERAGARGFRLGMNQFADLTNDEFRAAYLGAMVPAARRGAVVGERYRHDGAAEELPESVDWREKGAVAPVKNQGQCGSCWAFSAVSSVESVNQIVTGEMVTLSEQELVECSTDGGNSGCNGGLMDAAFDFIIKNGGIDTEDDYPYRAVDGKCDMNRKNARVVSIDGFEDVPENDEKSLQKAVAHQPVSVAIEAGGREFQLYKSGVFSGSCTTNLDHGVVAVGYGAENGKDYWIVRNSWGPKWGEAGYIRMERNVNASTGKCGIAMMASYPTKKGANPPRPSPTPPTPPAAPDNVCDENFSCSAGSTCCCAFGFRNVCLVWGCCPVEGATCCKDHASCCPPGYPVCNVRAGTCSVSKNSPLSVKALKRTLAKLSTA

SEQ ID NO: 6543 - protein, 470 aa, Zea mays subsp. mays
  peptide (1)..(470): Ceres Seq. ID no. 12356349
MAALGRGLPLLLLLLLLAVSGAANAAAAPGGMSIITYNEEHGARGLERTEPEVRAMYDLWLAEHGRAYNALGEGEGERDRRFLVFWDNLRFVDAHNERAGARGFRLGMNQFADLTNDEFRAAYLGAMVPAARRGAVVGERYRHDGAAEELPESVDWREKGAVAPVKNQGQCGSCWAFSAVSSVESVNQIVTGEMVTLSEQELVECSTDGGNSGCNGGLMDAAFDFIIKNGGIDTEDDYPYRAVDGKCDMNRKNARVVSIDGFEDVPENDEKSLQKAVAHQPVSVAIEAGGREFQLYKSGVFSGSCTTNLDHGVVAVGYGAENGKDYWIVRNSWGPKWGEAGYIRMERNVNASTGKCGIAMMASYPTKKGANPPRPSPTPPTPPAAPDNVCDENFSCSAGSTCCCAFGFRNVCLVWGCCPVEGATCCKDHASCCPPGYPVCNVRAGTCSVSKNSPLSVKALKRTLAKLSTA

SEQ ID NO: 6544 - protein, 439 aa, Zea mays subsp. mays
  peptide (1)..(439): Ceres Seq. ID no. 12356350
MSIITYNEEHGARGLERTEPEVRAMYDLWLAEHGRAYNALGEGEGERDRRFLVFWDNLRFVDAHNERAGARGFRLGMNQFADLTNDEFRAAYLGAMVPAARRGAVVGERYRHDGAAEELPESVDWREKGAVAPVKNQGQCGSCWAFSAVSSVESVNQIVTGEMVTLSEQELVECSTDGGNSGCNGGLMDAAFDFIIKNGGIDTEDDYPYRAVDGKCDMNRKNARVVSIDGFEDVPENDEKSLQKAVAHQPVSVAIEAGGREFQLYKSGVFSGSCTTNLDHGVVAVGYGAENGKDYWIVRNSWGPKWGEAGYIRMERNVNASTGKCGIAMMASYPTKKGANPPRPSPTPPTPPAAPDNVCDENFSCSAGSTCCCAFGFRNVCLVWGCCPVEGATCCKDHASCCPPGYPVCNVRAGTCSVSKNSPLSVKALKRTLAKLSTA

SEQ ID NO: 6545 - DNA, 1201 bp, Zea mays subsp. mays
  misc_feature (1)..(1201): Ceres Seq. ID no. 12351169
  misc_feature (1)..(1201): Ortholog of  Ceres SEQ ID NO 14302761 as cited in SEQ ID NO 65542
ccccaaaccccagcaggcatcctctcttcctctcctctccaatctccattgcagcagcactgcagcggcgggtgcgggtggcatggctatggcgtccgcgctgccgctcctcctcgcgccgcgcgccggtctttgcgtccgcggggccgtcttcgcctcatctccgctcccgccgcctcgcgctgcgtctccctccccctccccgacccgccgccctctccgcgccaccagccgccgtgcagccgcgcgaggcccggcgcgtccagccggccccgcgccgcctcctgctgccaagatcccgctccggccgcgggaggaggcgccagggactggcggatgttcttagcatggtacctaatggctctggacaagaacccgattgtgactaaggcggtcacttccgctgccctaactctggccggggacctcatctgtcagctttatcgatcgagttccagaacttgatttgaggagaacatttgtattcacatttttgggccttgcccttgtggggccaactttacatgtctggtacttgtatttgagcaaattagtgacaatcagtgggggcatcaggtgccattgctcgccttatgcttgatcagttcattttctctcccattttcattggcgtctttatgagcttactagtcaccttggagggaaagccctctcttgtggtgccaaagcttaagcaggaatggttatcatcggtgttggcgaattggcaattatggataccatttcagtttttgaatttttacttcgttcctcagaagtttcaggtccttggtgctaattttgtagcccttgcatggaatgtgattttatcatttaaagctcacaaggaagttatcgcgaaataggtatgaaggagcgcagtgaactcccccggtcggtccaggatagggataggcttgtaaattgtcgccatgtgggactggagtggatcattctgatcagtagtcaacacaacactgaatcgatgattgtgatggacatgcctgtgtgatctcttttgtgcatgctacaccaatacgtgtttggccagcatgtatgcctggacatgtgtgttactatttgtgctgtgatgggttgttcgagatctaggaaacacattgggttgttgatatctttaggccctgtgtggaagcgtctattttttttaaagaaactggtttatagaaattgtggtggttct

SEQ ID NO: 6546 - protein, 154 aa, Zea mays subsp. mays
  peptide (1)..(154): Ceres Seq. ID no. 12351170
PQTPAGILSSSPLQSPLQQHCSGGCGWHGYGVRAAAPPRAARRSLRPRGRLRLISAPAASRCVSLPLPDPPPSPRHQPPCSRARPGASSRPRAASCCQDPAPAAGGGARDWRMFLAWYLMALDKNPIVTKAVTSAALTLAGDLICQLYRSSSRT

SEQ ID NO: 6547 - protein, 128 aa, Zea mays subsp. mays
  peptide (1)..(128): Ceres Seq. ID no. 12351171
PNPSRHPLFLSSPISIAAALQRRVRVAWLWRPRCRSSSRRAPVFASAGPSSPHLRSRRLALRLPPPPRPAALSAPPAAVQPREARRVQPAPRRLLLPRSRSGRGRRRQGLADVLSMVPNGSGQEPDCD

SEQ ID NO: 6548 - protein, 114 aa, Zea mays subsp. mays
  peptide (1)..(114): Ceres Seq. ID no. 12351172
PKPQQASSLPLLSNLHCSSTAAAGAGGMAMASALPLLLAPRAGLCVRGAVFASSPLPPPRAASPSPSPTRRPLRATSRRAAARGPARPAGPAPPPAAKIPLRPREEAPGTGGCS

SEQ ID NO: 6549 - DNA, 662 bp, Zea mays subsp. mays
  misc_feature (1)..(662): Ceres Seq. ID no. 12372505
  misc_feature (1)..(662): Ortholog of  Ceres SEQ ID NO 12610253 as cited in SEQ ID NO 56230
gaaaatctccccgctcacaaagcagtcctcccaccgcacgcaacgcagcctcgacctcgacctcgccgtcgccatggcgagcaagcagacccgccgcctcttcgtccttgccgccgtcgccgtatgcttcctcctcctcctcctcccagcctcctctgtcgccaccgacgtcgattactgcagtaaaaaggagtacccggtgaaggtgagcggggtgcagatcgtgcccgatccggtcgagcccggcaagcctgccactttcaagatctccgcttctactgataaaaccatcgagaaggggaagctggtgatcgacgtcaagtacttcttcttctacgtgcactcggagacgcgcgacatctgcggagagatctcctgtccggcgaccggcgacttcgtgctgtcccacgagcagacgttgccagggttcactccaccggggtcgtacacgatctacatgaagatggtcggggacgacgacgaggagctgagctgcatctcgttcggcttcagcattgggttcgtcgcctccagctgaaacccgcctgagctgcgcgccagaagtcgcccagcatggatgccattatgtaaaccactagaacataaaatttcgagaaagaatgcattacgaaggagacgctcagatttcttcaacctaaagc

SEQ ID NO: 6550 - protein, 178 aa, Zea mays subsp. mays
  peptide (1)..(178): Ceres Seq. ID no. 12372506
KISPLTKQSSHRTQRSLDLDLAVAMASKQTRRLFVLAAVAVCFLLLLLPASSVATDVDYCSKKEYPVKVSGVQIVPDPVEPGKPATFKISASTDKTIEKGKLVIDVKYFFFYVHSETRDICGEISCPATGDFVLSHEQTLPGFTPPGSYTIYMKMVGDDDEELSCISFGFSIGFVASS

SEQ ID NO: 6551 - protein, 154 aa, Zea mays subsp. mays
  peptide (1)..(154): Ceres Seq. ID no. 12372507
MASKQTRRLFVLAAVAVCFLLLLLPASSVATDVDYCSKKEYPVKVSGVQIVPDPVEPGKPATFKISASTDKTIEKGKLVIDVKYFFFYVHSETRDICGEISCPATGDFVLSHEQTLPGFTPPGSYTIYMKMVGDDDEELSCISFGFSIGFVASS

SEQ ID NO: 6552 - DNA, 772 bp, Zea mays subsp. mays
  misc_feature (1)..(772): Ceres Seq. ID no. 12341738
  misc_feature (1)..(772): Ortholog of  Ceres SEQ ID NO 13599249 as cited in SEQ ID NO 0
aagtacaggaagcgctagaacaacccgaccgccgccgccgccgcctcagctactcgcctggtgatgggcgtcgaactggcgcaaccgaccgccgccgcggctgcggtgaccaccgctgagcaggctcaggatctcatcgacgccgctaggtatgacgacttggaggacgtcgtcgccctgttctccgctggtgtctcgctggactccacagattcgcaaggccgcacagctcttcacatggcttctgccaatggtcaccttgctatggtggaatacttgattcaaaatggagcgaatgttaatgccaccaacatggagaagaacacaccactccactgggcatgccttaatggacgtatagaggtaatcagggctttgatctcagcgggggctagcgtgagtgctctgaacagccacgagaaaacgccaatggacgaagcggtgaccacaggcaagatgcacgtgatcgacgcgatcggtgcggcagtagctcaagccgagctcgacggcgttactgtctcctaaaaggacctgatgagtacctggagctttgaatgacttgcagccttgttcttatctcacagcggttctgtctgtatcactcgcgaacctgaatcccccgacgggccagtatccgggcaatatctatactgacggcaatcgcctgttagtgtcattggcacgaggacccgacctgtcgttgtaaaccagatgtgcagatgtcaaagatcaggattttctcctacaaatgttgtagggccgttgcttgtcc

SEQ ID NO: 6553 - protein, 153 aa, Zea mays subsp. mays
  peptide (1)..(153): Ceres Seq. ID no. 12341739
MGVELAQPTAAAAAVTTAEQAQDLIDAARYDDLEDVVALFSAGVSLDSTDSQGRTALHMASANGHLAMVEYLIQNGANVNATNMEKNTPLHWACLNGRIEVIRALISAGASVSALNSHEKTPMDEAVTTGKMHVIDAIGAAVAQAELDGVTVS

SEQ ID NO: 6554 - protein, 95 aa, Zea mays subsp. mays
  peptide (1)..(95): Ceres Seq. ID no. 12341740
MASANGHLAMVEYLIQNGANVNATNMEKNTPLHWACLNGRIEVIRALISAGASVSALNSHEKTPMDEAVTTGKMHVIDAIGAAVAQAELDGVTVS

SEQ ID NO: 6555 - protein, 86 aa, Zea mays subsp. mays
  peptide (1)..(86): Ceres Seq. ID no. 12341741
MVEYLIQNGANVNATNMEKNTPLHWACLNGRIEVIRALISAGASVSALNSHEKTPMDEAVTTGKMHVIDAIGAAVAQAELDGVTVS

SEQ ID NO: 6556 - DNA, 1254 bp, Zea mays subsp. mays
  misc_feature (1)..(1254): Ceres Seq. ID no. 12402516
  misc_feature (1)..(1254): Ortholog of  Ceres SEQ ID NO 13638441 as cited in SEQ ID NO 58066
cagaagccaaattggtgctcctcttatctcgccgcgccgccaccgctccatttccgctcccccagcccccccaaaagaacctcgtaaccctactcgcgggattccgcaggccgccgcttgcttagggttcatcactcctgttcacacccgatggccgtgaacgaggcgagcagcagtggcggtggggaggaggggtgcgggtcgtggacccgcgagcaggagaaggcgttcgagaacgcggtggcgacgatgggcggggaggaggacggggacgcgaggtgggagaagctagcggaggccgtcgaggggaagacgccggaggaggtcaggcggcactacgagctgctggtggaggacgtcgacggcatcgagtcgggccgcgtcccgcttccggcgtacgcggctgacggcgctgccgaggaagggggcggtggcgggaagaagggaagtggcggaggagggacccatggggacaagcggtcggcgaagtccgccgagcaggagcgtaggaagggcatcgcctggacagaggacgagcacagattgttcctccttggacttgaaaagtatggcaaaggtgactggcggagcatctcgcggaactttgtgatctcaaggacgccgactcaagtagctagtcatgcacagaagtactttatccgtctgaactcaatgaacagagaaaggcggcgatcaagtatacatgacatcaccagtgtgaacaatggagatccatctactgcacagggtccaatcacaggccaaacaaatggtcaggctgcaaatcctggaaaaccatctaagcaatccccgcagccagcgaatacacctccaggcgtcgatgcttatggcacaacaattggacagccagttggtggcccccttgtctcagctgttggaactcccgttacactacctgtttccgctccacctcatctggcctatggcatgcgtgccccggttccaggagccgtagtacctggtgctccagtaaacattgctccgatgccctatccaatgccacccccaccatctcatgggtgacagggtgagggacacatttcaaatgctgtgtagcgtctaaacaaacccataatctccccctatgccagcattttgcgggtgtgctgctatgtctcaataaagcaatgccaataaacccttgtacattacaaactgttgtcacatgttgcattgaggacattgcagattgtgtactttgtgttgcatgcaaactttttcatgtacatctcc

SEQ ID NO: 6557 - protein, 297 aa, Zea mays subsp. mays
  peptide (1)..(297): Ceres Seq. ID no. 12402517
MAVNEASSSGGGEEGCGSWTREQEKAFENAVATMGGEEDGDARWEKLAEAVEGKTPEEVRRHYELLVEDVDGIESGRVPLPAYAADGAAEEGGGGGKKGSGGGGTHGDKRSAKSAEQERRKGIAWTEDEHRLFLLGLEKYGKGDWRSISRNFVISRTPTQVASHAQKYFIRLNSMNRERRRSSIHDITSVNNGDPSTAQGPITGQTNGQAANPGKPSKQSPQPANTPPGVDAYGTTIGQPVGGPLVSAVGTPVTLPVSAPPHLAYGMRAPVPGAVVPGAPVNIAPMPYPMPPPPSHG

SEQ ID NO: 6558 - protein, 264 aa, Zea mays subsp. mays
  peptide (1)..(264): Ceres Seq. ID no. 12402518
MGGEEDGDARWEKLAEAVEGKTPEEVRRHYELLVEDVDGIESGRVPLPAYAADGAAEEGGGGGKKGSGGGGTHGDKRSAKSAEQERRKGIAWTEDEHRLFLLGLEKYGKGDWRSISRNFVISRTPTQVASHAQKYFIRLNSMNRERRRSSIHDITSVNNGDPSTAQGPITGQTNGQAANPGKPSKQSPQPANTPPGVDAYGTTIGQPVGGPLVSAVGTPVTLPVSAPPHLAYGMRAPVPGAVVPGAPVNIAPMPYPMPPPPSHG

SEQ ID NO: 6559 - DNA, 1179 bp, Zea mays subsp. mays
  misc_feature (1)..(1179): Ceres Seq. ID no. 12340811
  misc_feature (1)..(1179): Ortholog of  Ceres SEQ ID NO 14304148 as cited in SEQ ID NO 57313
  misc_feature (1)..(1179): Ortholog of  Ceres SEQ ID NO 13598513 as cited in SEQ ID NO 64102
  misc_feature (1)..(1179): Ortholog of  Ceres SEQ ID NO 14302224 as cited in SEQ ID NO 64268
acaacaacttagcataacaaaagcccttgcccacgccatgacgctcagcaagaagcaaggcgcaggcactgatcagcaggccttgctggatgctcagctgcagctctggcaccacaccatcgcttttgtcaagtccatggcgctcaaggccgccgtagacctccgcatagcggacgccatccacctgcacggcggctcagccaccctctcgcagatagtcaccaaggtcacactccacccgtccaagataccatgcctgcgacgcctcatgcgcgtgctcactctcaccggcgtcttcagcgtcaacaccggcgccgttgtcgacgagcccgtttacgggctcacgccggcgtctcgccttctggtcggcccggggctgaaccagaccccgttcctgaccttgatgctcagcactttcttcgtgtcctccttcctcggcctcgacgagtggttccagcacgagacgggtccgtccccgttcgagctggccaatggccgggacatatggaccctgtccggccacgaccgagcttcggcaagctcttcgacgacgggatggtcgcggacagcggtttcatcatggacgtcgtggtcaaggagtgcggcgacgtgttccgaggggtcggctccctcgtcgacgtcgccggcgggctcggtggtgccacccagaccatcgcgaaggctttcccggacgtggcgtgcagcgtgctggacctcccacacgtcgtcgccaatgctcccaccgacaccaccgtgaagtacatcgccggcgacatgttcgagagcattccgtcggcaaacgttgtcttcctcaagtggattctgcatgactggggtgatgccgaatgcgtgaagatactgaagaactgcaagaaggctatatcatctcaagaagaagggaaggtagtgatactggatatggttgttggagcagggtcatccgacgagaagcatgtggagacgcaaatcgtattcgatctctttatgatgtttatcaatggcactgagcgagatgagacggagtggaagaagatcattttcgaagccgggtttagccgttacaagatcatacctgttctcggtgttcggtcgataatcgaggtctacccataaaaatctatgcaactcaagtatactgcatgcgtgaataatctgcgtgtgaaatcaaaactaggtgtg

SEQ ID NO: 6560 - protein, 286 aa, Zea mays subsp. mays
  peptide (1)..(286): Ceres Seq. ID no. 12340812
MPATPHARAHSHRRLQRQHRRRCRRARLRAHAGVSPSGRPGAEPDPVPDLDAQHFLRVLLPRPRRVVPARDGSVPVRAGQWPGHMDPVRPRPSFGKLFDDGMVADSGFIMDVVVKECGDVFRGVGSLVDVAGGLGGATQTIAKAFPDVACSVLDLPHVVANAPTDTTVKYIAGDMFESIPSANVVFLKWILHDWGDAECVKILKNCKKAISSQEEGKVVILDMVVGAGSSDEKHVETQIVFDLFMMFINGTERDETEWKKIIFEAGFSRYKIIPVLGVRSIIEVYP

SEQ ID NO: 6561 - protein, 251 aa, Zea mays subsp. mays
  peptide (1)..(251): Ceres Seq. ID no. 12340813
QQLSITKALAHAMTLSKKQGAGTDQQALLDAQLQLWHHTIAFVKSMALKAAVDLRIADAIHLHGGSATLSQIVTKVTLHPSKIPCLRRLMRVLTLTGVFSVNTGAVVDEPVYGLTPASRLLVGPGLNQTPFLTLMLSTFFVSSFLGLDEWFQHETGPSPFELANGRDIWTLSGHDRASASSSTTGWSRTAVSSWTSWSRSAATCSEGSAPSSTSPAGSVVPPRPSRRLSRTWRAACWTSHTSSPMLPPTPP

SEQ ID NO: 6562 - protein, 239 aa, Zea mays subsp. mays
  peptide (1)..(239): Ceres Seq. ID no. 12340814
MTLSKKQGAGTDQQALLDAQLQLWHHTIAFVKSMALKAAVDLRIADAIHLHGGSATLSQIVTKVTLHPSKIPCLRRLMRVLTLTGVFSVNTGAVVDEPVYGLTPASRLLVGPGLNQTPFLTLMLSTFFVSSFLGLDEWFQHETGPSPFELANGRDIWTLSGHDRASASSSTTGWSRTAVSSWTSWSRSAATCSEGSAPSSTSPAGSVVPPRPSRRLSRTWRAACWTSHTSSPMLPPTPP

SEQ ID NO: 6563 - DNA, 1282 bp, Zea mays subsp. mays
  misc_feature (1)..(1282): Ceres Seq. ID no. 12346078
  misc_feature (1)..(1282): Ortholog of  Ceres SEQ ID NO 15170517 as cited in SEQ ID NO 52861
ctactttacacctcctcttcttcttcttcctcgtgcagcagctgtccatcgccgctgggttttctttgttggcattgggttttggaggagaggtcaaggctgagactcggagacgaaatgggtcataggatgttcagtcccttgggcttccttcttcttgccatcgtcgtcctctatggtggaacagagcagaggcgagcggaggcagcagaaggagggagcccgcacaggctgctggccaccatctcggtgtccaagccgtcctaccccacggtcaccacgcccatgtcggcctacggcgacccggtctccacgccagccaccccgtactcaacgttcccgtcgctggcgaccgggaacggcggtgccggtgccggtgcaggcggcggtgctggtgtaggcgggggcggcggcggcggcgggacgtggtgcgtggccagccagagcgcgagcccgaccgcgctgcaggtcgcgctggactacgcctgcggctatggcgccgactgctccccgatccagcagggcgggagctgcttcaaccccgacaccgtccacgaccacgcgtcctacgcctttaacagctactaccagaagaaccccgccccaaccagctgcgacttcggcggcacggccaccatcaccaacaccgatcccagttcagggtcgtgccagtacccatcgtcaagcggtggcgctcagagcacgatgcccccgccatccccgacgagcatgccgccgacagtgcccaccgccccgatgaccccgacgccgatgacgccggacaccaccccgaccaccggcaccccggtctacggattgtccccacccgactacggctcattgtccccacccgactctggctcgatgtcccctcccggctacggatcgacgtctcccccggactacaacgacgtcggcgccgccgcgacgacggggcagggcggcgcggcgctggcgctggcgcttctgtgcgtcctggtcgcgacagtatctctgcacgtctccaaatgagagcggcggcataggaggaaattatgcatgcctgtttcggttgagacgttacatggcgcgccccgtgcgtggtggctgaaagacgcacgcacaggtccatcgccgaggatctccggtggtgtgctgcccggcgccgggggagcattcgagcagtgttgcaagtctgcttagtgttgtataagaaatgaggcgagcttctagcagcgcccgagttctagcagatgcaccagatgtttatacatacatacatacatgcttaaatatataatgg

SEQ ID NO: 6564 - protein, 336 aa, Zea mays subsp. mays
  peptide (1)..(336): Ceres Seq. ID no. 12346079
LLYTSSSSSSSCSSCPSPLGFLCWHWVLEERSRLRLGDEMGHRMFSPLGFLLLAIVVLYGGTEQRRAEAAEGGSPHRLLATISVSKPSYPTVTTPMSAYGDPVSTPATPYSTFPSLATGNGGAGAGAGGGAGVGGGGGGGGTWCVASQSASPTALQVALDYACGYGADCSPIQQGGSCFNPDTVHDHASYAFNSYYQKNPAPTSCDFGGTATITNTDPSSGSCQYPSSSGGAQSTMPPPSPTSMPPTVPTAPMTPTPMTPDTTPTTGTPVYGLSPPDYGSLSPPDSGSMSPPGYGSTSPPDYNDVGAAATTGQGGAALALALLCVLVATVSLHVSK

SEQ ID NO: 6565 - protein, 297 aa, Zea mays subsp. mays
  peptide (1)..(297): Ceres Seq. ID no. 12346080
MGHRMFSPLGFLLLAIVVLYGGTEQRRAEAAEGGSPHRLLATISVSKPSYPTVTTPMSAYGDPVSTPATPYSTFPSLATGNGGAGAGAGGGAGVGGGGGGGGTWCVASQSASPTALQVALDYACGYGADCSPIQQGGSCFNPDTVHDHASYAFNSYYQKNPAPTSCDFGGTATITNTDPSSGSCQYPSSSGGAQSTMPPPSPTSMPPTVPTAPMTPTPMTPDTTPTTGTPVYGLSPPDYGSLSPPDSGSMSPPGYGSTSPPDYNDVGAAATTGQGGAALALALLCVLVATVSLHVSK

SEQ ID NO: 6566 - protein, 293 aa, Zea mays subsp. mays
  peptide (1)..(293): Ceres Seq. ID no. 12346081
MFSPLGFLLLAIVVLYGGTEQRRAEAAEGGSPHRLLATISVSKPSYPTVTTPMSAYGDPVSTPATPYSTFPSLATGNGGAGAGAGGGAGVGGGGGGGGTWCVASQSASPTALQVALDYACGYGADCSPIQQGGSCFNPDTVHDHASYAFNSYYQKNPAPTSCDFGGTATITNTDPSSGSCQYPSSSGGAQSTMPPPSPTSMPPTVPTAPMTPTPMTPDTTPTTGTPVYGLSPPDYGSLSPPDSGSMSPPGYGSTSPPDYNDVGAAATTGQGGAALALALLCVLVATVSLHVSK

SEQ ID NO: 6567 - DNA, 1217 bp, Zea mays subsp. mays
  misc_feature (1)..(1217): Ceres Seq. ID no. 12344527
  misc_feature (1)..(1217): Ortholog of  Ceres SEQ ID NO 12593170 as cited in SEQ ID NO 63263
  misc_feature (1)..(1217): Ortholog of  Ceres SEQ ID NO 14301882 as cited in SEQ ID NO 64381
  misc_feature (1)..(1217): Ortholog of  Ceres SEQ ID NO 13597851 as cited in SEQ ID NO 64869
  misc_feature (1)..(1217): Ortholog of  Ceres SEQ ID NO 13662420 as cited in SEQ ID NO 68680
ctcttcagtctcctcgcgccaacgaccacatcccaccgaacaccgatcaaggtaaacctgttcgctgctccgccagaagccgaggtcgagctgttcacggcagcgagcatgcaccacgatcccaaccccttcgacgagggcgccgacgagaaccccttctcgaatggaggcggaggagcgcgtggcggaggcgtcaagccgcagtacgggttccggccgacggagcccgcggggttcggcggcgggcaggggcgatgcgaccaccgacatccctctggacaccatgaacgattcgaaggggcaaggcgaaggagctgtctcagtgggagtcagatctcaggaggagggagtcggatatcaggaggagggaggaagctctcaagagcgctggggtgcccatggaggacaagaactggccgcctttcttcccaatcatccaccatgatattgccaatgagataccagcaaacgctcagaagttgcagtatcttgcgtttgcgagctggcttggtattgtgctttgcctcttttggaattttattgctgtcatagtctgttggatcagagggggagattctaaactatttttcctggctaccatctatggtatgcttggcatccctttgtcctacttgatgtggtatagacctctgtaccgagcaatgagaactgacagtgctttcagctttggatggtttttcctttgttacctgctccatattggtttttgcatatttgctgccattgctcctgcagttgtattccgtggaaaatcattaacgggtatactggcagcgatcgacaccttttctgatcatgcaatagttgggatcttttactttgtcggatttgccttgttttgcttggagacacttgtgagcatatgggttcttcagaaagtatacatgtacttcagagggcacaagtaggctatggaagcacttgcaatagtcaaccaactaccatctcatctgattgccatgtggttttgtatgttaggacaacgtatatttttccgtttgcattgtggagggtaagtacgactatatgtataattttcggtttgcatggtggagggtaaatacgactatattgtagcgtctctctcgactgatctgtttttaaccccaattctttgctcatatacaaattgtgctttgtatgcacttttgtttgctaccaaggctgcacattgtatgcacttctgttggtgcctt

SEQ ID NO: 6568 - protein, 183 aa, Zea mays subsp. mays
  peptide (1)..(183): Ceres Seq. ID no. 12344528
LFSLLAPTTTSHRTPIKVNLFAAPPEAEVELFTAASMHHDPNPFDEGADENPFSNGGGGARGGGVKPQYGFRPTEPAGFGGGQGRCDHRHPSGHHERFEGARRRSCLSGSQISGGGSRISGGGRKLSRALGCPWRTRTGRLSSQSSTMILPMRYQQTLRSCSILRLRAGLVLCFASFGILLLS

SEQ ID NO: 6569 - protein, 176 aa, Zea mays subsp. mays
  peptide (1)..(176): Ceres Seq. ID no. 12344529
MEDKNWPPFFPIIHHDIANEIPANAQKLQYLAFASWLGIVLCLFWNFIAVIVCWIRGGDSKLFFLATIYGMLGIPLSYLMWYRPLYRAMRTDSAFSFGWFFLCYLLHIGFCIFAAIAPAVVFRGKSLTGILAAIDTFSDHAIVGIFYFVGFALFCLETLVSIWVLQKVYMYFRGHK

SEQ ID NO: 6570 - protein, 147 aa, Zea mays subsp. mays
  peptide (1)..(147): Ceres Seq. ID no. 12344530
MHHDPNPFDEGADENPFSNGGGGARGGGVKPQYGFRPTEPAGFGGGQGRCDHRHPSGHHERFEGARRRSCLSGSQISGGGSRISGGGRKLSRALGCPWRTRTGRLSSQSSTMILPMRYQQTLRSCSILRLRAGLVLCFASFGILLLS

SEQ ID NO: 6571 - DNA, 1579 bp, Zea mays subsp. mays
  misc_feature (1)..(1579): Ceres Seq. ID no. 12409052
  misc_feature (1)..(1579): Ortholog of  Ceres SEQ ID NO 13595870 as cited in SEQ ID NO 62101
  misc_feature (1)..(1579): Ortholog of  Ceres SEQ ID NO 13590241 as cited in SEQ ID NO 63878
  misc_feature (1)..(1579): Ortholog of  Ceres SEQ ID NO 13657939 as cited in SEQ ID NO 66349
  misc_feature (1)..(1579): Ortholog of  Ceres SEQ ID NO 13660597 as cited in SEQ ID NO 67655
  misc_feature (1)..(1579): Ortholog of  Ceres SEQ ID NO 15179308 as cited in SEQ ID NO 0
aaaaagctaaagctgtgtaagcagcagaatccaatccaatccccagctcgcgccgccccctctaatccctcctccgcagacagaggccggcgttcactcgggcatccgcgggacggacggggagcaaagcctcagcggcgagtgcgggcgatgaggtcttcggaggcgtcgtcgcggctcgtgcaggagctcgtgctgtacgccgccagcgccgcgctcagctgcctcgtcctcttcgctggcctccgccacctagaccccaaccgcgcggcttcccagaaggcgcagcagcagaagaaggagatcgccaagcgcctcggccggcccctcgtctccaccacgccctatgaggacgtgattgcgtgcgacgtcatcaaccccgacagcatcgacgtcgaattcgactccatcggcggcctggaccagatcaagcaggcgctctacgagctcgtcatcctgcccctgcgccgccccgagctcttcaccttcggcaagctcctcagcccccagaagggcgtcctcctctatggcccgcccggcacaggcaagaccatgctcgccaaggccatcgccagggagtccggcgccgtcttcatcaatgtcaggatctccaatctcatgagcaagtggttcggggacgcacagaagcttgtggctgctgtctttagtctcgctcacaagctccagcctgctattatcttcattgacgaggtcgacagtttcttggggcagcgacggacaactgaccatgaagccatgactaatatgaagacagagttcatgtccctctgggatggcttcaccactgaccagaatgctcgtgtaatggtcctggctgctacaaacaggccttctgagctagatgaggccatccttaggcgctttactcagatatttgaaattggaattcctgttcagagtgaaaggagcaagatacttcaggttgtgttgaagggagaaaatgtcgagcataatattgattatgatcacattgcaagtttgtgcgagggctttactggatcagacatcctagaactgtgcaagcaggccgcattctatcctatcagggagctgttggacgatgagaaaaaaggtaggaaattagataaacctaggcccttgagacaatcagacttggagagagccttgtcagtgtctagaaagggcaagaaggctgcaagttcagcactgcagtcacctttgtgggtacggccgacagattcagaagacgatcagatctcgtgaaaatctgcagcggagtaaatgcaggcattacgtcgataccgttaggtttccttatgcagtttgcagaggttcaacatatttatatatgtattaattcgttttgcgtttggaacctccaccgttttttttgaagcaaactgcagctggcgaagtggcaagcgtgccctcgtgtttaagttgatcatttcaaaatacgtgccccctgtgggccgtaaaactgagaactctatagttgtctggtcaacagtcggtcttggttgcctctgtattttatcttcggtttgactactctagggtggcgaattacaacatacagtataatgcagaaaggttc

SEQ ID NO: 6572 - protein, 414 aa, Zea mays subsp. mays
  peptide (1)..(414): Ceres Seq. ID no. 12409053
KKLKLCKQQNPIQSPARAAPSNPSSADRGRRSLGHPRDGRGAKPQRRVRAMRSSEASSRLVQELVLYAASAALSCLVLFAGLRHLDPNRAASQKAQQQKKEIAKRLGRPLVSTTPYEDVIACDVINPDSIDVEFDSIGGLDQIKQALYELVILPLRRPELFTFGKLLSPQKGVLLYGPPGTGKTMLAKAIARESGAVFINVRISNLMSKWFGDAQKLVAAVFSLAHKLQPAIIFIDEVDSFLGQRRTTDHEAMTNMKTEFMSLWDGFTTDQNARVMVLAATNRPSELDEAILRRFTQIFEIGIPVQSERSKILQVVLKGENVEHNIDYDHIASLCEGFTGSDILELCKQAAFYPIRELLDDEKKGRKLDKPRPLRQSDLERALSVSRKGKKAASSALQSPLWVRPTDSEDDQIS

SEQ ID NO: 6573 - protein, 364 aa, Zea mays subsp. mays
  peptide (1)..(364): Ceres Seq. ID no. 12409054
MRSSEASSRLVQELVLYAASAALSCLVLFAGLRHLDPNRAASQKAQQQKKEIAKRLGRPLVSTTPYEDVIACDVINPDSIDVEFDSIGGLDQIKQALYELVILPLRRPELFTFGKLLSPQKGVLLYGPPGTGKTMLAKAIARESGAVFINVRISNLMSKWFGDAQKLVAAVFSLAHKLQPAIIFIDEVDSFLGQRRTTDHEAMTNMKTEFMSLWDGFTTDQNARVMVLAATNRPSELDEAILRRFTQIFEIGIPVQSERSKILQVVLKGENVEHNIDYDHIASLCEGFTGSDILELCKQAAFYPIRELLDDEKKGRKLDKPRPLRQSDLERALSVSRKGKKAASSALQSPLWVRPTDSEDDQIS

SEQ ID NO: 6574 - protein, 230 aa, Zea mays subsp. mays
  peptide (1)..(230): Ceres Seq. ID no. 12409055
MLAKAIARESGAVFINVRISNLMSKWFGDAQKLVAAVFSLAHKLQPAIIFIDEVDSFLGQRRTTDHEAMTNMKTEFMSLWDGFTTDQNARVMVLAATNRPSELDEAILRRFTQIFEIGIPVQSERSKILQVVLKGENVEHNIDYDHIASLCEGFTGSDILELCKQAAFYPIRELLDDEKKGRKLDKPRPLRQSDLERALSVSRKGKKAASSALQSPLWVRPTDSEDDQIS

SEQ ID NO: 6575 - DNA, 1772 bp, Zea mays subsp. mays
  misc_feature (1)..(1772): Ceres Seq. ID no. 12406872
  misc_feature (1)..(1772): Ortholog of  Ceres SEQ ID NO 14307831 as cited in SEQ ID NO 54732
ccaagcggtgggggtggaggagcagcagctggtgcaggtgcagcagcaggggacgacgacttcgccttctactgctcctacctccaggacgccgacgctgccgccgcctcagcgacgtcgacgctcgccctcgccgtcgacgaccccaaccccaaccccagcgccgcagggatgacgaacggccggcgccggaagcagcgcggggcagaggacgccggagccgccggggaaggggaggaggaggccaagaaggacggcaagaagcggtccatagccaagctgctcacctcgctggcggcgctggaggcggaggagcacgccgaccgcgcgggcgccgcggacgcgtccaggcgggagctggcgctgctcgagtccaacgccgacacccgctcgcaggccaccatggactactacgccaagatggagagcagcttcgacgccaccgccgagtccgaggccgccgccaggtccaagcgctccaggctcgccgcgtcggccgccaccgcggccgtcgtggccggggaggaggcggcagcgtcagcggcggcgtcgccctccgcgtcggcctcgccgacgcgcgccgcggggcaggggcagggaggccaccaccagcgccggctgtgggtcaaggaccggtcgcgcgcgtggtgggaccggtgcaacagcgccgactaccggaggaggagttccggcgcgcgttccggatggggcgcgggaccttcgacatgatctgcgacgcgctgggctcctcggtggccaaggaggacaccatgctccgcgccgccatccccgtccgccagcgcgtcgccgtctgcgtctggcgcctcgccacgggggagccgctccgcctcgtttccaagcgcttcggcctcggcatctccacctgccacaagctcgtcctggaggtgtgcgccgccatcaagtccgtgctcatgccgcgcttcctgcagtggcccgacgccgacgccgcggcgcgcttcaaggagggcttcgagcgcgcctcgggcgtgccgggcgtcatcggcgccatgtacaccacccacatccccatcatcgcgcccaagatctcggtggcggcctacttcaaccgccgccacacggagcgcaaccagaagacgtcctactccatcactctccagggcgtcgtcggccccgacggcgccttcaccgacgtctgcatcggctggcccggctccatgcccgacgaccaggtcctggagaagtccatgctccaccagcgcgccgcggcggggatgatgcacgactcgtggctggtggctggcgccagctacccgctcatggactgggtgctggtgccgtacacgcaccccaacctgacgtggacgcagcacgcgttcaacgagaaggtggccgagctccggcgcgtcgcggtggaggcgttcgcgcgcctcaaggcgcgctgggcgtgcctgcagaagcgcaccgaggtcaagctgcaggacctccccgtcgtgctgggcgcctgctgcgtgctccacaacatctgcgagattcggggcgaggaggtggacccagccatccgctgcgaactggtggacgacgagaccacgccggagaaccccgtgcgctccgagacggccagtcgcgccagggacaacatcgcgcacaacctgctccaccgtggcttgggcggcaacacattcttctgatctcatccgtcaccttcttcttttttatgctttgctagtacagtagtacagaattgggctggaacaagaaagaaataggcattcttttcttttaattacact

SEQ ID NO: 6576 - protein, 555 aa, Zea mays subsp. mays
  peptide (1)..(555): Ceres Seq. ID no. 12406873
KRWGWRSSSWCRCSSRGRRLRLLLLLPPGRRRCRRLSDVDARPRRRRPQPQPQRRRDDERPAPEAARGRGRRSRRGRGGGGQEGRQEAVHSQAAHLAGGAGGGGARRPRGRRGRVQAGAGAARVQRRHPLAGHHGLLRQDGEQLRRHRRVRGRRQVQALQARRVGRHRGRRGRGGGGSVSGGVALRVGLADARRGAGAGRPPPAPAVGQGPVARVVGPVQQRRLPEEEFRRAFRMGRGTFDMICDALGSSVAKEDTMLRAAIPVRQRVAVCVWRLATGEPLRLVSKRFGLGISTCHKLVLEVCAAIKSVLMPRFLQWPDADAAARFKEGFERASGVPGVIGAMYTTHIPIIAPKISVAAYFNRRHTERNQKTSYSITLQGVVGPDGAFTDVCIGWPGSMPDDQVLEKSMLHQRAAAGMMHDSWLVAGASYPLMDWVLVPYTHPNLTWTQHAFNEKVAELRRVAVEAFARLKARWACLQKRTEVKLQDLPVVLGACCVLHNICEIRGEEVDPAIRCELVDDETTPENPVRSETASRARDNIAHNLLHRGLGGNTFF

SEQ ID NO: 6577 - protein, 321 aa, Zea mays subsp. mays
  peptide (1)..(321): Ceres Seq. ID no. 12406874
MGRGTFDMICDALGSSVAKEDTMLRAAIPVRQRVAVCVWRLATGEPLRLVSKRFGLGISTCHKLVLEVCAAIKSVLMPRFLQWPDADAAARFKEGFERASGVPGVIGAMYTTHIPIIAPKISVAAYFNRRHTERNQKTSYSITLQGVVGPDGAFTDVCIGWPGSMPDDQVLEKSMLHQRAAAGMMHDSWLVAGASYPLMDWVLVPYTHPNLTWTQHAFNEKVAELRRVAVEAFARLKARWACLQKRTEVKLQDLPVVLGACCVLHNICEIRGEEVDPAIRCELVDDETTPENPVRSETASRARDNIAHNLLHRGLGGNTFF

SEQ ID NO: 6578 - protein, 314 aa, Zea mays subsp. mays
  peptide (1)..(314): Ceres Seq. ID no. 12406875
MICDALGSSVAKEDTMLRAAIPVRQRVAVCVWRLATGEPLRLVSKRFGLGISTCHKLVLEVCAAIKSVLMPRFLQWPDADAAARFKEGFERASGVPGVIGAMYTTHIPIIAPKISVAAYFNRRHTERNQKTSYSITLQGVVGPDGAFTDVCIGWPGSMPDDQVLEKSMLHQRAAAGMMHDSWLVAGASYPLMDWVLVPYTHPNLTWTQHAFNEKVAELRRVAVEAFARLKARWACLQKRTEVKLQDLPVVLGACCVLHNICEIRGEEVDPAIRCELVDDETTPENPVRSETASRARDNIAHNLLHRGLGGNTFF

SEQ ID NO: 6579 - DNA, 2183 bp, Zea mays subsp. mays
  misc_feature (1)..(2183): Ceres Seq. ID no. 12404878
  misc_feature (1)..(2183): Ortholog of  Ceres SEQ ID NO 14302008 as cited in SEQ ID NO 56021
gcattaccaagtgataataacggatctcattcagcctctctatagcataggaccaagatcatagtgccgtccctgccggcagagagcaagatggtctcacactcactctcagcatggtccatgtcctcggcgccgccgccggntggttcgccgccctggtcgccgtgggcctgtacacggcgctgcggtccgccgccaccttcctggcgtggctccaccgcgcgttcctgcgcccaggccgggacctggcggggcggtacgggacgtgggcggtggtgaccggcgccacggacggcatcgggcgcgcggtggcgctggagctggcgcgcgcggggctccacctcgtgctggtggggcggagccccgacaagctggcgcgggtggcgaaggagctctgcggccnccgcgccggcgtgcaaggtgcggagcgtggcgttcgacctcgccgtgaccggggacnccgcgcggcgcggggtggcgcgggtgnnggccgccgtggagggccgcgacgtgggcgtgctcgtcaacaacgccggcgcgacgtacccgtgcgccgcctacttccacgaggtggagggccccgtgtgggaggccgtggtgcgggtcaacgtcgaggccgccacgcggatcacgcgcgccctgctgccggcgatggcggccaggggcaggggcgccgtcgtcaacgtgggctccggctccagcgtcgtcgtcccggccttcccgctctacgccgtctacgcggccagcaaagcgtacgtcgaccagttttctcgaagcctgagtgtggaatacaaacaatacggcgtagacgtgcagtgccagatacccctgtacgtcgctaccaagatgtcgcccgtgaagggcgcgtctccgttcataccgtcgcccgaggagtacgccagggccgcccttcgctgcgttggctacgaggcgaggtgcgtcccgtactggcgccactcggtccagtggttcctggcgtccctagcgccggacgctgctctcaaccactggcgcctccaaactggcctccagaagaggaacgagatgaaggctctgctaaggggaaaagactgcagttagattaataataatagtaattgttgtatagattggaatattatagccttccagacagtactcgcgatcgtgcacttatttaccctctctgtttctttttagttgtcgctagatagttgaacaactaaaaaagaaaccaaagaagtatctgtcagctctattccgtacagacgcgaacccatggtacgcgcgtatgtatccatgtagtggttctttttcagtggtaagggtaaaacgcgcgaggtncaaaaaaaaaaaaaaaaaagcttctcgtgccgttttttttttttttttttatataatagcaaattttattcatgatattacacagatacggtaatgtaagatatcatattaagggcttgttcggttaggtgtggattgaagagtattggaggagattaaaacccctctattagaatagaaggaaaattaatcaccttcaattcccttcgatacagacacaaccaaacaagccctaatagggttgtagtcttatgaaattacacaagggagcatggctccttattctgcaactttgctttgagcttcaggctcgcacatggagaaggagacatccttaggcgctagcaccctcttcaacaggtttgaattcctgcagctccttgaacttctcccatggcttctcccataccttagcttcgtagagcttcttgacttcgccatccttcacttcaatagtgagatagtacatcgtgccagcaaccacttgtgtcttggccttcacaagcttctcgaaccccagaagagcattggccttcttgttgtgctcatcgacggcgaagcgggcgagctcctggaggtgaaggtcgttctcgctccccggcacgtcctggatgccgcccaccaacgtcccggtgttgttggccatggaatcctcctgtgcgttgcgggtggacgatacggcgagggcaagcagtatgagcagggcagacacgagtgagacgattcgatgtttgcgcatctggattggggaattggggcggaaatttatagccggagaagatcccgggagacgactggaggaggctacgatgaacgatctgtcaatgcgatattgttgtggcggatatcattgtgctgct

SEQ ID NO: 6580 - protein, 323 aa, Zea mays subsp. mays
  peptide (1)..(323): Ceres Seq. ID no. 12404879
  misc_feature (10)..(10): Xaa is any aa, unknown or other
  misc_feature (97)..(97): Xaa is any aa, unknown or other
  misc_feature (116)..(116): Xaa is any aa, unknown or other
  misc_feature (125)..(125): Xaa is any aa, unknown or other
MVHVLGAAAXWFAALVAVGLYTALRSAATFLAWLHRAFLRPGRDLAGRYGTWAVVTGATDGIGRAVALELARAGLHLVLVGRSPDKLARVAKELCGXRAGVQGAERGVRPRRDRGXRAARGGAGXGRRGGPRRGRARQQRRRDVPVRRLLPRGGGPRVGGRGAGQRRGRHADHARPAAGDGGQGQGRRRQRGLRLQRRRPGLPALRRLRGQQSVRRPVFSKPECGIQTIRRRRAVPDTPVRRYQDVAREGRVSVHTVARGVRQGRPSLRWLRGEVRPVLAPLGPVVPGVPSAGRCSQPLAPPNWPPEEERDEGSAKGKRLQLD

SEQ ID NO: 6581 - DNA, 721 bp, Zea mays subsp. mays
  misc_feature (1)..(721): Ceres Seq. ID no. 12374412
  misc_feature (1)..(721): Ortholog of  Ceres SEQ ID NO 15174240 as cited in SEQ ID NO 61866
  misc_feature (1)..(721): Ortholog of  Ceres SEQ ID NO 13596039 as cited in SEQ ID NO 62117
aaaaaccctagactgcacccccatcccgcagcagccaaaacctacctagccgccgccgcaggcggccccccatcgccgccaagatgcagatctttgtgaagactctgacggggaagaccatcactttggaggtggagtcctccgacaccattgacaatgtgaaggccaagatccaggacaaggagggcatccccccggaccagcagcggctcatcttcgccggcaagcagctcgaggacggtcgcaccctcgccgactacaacattcagaaggagtccaccctccacctggtgctccgcctccgcggtggcgccaagaagcgtaagaagaagacgtacaccaagcccaagaagatcaagcacaagcacaagaaggtgaagctctccgtgctgcagttctataaggtggacgacgccactggcaaggtgacccgcctccgcaaggagtgccccaacacagagtgcggcgcgggcgtcttcatggccaaccacttcgaccgccactactgcggcaagtgcggcctcacctatgtctacaaccagaaggcgtaattgcttgccccgatttgctttatccgccaacctatcaagcattcagatgttggttactcaaattgtatctcatttagatctgtctgaggttgaaacttaaatggagcagtagtatctatcatattggtacccctgttactgagtataattttgttttcatatccatcctt

SEQ ID NO: 6582 - protein, 155 aa, Zea mays subsp. mays; identical to SEQ ID NO: 4073
  peptide (1)..(155): Ceres Seq. ID no. 12374413

SEQ ID NO: 6583 - DNA, 1054 bp, Zea mays subsp. mays
  misc_feature (1)..(1054): Ceres Seq. ID no. 12412719
  misc_feature (1)..(1054): Ortholog of  Ceres SEQ ID NO 13595271 as cited in SEQ ID NO 56058
  misc_feature (1)..(1054): Ortholog of  Ceres SEQ ID NO 14315170 as cited in SEQ ID NO 60009
  misc_feature (1)..(1054): Ortholog of  Ceres SEQ ID NO 13656105 as cited in SEQ ID NO 65310
agaggcgttggctcgtgtatttttgcaaatatctcctatcccttttctccctcccgcgatctcctccgctcgacgcctgtaccccgccgtcccgcgtccccggtccagctcgaaaccctagacctgtgcggctgtccctattctccccaacggaaagatgtactcggaccagatctccaccgggcgcaagcgctccatccacgaccgccttgacggcgacctccccgccggcacgggcgccggcggccgtgttcgtcacacggtgtccaagaggcaacggcagatagatgaaaaatggaagcatgatctgtatcgggaagacgatgaaccagcttcaaaatcaatagatccaaaggatttgcgattgaagcttcagaggcgaagttctcaacaaagctttaccagcacaaggagatctggtgtgcgtgatttacgtgagaagctatctggtataatgcacccacagccatcaaatgctgatccaaagcccaagccaaagccagtatcagaggttgttaacatctcaaggcgtcaaactgctgatgaaatgcctgcacgtcaaagcaagagagcaccaaaacagacttcattgaagaagacttcacagccaaaggctgaaagtccactcggcagtttcctgagttcccttgggcttgagaagtattcgattaccttccaggcagaggaggttgacatggcagccctaaggcatatgacggagagtgatctgaaagctttgggcattccaatgggtcctcggaagaagattatccttgccttggagccaagagcataagggaatggcaagtgtaggaaggtgggagggatttgctaggcatgctcatgtgcaagttcgataaaactctgtaaccacatcttggaaagggacaaagggtaacaacgacaatggtttgtgggcttcttgtaacacatatcctgccctgttgagcatgttcaacgaagtttaggatgttagaaggcaggccacggcgtgtattgatgcaacttctatttctgtgttgattaaatggtgcggtatacatgttggggctcc

SEQ ID NO: 6584 - protein, 212 aa, Zea mays subsp. mays
  peptide (1)..(212): Ceres Seq. ID no. 12412720
MYSDQISTGRKRSIHDRLDGDLPAGTGAGGRVRHTVSKRQRQIDEKWKHDLYREDDEPASKSIDPKDLRLKLQRRSSQQSFTSTRRSGVRDLREKLSGIMHPQPSNADPKPKPKPVSEVVNISRRQTADEMPARQSKRAPKQTSLKKTSQPKAESPLGSFLSSLGLEKYSITFQAEEVDMAALRHMTESDLKALGIPMGPRKKIILALEPRA

SEQ ID NO: 6585 - protein, 113 aa, Zea mays subsp. mays
  peptide (1)..(113): Ceres Seq. ID no. 12412721
MHPQPSNADPKPKPKPVSEVVNISRRQTADEMPARQSKRAPKQTSLKKTSQPKAESPLGSFLSSLGLEKYSITFQAEEVDMAALRHMTESDLKALGIPMGPRKKIILALEPRA

SEQ ID NO: 6586 - DNA, 1357 bp, Zea mays subsp. mays
  misc_feature (1)..(1357): Ceres Seq. ID no. 12356351
  misc_feature (1)..(1357): Ortholog of  Ceres SEQ ID NO 14306671 as cited in SEQ ID NO 53809
  misc_feature (1)..(1357): Ortholog of  Ceres SEQ ID NO 15178206 as cited in SEQ ID NO 57238
aggagaactcgaacagacatccgctccccgctcccgagtcccgagtaccggcctcgcggtctcggttcggctacgcccggtccctagagaaaggccacacacacccggacaccccccacttcttgctctcgcagtgtcgctcactcctgccgccaccatctggatcacgtcgccggcgccaatgtcggcgcacctcaccgtcgcgctgttgctcgcagtagccgccgcgtcggcccgcggctccgacgtgccgtcgttcccgctctcccaggcgcagtccccgtccaactcctcgtccccgtcgaacgcctcctcgccgccgtgtcacctcgacctctccgcccgagctcttcggtggcgtggcagcggcgtgcggctccagcggggggccgggctcgctcgaccgcggccgctgctgccctgtcctcgcggcctggctcttcgcggcgcacgcgcgcaccgcgctgtccgtgcccccggcacccgccccctcggcggtcgccggggaggaggggctggggcccggcgacgacgggcccatggtgccgtacgacaaccagaggtgcgtggacgcgctgggcgccgctttggagaagcgcggggtggcgctgccccggcccaacgcaacttgcgacactgtgctctgcttctgcggcatccggctccaccagatcggctcgctccgctgcccctccgcgttcgccgtcggcgctggcgctggcgccgcggccaagaacgccacgcccaccgccgccgtgaagggcctggagaagagctgccgcaacgcctcctacgccggctgctctcgatgcgtgcagtctctgcaaaagctgaaggggaacgtgagccgcgaggtctccggtgccggcggcgaccgcgcgcggcggatgctggggcgggactgccagcttatgggcctcacgtggctgctggccaagaacaagacggcgtacatccccaccgtctccgccgtgctgcgcgccatgctctacaccgcgcgcccgacggagtccgccggcgcggcgccgcggtgcagccccgaccaggagaacatgccgctggccgtggactcgctgcagttcgagcgcaccggcagcaccacgggatccgcggctgccaacgcgacgccgcgcggcgccctcctcctcggcctcgcgctcggcctgacgatcggccggtgggatgcgttctggttcttgtgaaccaatgcaaagagggctggaccgctgcagggcgtagggtcggtggtggaaccttgtcgatagacgtatcttgtagtgctagtcgttagcaggaggtactgtagcttattttgcatagcgaggatttggcagagatgacggcatgcatggctgtg

SEQ ID NO: 6587 - protein, 429 aa, Zea mays subsp. mays
  peptide (1)..(429): Ceres Seq. ID no. 12356352
GELEQTSAPRSRVPSTGLAVSVRLRPVPRERPHTPGHPPLLALAVSLTPAATIWITSPAPMSAHLTVALLLAVAAASARGSDVPSFPLSQAQSPSNSSSPSNASSPPCHLDLSARALRWRGSGVRLQRGAGLARPRPLLPCPRGLALRGARAHRAVRAPGTRPLGGRRGGGAGARRRRAHGAVRQPEVRGRAGRRFGEARGGAAPAQRNLRHCALLLRHPAPPDRLAPLPLRVRRRRWRWRRGQERHAHRRREGPGEELPQRLLRRLLSMRAVSAKAEGEREPRGLRCRRRPRAADAGAGLPAYGPHVAAGQEQDGVHPHRLRRAARHALHRAPDGVRRRGAAVQPRPGEHAAGRGLAAVRAHRQHHGIRGCQRDAARRPPPRPRARPDDRPVGCVLVLVNQCKEGWTAAGRRVGGGTLSIDVSCSASR

SEQ ID NO: 6588 - protein, 369 aa, Zea mays subsp. mays
  peptide (1)..(369): Ceres Seq. ID no. 12356353
MSAHLTVALLLAVAAASARGSDVPSFPLSQAQSPSNSSSPSNASSPPCHLDLSARALRWRGSGVRLQRGAGLARPRPLLPCPRGLALRGARAHRAVRAPGTRPLGGRRGGGAGARRRRAHGAVRQPEVRGRAGRRFGEARGGAAPAQRNLRHCALLLRHPAPPDRLAPLPLRVRRRRWRWRRGQERHAHRRREGPGEELPQRLLRRLLSMRAVSAKAEGEREPRGLRCRRRPRAADAGAGLPAYGPHVAAGQEQDGVHPHRLRRAARHALHRAPDGVRRRGAAVQPRPGEHAAGRGLAAVRAHRQHHGIRGCQRDAARRPPPRPRARPDDRPVGCVLVLVNQCKEGWTAAGRRVGGGTLSIDVSCSASR

SEQ ID NO: 6589 - protein, 220 aa, Zea mays subsp. mays
  peptide (1)..(220): Ceres Seq. ID no. 12356354
MVPYDNQRCVDALGAALEKRGVALPRPNATCDTVLCFCGIRLHQIGSLRCPSAFAVGAGAGAAAKNATPTAAVKGLEKSCRNASYAGCSRCVQSLQKLKGNVSREVSGAGGDRARRMLGRDCQLMGLTWLLAKNKTAYIPTVSAVLRAMLYTARPTESAGAAPRCSPDQENMPLAVDSLQFERTGSTTGSAAANATPRGALLLGLALGLTIGRWDAFWFL

SEQ ID NO: 6590 - DNA, 1345 bp, Zea mays subsp. mays
  misc_feature (1)..(1345): Ceres Seq. ID no. 12348011
  misc_feature (1)..(1345): Ortholog of  Ceres SEQ ID NO 14303047 as cited in SEQ ID NO 66871
actccggcattcgcccccaaaaaatcgagccgaaaaagatcaaaagaaaaaaaaaagaagaaaaaaaaccctaaccactccgatcgaatcatccgagggccgcagcagcccgacgaggctatgtctcaggcaaccgccgcctcccgggatcgcttcccctggtgatacaactcgggccgttcatttcatctttccgtggggatatgagggccgctccgaccgatccgcccacggcgccggcgaagtcgatgctgaggcggctgttcgatcgccagctcctgcggatctcgccagcggagcgtctaccgtcggcgggggcgggagagaaggatgaggcggagccgagctccgtgtgcctggacggcatggtgcgcagcttcatggaggacgacgtcggcagcgagaaggctgcccacgggggccggtactgtaactgcttccacggaggcgataattcagatgacgaggaggacgacgaagcggcggcggcggcctccgacgtcgccgagacgatcaagggcctcgtccactgcgccacgcttcgggagcgcaacctcctcgccgacgtgtgcgcgcacctggagcggcatcgcgaggcgggggcccggcggcgcgacctcctccgcctggtagcctcgtcgctgcgcggcgcggggcacgacgcctccgtctgcgtctcccgctgggacaagtccccgtcccacccggtcggcgagcacgcttacatcgacgtgctcctcccggcggcctcggaccgcggcgcgcgcgagcgcgtcctggtggacgtggacttccggtcggcgttcgaggtcgcgcgacccaccaaggcgtaccgcgccctgctgcagcggctgccggcggtgttcgtgggcaaggacgacaggctccgcctcctcgttgccgccgccgccgacgccgcgcgcgccagcctcaagaagcgcggcctccacctcccgccctggcgtaagcccgagtacatgcgcgccaagtggctctccccctaccaccgcgaggcgccggtggccgaagaggcggcctccgcctccgcggacgaggacgacgggttcggacccggaaccggaaccgccgcgtgacaactggacacttgcaatttttgtcttggaagaggttgtagctgcaaaagcttgagattctcttgaaattactctttgttcgggggttgtacctagagtaactatggactacggtgtgtgtgagagagagagagaggtatgcatcactcatcactgtgctgagtaccgcgcgagaaatgaaggcgaggggtatatcatgggtagtgctagttttaggaagagaaataaagcaaaatatcggattaatatcc

SEQ ID NO: 6591 - protein, 296 aa, Zea mays subsp. mays
  peptide (1)..(296): Ceres Seq. ID no. 12348012
MRAAPTDPPTAPAKSMLRRLFDRQLLRISPAERLPSAGAGEKDEAEPSSVCLDGMVRSFMEDDVGSEKAAHGGRYCNCFHGGDNSDDEEDDEAAAAASDVAETIKGLVHCATLRERNLLADVCAHLERHREAGARRRDLLRLVASSLRGAGHDASVCVSRWDKSPSHPVGEHAYIDVLLPAASDRGARERVLVDVDFRSAFEVARPTKAYRALLQRLPAVFVGKDDRLRLLVAAAADAARASLKKRGLHLPPWRKPEYMRAKWLSPYHREAPVAEEAASASADEDDGFGPGTGTAA

SEQ ID NO: 6592 - protein, 281 aa, Zea mays subsp. mays
  peptide (1)..(281): Ceres Seq. ID no. 12348013
MLRRLFDRQLLRISPAERLPSAGAGEKDEAEPSSVCLDGMVRSFMEDDVGSEKAAHGGRYCNCFHGGDNSDDEEDDEAAAAASDVAETIKGLVHCATLRERNLLADVCAHLERHREAGARRRDLLRLVASSLRGAGHDASVCVSRWDKSPSHPVGEHAYIDVLLPAASDRGARERVLVDVDFRSAFEVARPTKAYRALLQRLPAVFVGKDDRLRLLVAAAADAARASLKKRGLHLPPWRKPEYMRAKWLSPYHREAPVAEEAASASADEDDGFGPGTGTAA

SEQ ID NO: 6593 - protein, 242 aa, Zea mays subsp. mays
  peptide (1)..(242): Ceres Seq. ID no. 12348014
MVRSFMEDDVGSEKAAHGGRYCNCFHGGDNSDDEEDDEAAAAASDVAETIKGLVHCATLRERNLLADVCAHLERHREAGARRRDLLRLVASSLRGAGHDASVCVSRWDKSPSHPVGEHAYIDVLLPAASDRGARERVLVDVDFRSAFEVARPTKAYRALLQRLPAVFVGKDDRLRLLVAAAADAARASLKKRGLHLPPWRKPEYMRAKWLSPYHREAPVAEEAASASADEDDGFGPGTGTAA

SEQ ID NO: 6594 - DNA, 2011 bp, Zea mays subsp. mays
  misc_feature (1)..(2011): Ceres Seq. ID no. 12372807
  misc_feature (1)..(2011): Ortholog of  Ceres SEQ ID NO 15171430 as cited in SEQ ID NO 51500
  misc_feature (1)..(2011): Ortholog of  Ceres SEQ ID NO 14304944 as cited in SEQ ID NO 53041
  misc_feature (1)..(2011): Ortholog of  Ceres SEQ ID NO 15170354 as cited in SEQ ID NO 54190
  misc_feature (1)..(2011): Ortholog of  Ceres SEQ ID NO 14307253 as cited in SEQ ID NO 54783
  misc_feature (1)..(2011): Ortholog of  Ceres SEQ ID NO 14312300 as cited in SEQ ID NO 58632
  misc_feature (1)..(2011): Ortholog of  Ceres SEQ ID NO 15176106 as cited in SEQ ID NO 60324
  misc_feature (1)..(2011): Ortholog of  Ceres SEQ ID NO 13654989 as cited in SEQ ID NO 63117
  misc_feature (1)..(2011): Ortholog of  Ceres SEQ ID NO 13584744 as cited in SEQ ID NO 69137
agaggacgcgcacccggggtggagctgagagcaacaggagctcctgcggcgaattcgggccccgagtacgccggttcaggcggccgccgccggtggaattgtgccagtcgaggtggcctgctggtgcggcgggagtttgcgagtagggcggttccggttttgagtgagcgaaggtgttgttgggggcgtggatctggccggcggcgggcgatgggaaggagggactagggctcgattggagggaaaggcgtgatccatgggcggatgcttctcgcaggaggagcaccggctccagagcaggccagctgaagctgctggaccagacggactgcagaagtcaaaatctgattctaaagctacagcaagtgttcttgctccaccaaaagctgtggtggatctgcaagtggaaggatatggaaatgtgaatattttcacatatgacgaattgagcgcagccacaaaaaacttccgaccagatcaaattcttggagagggtgggtttggagttgtttacaaaggtgtaattgatgaaaatgttagagcaggtttcccatccaggcaggttgctgtgaaagaactaaacccagagggttttcaaggggacaaggagtggctggcagaagtcaactatcttgggcaacttagtcatccaaatcttgttgaactgattggctattgctgtgagggttcacatagactgcttgtgtatgagtacatgggcttgtggaagcctcgaaaagcacctttttcggcgggtttgccttaatatgccatggtcaacacgcatgaagattgcattgggtgctgcaagggggctcgagtaccttcacagagctgagagatccatcatttatcgagatttcaagacatcaaacatcttgctagatgcggattataatgctaagctttcagactttggtctcgcaagaacaggtcctagtggagaccaaacccacgtgtcaactcgtgttatgggaacttatggatacgcggctccagaatatgtcatgactggccatctgacagcacgaagtgatgtttatggctttggagtcgtgcttctagagatgattattggaagaagggctgtggacgatagccggccgagccgtgagcataacctagttgactgggcacggcccctcctcgtccataacaggaagctgttccggataatcgatccaagaatggaagggcagtactccaccaaggctgccaccgaggtggcaagccttgcataccgctgcctgagccagaaccccaaaggacgaccaaccatgagccaagttgttgagacctttgaggccgtgcagaacatgcctgaatgccaggacatactcctccagaacggcatcacaggtgccgtgacgctctacgaggtcccaaaggagcctgcagacagagttgagctggagaaggccaagcaggaaccggcagtaaagaccgccgcaatcccgcccgtgaacggaaagccggccccccagagcaggcgaacgcggcctgggaatggccggagcaagagcgagccatcgttggagtgtaagatgtacatcccatcaccagactctgacgaacagcagctcggcctggaggcactggcgtccccaaatggcagcatgaaggaccatcctgatgaggatttgtacaagatataaaaccagagccctcgttgctcgccttttgcgccgcacaccccagttctcaaagatcggtcagttacaattttttctctgatagccaccggcctcgctagggttcttattcttccgattagcaatagtatgtagagggagagttgtgatggaaagcatgtgtgtgcttgccatgacgatgctgtagagatctgatacacttctttctggggaatttccactccaaaaatggaagttgagagatgtgtcctgacgattggtgcgttttacccgtgtgttgagtttacttgtaaagatgcttcttcgttgtaatcttcagttctgcgggaaatcaacaccagcatagaaattgatagatc

SEQ ID NO: 6595 - protein, 315 aa, Zea mays subsp. mays
  peptide (1)..(315): Ceres Seq. ID no. 12372808
MSTWACGSLEKHLFRRVCLNMPWSTRMKIALGAARGLEYLHRAERSIIYRDFKTSNILLDADYNAKLSDFGLARTGPSGDQTHVSTRVMGTYGYAAPEYVMTGHLTARSDVYGFGVVLLEMIIGRRAVDDSRPSREHNLVDWARPLLVHNRKLFRIIDPRMEGQYSTKAATEVASLAYRCLSQNPKGRPTMSQVVETFEAVQNMPECQDILLQNGITGAVTLYEVPKEPADRVELEKAKQEPAVKTAAIPPVNGKPAPQSRRTRPGNGRSKSEPSLECKMYIPSPDSDEQQLGLEALASPNGSMKDHPDEDLYKI

SEQ ID NO: 6596 - protein, 295 aa, Zea mays subsp. mays
  peptide (1)..(295): Ceres Seq. ID no. 12372809
MPWSTRMKIALGAARGLEYLHRAERSIIYRDFKTSNILLDADYNAKLSDFGLARTGPSGDQTHVSTRVMGTYGYAAPEYVMTGHLTARSDVYGFGVVLLEMIIGRRAVDDSRPSREHNLVDWARPLLVHNRKLFRIIDPRMEGQYSTKAATEVASLAYRCLSQNPKGRPTMSQVVETFEAVQNMPECQDILLQNGITGAVTLYEVPKEPADRVELEKAKQEPAVKTAAIPPVNGKPAPQSRRTRPGNGRSKSEPSLECKMYIPSPDSDEQQLGLEALASPNGSMKDHPDEDLYKI

SEQ ID NO: 6597 - protein, 289 aa, Zea mays subsp. mays
  peptide (1)..(289): Ceres Seq. ID no. 12372810
MKIALGAARGLEYLHRAERSIIYRDFKTSNILLDADYNAKLSDFGLARTGPSGDQTHVSTRVMGTYGYAAPEYVMTGHLTARSDVYGFGVVLLEMIIGRRAVDDSRPSREHNLVDWARPLLVHNRKLFRIIDPRMEGQYSTKAATEVASLAYRCLSQNPKGRPTMSQVVETFEAVQNMPECQDILLQNGITGAVTLYEVPKEPADRVELEKAKQEPAVKTAAIPPVNGKPAPQSRRTRPGNGRSKSEPSLECKMYIPSPDSDEQQLGLEALASPNGSMKDHPDEDLYKI

SEQ ID NO: 6598 - DNA, 1776 bp, Zea mays subsp. mays
  misc_feature (1)..(1776): Ceres Seq. ID no. 12373590
  misc_feature (1)..(1776): Ortholog of  Ceres SEQ ID NO 15170420 as cited in SEQ ID NO 54814
  misc_feature (1)..(1776): Ortholog of  Ceres SEQ ID NO 14312785 as cited in SEQ ID NO 55622
  misc_feature (1)..(1776): Ortholog of  Ceres SEQ ID NO 13596925 as cited in SEQ ID NO 62299
aaagaaaaacggtccaccacaccttgtatgtgccctccggcgggcgggtcagagctcgcaactcgcaccagcacagcagcaccggcagcaccaccaaccccagggcagccgcgccgccagccacgacaagcttagcagcccctcgcactcgctagggtatttattggtacaatcgggtgatctgcgtgccgcatcgcgccgggacacgggagacaatggcgttcacgacgctcggcggctgtggggcgcaggcttcagtgcggttggctccccagaatggaatccttggatctaattcgaagccattcgcgggcatcatactcaagaaacctcagcaggttggatccctgcccctccgtgcaaggggatccattttttcttcaccacgcaggcttttctcccctaaggcagcagcccctaaatcaggggattccatacgcattgcagtgctaggggccagcggttatactggagctgagattgttcggattctagcgaaccaccctcagtttcatataaaagtgatgactgcagatagaaaagctggcgagcaatttggatcagtatttcctcacttgataacacaggacctgccgagactggtcgcaataaaagacgctgacttttcagatgttgatgctgttttttgctgcttgccacatggtacaacccaggaaattatcaaaagcttaccccgacacttaaagattgttgatctctcagcggacttccgactacgcgacattaatgagtatgctgagtggtatggacattcccacagggcaccggaacttcagggggaagctgtgtatggtttgaccgaacttaaacgagatgacataagaaatgcacgcctggtagcaaatccagggtgttatcccacatctattcaacttccgctcgttcctttggtaaaggcaaaactgatcaagctaaccaacattattattgatgcaaaatctggagtcagtggtgcaggacgtggggctaaggaagcaaatctttacactgaaatcgctgagggtatccatgcttatgggataacaagccatcggcatgtgcctgagattgagcaaggacttacagatgctgctgaatcaaaagttactatcagctttactccacatttgatgtgtatgaaacgtgggatgcaatctactgtgtatgttgaattggcatctggagtgactcccagggatttgtatgaacacctaaagtctacttacgagaatgaagaatttgtcaagctgttacatggtagcaatgttccttgcacaagccatgttgtgggatcaaattactgcttcatgaatgtctatgaggatagaatacctggaagggccatcatcatctctgtcatagataatcttgtgaagggagcatctggtcaggctttgcaaaatcttaatctgatgatgggactgcctgagaatatggggctgcaataccagcccctgttcccttgatcttttgtgtcattatctattattacattatttaggagtccagaaaccaaattatcattactgtcaagaggtggcaaggagcctgacatcagaattcagtcaagtcgaagttagacagttagtgtagcttggtctgtgttgttttagctttattaaaccattaagagaataatgatgatggcaatttagcagtacaatggtagtattatgtgggcagcttggttccaataaaatcataagcctatacacatcttgtgcccgcaatgttgtttgctattttgatcacgaaatcaatattgagcttgaatcc

SEQ ID NO: 6599 - protein, 416 aa, Zea mays subsp. mays
  peptide (1)..(416): Ceres Seq. ID no. 12373591
MAFTTLGGCGAQASVRLAPQNGILGSNSKPFAGIILKKPQQVGSLPLRARGSIFSSPRRLFSPKAAAPKSGDSIRIAVLGASGYTGAEIVRILANHPQFHIKVMTADRKAGEQFGSVFPHLITQDLPRLVAIKDADFSDVDAVFCCLPHGTTQEIIKSLPRHLKIVDLSADFRLRDINEYAEWYGHSHRAPELQGEAVYGLTELKRDDIRNARLVANPGCYPTSIQLPLVPLVKAKLIKLTNIIIDAKSGVSGAGRGAKEANLYTEIAEGIHAYGITSHRHVPEIEQGLTDAAESKVTISFTPHLMCMKRGMQSTVYVELASGVTPRDLYEHLKSTYENEEFVKLLHGSNVPCTSHVVGSNYCFMNVYEDRIPGRAIIISVIDNLVKGASGQALQNLNLMMGLPENMGLQYQPLFP

SEQ ID NO: 6600 - protein, 313 aa, Zea mays subsp. mays
  peptide (1)..(313): Ceres Seq. ID no. 12373592
MTADRKAGEQFGSVFPHLITQDLPRLVAIKDADFSDVDAVFCCLPHGTTQEIIKSLPRHLKIVDLSADFRLRDINEYAEWYGHSHRAPELQGEAVYGLTELKRDDIRNARLVANPGCYPTSIQLPLVPLVKAKLIKLTNIIIDAKSGVSGAGRGAKEANLYTEIAEGIHAYGITSHRHVPEIEQGLTDAAESKVTISFTPHLMCMKRGMQSTVYVELASGVTPRDLYEHLKSTYENEEFVKLLHGSNVPCTSHVVGSNYCFMNVYEDRIPGRAIIISVIDNLVKGASGQALQNLNLMMGLPENMGLQYQPLFP

SEQ ID NO: 6601 - DNA, 1460 bp, Zea mays subsp. mays
  misc_feature (1)..(1460): Ceres Seq. ID no. 12381233
  misc_feature (1)..(1460): Ortholog of  Ceres SEQ ID NO 15171556 as cited in SEQ ID NO 59687
  misc_feature (1)..(1460): Ortholog of  Ceres SEQ ID NO 15177935 as cited in SEQ ID NO 60258
  misc_feature (1)..(1460): Ortholog of  Ceres SEQ ID NO 13659033 as cited in SEQ ID NO 66372
  misc_feature (1)..(1460): Ortholog of  Ceres SEQ ID NO 12625899 as cited in SEQ ID NO 69079
  misc_feature (1)..(1460): Ortholog of  Ceres SEQ ID NO 15180051 as cited in SEQ ID NO 0
  misc_feature (1)..(1460): Ortholog of  Ceres SEQ ID NO 15180366 as cited in SEQ ID NO 0
aactattataaaaagtcgggcgcgccggcctcatctgacccgtccgtgtccgtgtccgagtccgcccccgcaaggcccagctcctcactccacagcgccgcgcaatggcggccaagcagcggcaccggcagctgccactcctgcccctcctcgccgcggccgtcgcgtggtcgctactgcgcgccgccgccgccgcgggcacgggcactggcacgctcggcctccggcacaagcccgcgaggcagcacaacagcacgcggcacgggggagggcggcgcgcccagcgtggtggcgctcccggcactggcatggcgtcgtgcaacctgttccagggcagctgggtgtacgacgacacgctgccgatgtacgacgcggcggggtgccccttcgtggagccggagttcgactgccagaagtacggccgccccgacaagctgtacctcaagtaccggtggcgcccggcgtcctgcgagctcccgaggttcaacgggcaggacttgctgaggcggtggaaggggaagaagatactgttcgtgggggactccatcagcctgaaccagtgggagtcgcttgcgtgcatgctgcgcgcggccgcgccggcctcctccagggtcgcctacgccaggggcaaccccgtctccagcgtcacgttccaggactacggggtgtcggtggcctactaccggagcacctacctggtggacatcgtcgaggagtccgtcggtcgggtgctcaagctcgactccatcaccggcgacgcgtggctcggcgccgacgtcctcgtcttcaacacgtggcactggtggacgcacaccggcagggaccaaccgtgggactacgtccaagacggagggcaggtgatgaaggacatggaccggctcacggccttctccaaggggatgtccacatgggccaggtgggtcgactccagcgtcgacacctccaggaccaaggtctacttccagggaatctcgccgacccactacaacggagccgactggggcgagggctcgcggagctgcgcgcagcagacgcagccggtcgccgggccggcgtaccccgccggccccgtcccggcgcaggccgccgtgcgggccgcgctggccgccatgtccaagccggtgtacctgctcgacgtcacgctgctgtcgcagctcaggcgcgacggccacccctcggcctacagcggcggccacccgggcaacgattgcagccactggtgcctcgccggcgtgccggacacgtggaaccagatcctctacgcgtcgctcctcctggcataggaccggggagaaaaaaaacgcacactgtataccaattggcgcaggctataggcatttcgtatttaaaaattggtgattcgattgtttctttttttcttcttcttcttggaaaaatcaatgttatgtcatatcagcatataagaagcagcagcaaacgagtttataatgttgtataat

SEQ ID NO: 6602 - protein, 485 aa, Zea mays subsp. mays
  peptide (1)..(485): Ceres Seq. ID no. 12381234
TIIKSRARRPHLTRPCPCPSPPPQGPAPHSTAPRNGGQAAAPAAATPAPPRRGRRVVATARRRRRGHGHWHARPPAQAREAAQQHAARGRAARPAWWRSRHWHGVVQPVPGQLGVRRHAADVRRGGVPLRGAGVRLPEVRPPRQAVPQVPVAPGVLRAPEVQRAGLAEAVEGEEDTVRGGLHQPEPVGVACVHAARGRAGLLQGRLRQGQPRLQRHVPGLRGVGGLLPEHLPGGHRRGVRRSGAQARLHHRRRVARRRRPRLQHVALVDAHRQGPTVGLRPRRRAGDEGHGPAHGLLQGDVHMGQVGRLQRRHLQDQGLLPGNLADPLQRSRLGRGLAELRAADAAGRRAGVPRRPRPGAGRRAGRAGRHVQAGVPARRHAAVAAQARRPPLGLQRRPPGQRLQPLVPRRRAGHVEPDPLRVAPPGIGPGRKKTHTVYQLAQAIGISYLKIGDSIVSFFLLLLGKINVMSYQHIRSSSKRVYNVV

SEQ ID NO: 6603 - protein, 392 aa, Zea mays subsp. mays
  peptide (1)..(392): Ceres Seq. ID no. 12381235
MAAKQRHRQLPLLPLLAAAVAWSLLRAAAAAGTGTGTLGLRHKPARQHNSTRHGGGRRAQRGGAPGTGMASCNLFQGSWVYDDTLPMYDAAGCPFVEPEFDCQKYGRPDKLYLKYRWRPASCELPRFNGQDLLRRWKGKKILFVGDSISLNQWESLACMLRAAAPASSRVAYARGNPVSSVTFQDYGVSVAYYRSTYLVDIVEESVGRVLKLDSITGDAWLGADVLVFNTWHWWTHTGRDQPWDYVQDGGQVMKDMDRLTAFSKGMSTWARWVDSSVDTSRTKVYFQGISPTHYNGADWGEGSRSCAQQTQPVAGPAYPAGPVPAQAAVRAALAAMSKPVYLLDVTLLSQLRRDGHPSAYSGGHPGNDCSHWCLAGVPDTWNQILYASLLLA

SEQ ID NO: 6604 - protein, 324 aa, Zea mays subsp. mays
  peptide (1)..(324): Ceres Seq. ID no. 12381236
MASCNLFQGSWVYDDTLPMYDAAGCPFVEPEFDCQKYGRPDKLYLKYRWRPASCELPRFNGQDLLRRWKGKKILFVGDSISLNQWESLACMLRAAAPASSRVAYARGNPVSSVTFQDYGVSVAYYRSTYLVDIVEESVGRVLKLDSITGDAWLGADVLVFNTWHWWTHTGRDQPWDYVQDGGQVMKDMDRLTAFSKGMSTWARWVDSSVDTSRTKVYFQGISPTHYNGADWGEGSRSCAQQTQPVAGPAYPAGPVPAQAAVRAALAAMSKPVYLLDVTLLSQLRRDGHPSAYSGGHPGNDCSHWCLAGVPDTWNQILYASLLLA

SEQ ID NO: 6605 - DNA, 1485 bp, Zea mays subsp. mays
  misc_feature (1)..(1485): Ceres Seq. ID no. 13498718
  misc_feature (1)..(1485): Ortholog of  Ceres SEQ ID NO 13596780 as cited in SEQ ID NO 62360
attttttttatatggagattatttctggtttatataaaaggacacaagtggggacgaagtagcagaagacttcccttcgtctgcttcccagagacccagccatggcgatctcccagatctcacgcatattcctggccatccttctcctggccgccgccttcgccgccgccccagctgcgcttgcggacggcgacgacgtggtggcccttaccgaatccacgttcgagaaggaggtcggaaaggaccgcggcgccctcgtcgagttctacgccccctggtgtggtcactgcaagaagcttgctcctgagtatgaaagacttggtgcaagttttaagaaagctaaatctgtcttgattgctaaggttgattgtgatgagcacaagagtttgtgcagcaagtatggagtttccgggtatccaacaatccaatggttcccgaaaggatccttggagcccaaaaagtatgaaggacaacgcactgcagaagcccttgctgaatttctcaatactgaaggaggcacaaatgtaaagctggcaaccattccttcaagtgttgtggttctcaccccagagacctttgactcaattgtccttgatgaaaccaaagatgtccttgttgagttctatgccccatggtgtggtcactgcaagagtcttgcaccgacgtatgagaaggtggcttctgttttcaagttggatgaaggagttgttattgctaaccttgacgctgacaaacacagggatttggctgagaagtatggagttagtggatttcctaccttgaagtttttcccaaagggaaacaaagctggtgaagattatgatggtgatagggacttggttgactttgtcaagttcattaacgagaagagtggtaccagccgtgacacaaagggtcaactaacctcagaggctggccgtatagcaagtctggatgtcctggctaaggagttccttggtgcttccggtgacaagcgaaaggaagtcctctccagtatggaggaggaggcagataagctcagtggttctgctgcaaggcatggaaaggtctatgtaaccatcgcaaagaagattctagagaaaggcaacgagtatactgagaaggaaaccaagaggcttgatcgcatgttggagaagtccatcagcccctccaaggccgacgagtttatcatcaagaagaacgttctttcgactttctcatcctaaggcatctgctagctccattttcacgtttcagatataggcgacaaaaactgcaggattataagtgtgataatgagagttaaatggtgctagaactaattttggggctttccctcgaggatatgtaatactcgtacgtcttgcgaattagttcttttccttgtgcttctggatttattccgtagcaccatagtttattttttggtttgacatggaggacattgtgactacagaactgagttttactatccaataacactgctcacttgatggggcttatgcc

SEQ ID NO: 6606 - protein, 367 aa, Zea mays subsp. mays
  peptide (1)..(367): Ceres Seq. ID no. 13498719
MAISQISRIFLAILLLAAAFAAAPAALADGDDVVALTESTFEKEVGKDRGALVEFYAPWCGHCKKLAPEYERLGASFKKAKSVLIAKVDCDEHKSLCSKYGVSGYPTIQWFPKGSLEPKKYEGQRTAEALAEFLNTEGGTNVKLATIPSSVVVLTPETFDSIVLDETKDVLVEFYAPWCGHCKSLAPTYEKVASVFKLDEGVVIANLDADKHRDLAEKYGVSGFPTLKFFPKGNKAGEDYDGDRDLVDFVKFINEKSGTSRDTKGQLTSEAGRIASLDVLAKEFLGASGDKRKEVLSSMEEEADKLSGSAARHGKVYVTIAKKILEKGNEYTEKETKRLDRMLEKSISPSKADEFIIKKNVLSTFSS

SEQ ID NO: 6607 - DNA, 817 bp, Zea mays subsp. mays
  misc_feature (1)..(817): Ceres Seq. ID no. 12402013
  misc_feature (1)..(817): Ortholog of  Ceres SEQ ID NO 12582856 as cited in SEQ ID NO 51905
  misc_feature (1)..(817): Ortholog of  Ceres SEQ ID NO 14316155 as cited in SEQ ID NO 52377
atcttaaaccctagaaagctcttaaaaagcccccaggggccagggctagcagcggcggcgtatccctaatcccacctccagtctctgggcaccaaatttccggcggcgatggcggcggctgtggcgaggtcagggttccggcgcatgttctccgtctctgccttcgcgccgccgaaggcgcccgccgcgcgccccaaggccgacccatcccccaacctcttcgtctccggcttaagcaagcgtaccacaagtgaaggacttagagaagcctttgcggagtttggtgaagttttgcatgctcgagttgtgaccgatcgtgtcagtgggttttctaagggatttggctttgtaaggtatgctacgaccgaagaggcagccaagggaatagagggaaaggatggaaagttccttgatggatgggttatttttgcggaatacgctaaacccagaccaccaccggaggaaacagggatgaattcgcagccccagcagtcatggggagctccatcaggttcctggggtgcacagtagatgaagtgatattgtgagagcccctccctgtcccagccctagggctcgtagcggatcgtgagggatgattttgtgtggtgtgtcgcaggtgaaatgcctttgttgtcccaatattcctaccgtgttgggggtggtcgcttgctcgcgtccacgtctttcacatgaattggttactgtggtagttgtagttctggatacggtaccaaaacaaaagtattgctgtcaacaatctgcaacagccgggaaaacagtcgaaaacctttgcaaataatacctgctgccgtgg

SEQ ID NO: 6608 - protein, 140 aa, Zea mays subsp. mays
  peptide (1)..(140): Ceres Seq. ID no. 12402014
MAAAVARSGFRRMFSVSAFAPPKAPAARPKADPSPNLFVSGLSKRTTSEGLREAFAEFGEVLHARVVTDRVSGFSKGFGFVRYATTEEAAKGIEGKDGKFLDGWVIFAEYAKPRPPPEETGMNSQPQQSWGAPSGSWGAQ

SEQ ID NO: 6609 - protein, 128 aa, Zea mays subsp. mays
  peptide (1)..(128): Ceres Seq. ID no. 12402015
MFSVSAFAPPKAPAARPKADPSPNLFVSGLSKRTTSEGLREAFAEFGEVLHARVVTDRVSGFSKGFGFVRYATTEEAAKGIEGKDGKFLDGWVIFAEYAKPRPPPEETGMNSQPQQSWGAPSGSWGAQ

SEQ ID NO: 6610 - DNA, 1027 bp, Zea mays subsp. mays
  misc_feature (1)..(1027): Ceres Seq. ID no. 12341742
  misc_feature (1)..(1027): Ortholog of  Ceres SEQ ID NO 13658584 as cited in SEQ ID NO 66428
  misc_feature (1)..(1027): Ortholog of  Ceres SEQ ID NO 13596269 as cited in SEQ ID NO 67972
ctcaataaaatatgtactcggaatcggaagaagctgccttccttttccatccgcggaacgacgcacgcggacgcctccttgttccgggtcctactcccgccgcctagaggcctcgccctcccccctccggcgaaaaccgattctctccggcgtttcctggtcccttagtgcaagcaaggacaccgctcctctagcgagctccgttctgaagcggcaagaaagatgattaatcttttcaaaataaagggtcaaaagaaagaggaggcagcaagtctgctggaaaggcccctgttaagaaacagtctgctggggagctccgtcttcataaagatattagtgagctcaacctgccgaagaccacgtcaatttcttttcccaatggcaaggatgatctgatgaattttgagaccaccatccgacctgatgaaggatattacatgggaggcactttcgttttcacctttcaagtgtccccatcttatcctcatgatcctccgaaggtcaaatgcaagaccaaggtgtaccatccaaatattgatctggaaggcaatgtatgtctgaacattctgcgcgaagattggaagcctgttctcaacatcaacactgttatttatggcctgaatcttctttttacgcaaccaaacgacgaggatcctctgaaccacgaagctgcagttgtccttcgtgacaatccaaagatgtttgaggcaaatgtgagaagagccatggctggaggctacgtcggccaacactatttccaaagatgtgcttgacttgatgtggtggtggcttgaaaacgatcaacagagcccctccccctgtatcagcaccagcgcgcccagctttgtgtgcggaaagtacttctggaagcaaaatccaaaccgttcatggtgtgatactgtgatgcatctgtttgcccgcctttgtgatgtgtggtatagtggtggtgcataatgacatggaaatgcttctctaactgtatcattcattccataaatcctaaacgaggaatgggaagtggattgtt

SEQ ID NO: 6611 - protein, 125 aa, Zea mays subsp. mays
  peptide (1)..(125): Ceres Seq. ID no. 12341743
MNFETTIRPDEGYYMGGTFVFTFQVSPSYPHDPPKVKCKTKVYHPNIDLEGNVCLNILREDWKPVLNINTVIYGLNLLFTQPNDEDPLNHEAAVVLRDNPKMFEANVRRAMAGGYVGQHYFQRCA

SEQ ID NO: 6612 - protein, 111 aa, Zea mays subsp. mays
  peptide (1)..(111): Ceres Seq. ID no. 12341744
MGGTFVFTFQVSPSYPHDPPKVKCKTKVYHPNIDLEGNVCLNILREDWKPVLNINTVIYGLNLLFTQPNDEDPLNHEAAVVLRDNPKMFEANVRRAMAGGYVGQHYFQRCA

SEQ ID NO: 6613 - protein, 74 aa, Zea mays subsp. mays
  peptide (1)..(74): Ceres Seq. ID no. 12341745
SIKYVLGIGRSCLPFPSAERRTRTPPCSGSYSRRLEASPSPLRRKPILSGVSWSLSASKDTAPLASSVLKRQER

SEQ ID NO: 6614 - DNA, 956 bp, Zea mays subsp. mays
  misc_feature (1)..(956): Ceres Seq. ID no. 13498297
  misc_feature (1)..(956): Ortholog of  Ceres SEQ ID NO 15176514 as cited in SEQ ID NO 1114
  misc_feature (1)..(956): Ortholog of  Ceres SEQ ID NO 15173688 as cited in SEQ ID NO 61918
  misc_feature (1)..(956): Ortholog of  Ceres SEQ ID NO 12778345 as cited in SEQ ID NO 62792
  misc_feature (1)..(956): Ortholog of  Ceres SEQ ID NO 13662513 as cited in SEQ ID NO 63303
  misc_feature (1)..(956): Ortholog of  Ceres SEQ ID NO 12616929 as cited in SEQ ID NO 63962
  misc_feature (1)..(956): Ortholog of  Ceres SEQ ID NO 15225803 as cited in SEQ ID NO 67623
  misc_feature (1)..(956): Ortholog of  Ceres SEQ ID NO 15174088 as cited in SEQ ID NO 0
aaacatactccgtttccgaatccgttccaccattgcctattgccccatcctccccgctagggttttgccagcatggccgccgccgccgcccggaggctcctctcccgccgcgcctcctcgtcctccctctccgcgctcctccgtcgcggcgctgtcccggagcagtcgctggtgttgcgcccggctgttgtcgcggcggcctcccgcctcggcttccagcgcgggatggcgcgggcggcctggcggggacggctacgtctcgacgcggtctggcgcgggcggggaccgcgcgcccatggccacggagatggcgccgctgttccccgggtgcgactacgagcattggctcatcgtgatggacaagcccggcggggagggcgccagcaagcagcagatgattgactgctacatccagaccctcgccaaggtccttggaagcgaggaggaggcgaagaagaagatctacaacgtctcgtgcgagcgctacttcgggtttgggtgcgagatcgatgaggagacatctaacaagctcgaggggctccctggtgttctctttgtgctcccggattcgtatgttgatgctgaatacaaggactacggagctgaactcttcgtcaacggtgagattgttcagaggacccccgagaggcagaggagggtggagcccgtgccacagagggcagcagacaggccgaggtacaatgacagaacccgctacgcacgcaggagggagaaccagcgatgaactttgcgataaaatcataaaaaataccacagcaacaagtcccaggtggtttcagctctggaattcaaggatcaccgagtatcgcctgtattaaattggcaatctcactttacgtgcagtctagagtatcgtttctatgtgctcagcttggacgtattgtattctgtaattacagctacttggagatttggaaggacctggcttgcaacgt

SEQ ID NO: 6615 - protein, 247 aa, Zea mays subsp. mays
  peptide (1)..(247): Ceres Seq. ID no. 13498298
NILRFRIRSTIAYCPILPARVLPAWPPPPPGGSSPAAPPRPPSPRSSVAALSRSSRWCCARLLSRRPPASASSAGWRGRPGGDGYVSTRSGAGGDRAPMATEMAPLFPGCDYEHWLIVMDKPGGEGASKQQMIDCYIQTLAKVLGSEEEAKKKIYNVSCERYFGFGCEIDEETSNKLEGLPGVLFVLPDSYVDAEYKDYGAELFVNGEIVQRTPERQRRVEPVPQRAADRPRYNDRTRYARRRENQR

SEQ ID NO: 6616 - protein, 149 aa, Zea mays subsp. mays
  peptide (1)..(149): Ceres Seq. ID no. 13498299
MATEMAPLFPGCDYEHWLIVMDKPGGEGASKQQMIDCYIQTLAKVLGSEEEAKKKIYNVSCERYFGFGCEIDEETSNKLEGLPGVLFVLPDSYVDAEYKDYGAELFVNGEIVQRTPERQRRVEPVPQRAADRPRYNDRTRYARRRENQR

SEQ ID NO: 6617 - protein, 145 aa, Zea mays subsp. mays
  peptide (1)..(145): Ceres Seq. ID no. 13498300
MAPLFPGCDYEHWLIVMDKPGGEGASKQQMIDCYIQTLAKVLGSEEEAKKKIYNVSCERYFGFGCEIDEETSNKLEGLPGVLFVLPDSYVDAEYKDYGAELFVNGEIVQRTPERQRRVEPVPQRAADRPRYNDRTRYARRRENQR

SEQ ID NO: 6618 - DNA, 1411 bp, Zea mays subsp. mays
  misc_feature (1)..(1411): Ceres Seq. ID no. 12382198
  misc_feature (1)..(1411): Ortholog of  Ceres SEQ ID NO 14312176 as cited in SEQ ID NO 59203
gacgccttgtttctggatcatccagcggggggacgccggtgtattgctcggtcctcctccctggttgcccgaggcagccgtgacggaggcggaggtagcgggggggaccatgtacagatcggcgggggtcgcgatggcgtggaacgtgttctggttctgcacggctctccgtgggctgggttccatcatgatcctactcgtcctcgccatcgtcggcgttacctactacgctgtcgtcctctgcaactacggccccgccctcctcaccggcggcggcaccactctcgccgcgctcgctgtcctgctcctcttccactttctgcttgctatgcttttatggagttatttttctgtggtgctcactgaccctggttctgttccaccaaattggaatcttgattttgatgcggagaggggagaaactgctcctctcactagctcagagttcagtagccagatgaattcacagcaatctgtggctcttggcaatacggcaaatccaagggctaggtactgtaggaaatgcaaccagttgaagccacctcggtgccaccattgctctgtttgtggaagatgtgttcttaagatggatcatcattgtgtgtgggtggttaattgtgttggggcactgaactacaaatactttcttctgttcctgttttacaccttcctcgagacaactcttgtcacactctctttattgcctcacttcatagccttcttcagtgatatcgagatcccaggaagtcctgcagcacttgcaaccacatttctcacctttgtgttgaatctggccttttccttgagcgtttttggtttatgattatgcatatttcacttgtttcggctaatacgacgacaattgaggcatatgagaagaagacaactccacattggatatatgatcttggccggaagaggaattttgctcaggtttttggaaatgacagaaaatattggttcatccctgcatattcagaagaggatctgagaagaattccagctctacagggtcttgattatcctgtcagtgagaccagattttgatggccaggaattgtaatggggcaattctaacagtgtcctcgtcagatacctcagtgttggacatctactcatacaactgtcagcattgctgattgccctatgcaaggcatctagtgaaatgtgcacaagatgattgtagtaatagtaaccatgagttattcatctgttgcacttcatgtatgtgacgaaggggaagtcctcctacctttgccagaggaagtttgttgtgatgtaaattagttttagcgcctggttagatggaccaaatcttggcgatgcgccaggattttggacttaattctttatccatccacgtgaattgggcaggatttcatccatgcaaactgggcattagtgtggtttg

SEQ ID NO: 6619 - protein, 273 aa, Zea mays subsp. mays
  peptide (1)..(273): Ceres Seq. ID no. 12382199
TPCFWIIQRGDAGVLLGPPPWLPEAAVTEAEVAGGTMYRSAGVAMAWNVFWFCTALRGLGSIMILLVLAIVGVTYYAVVLCNYGPALLTGGGTTLAALAVLLLFHFLLAMLLWSYFSVVLTDPGSVPPNWNLDFDAERGETAPLTSSEFSSQMNSQQSVALGNTANPRARYCRKCNQLKPPRCHHCSVCGRCVLKMDHHCVWVVNCVGALNYKYFLLFLFYTFLETTLVTLSLLPHFIAFFSDIEIPGSPAALATTFLTFVLNLAFSLSVFGL

SEQ ID NO: 6620 - protein, 237 aa, Zea mays subsp. mays
  peptide (1)..(237): Ceres Seq. ID no. 12382200
MYRSAGVAMAWNVFWFCTALRGLGSIMILLVLAIVGVTYYAVVLCNYGPALLTGGGTTLAALAVLLLFHFLLAMLLWSYFSVVLTDPGSVPPNWNLDFDAERGETAPLTSSEFSSQMNSQQSVALGNTANPRARYCRKCNQLKPPRCHHCSVCGRCVLKMDHHCVWVVNCVGALNYKYFLLFLFYTFLETTLVTLSLLPHFIAFFSDIEIPGSPAALATTFLTFVLNLAFSLSVFGL

SEQ ID NO: 6621 - protein, 229 aa, Zea mays subsp. mays
  peptide (1)..(229): Ceres Seq. ID no. 12382201
MAWNVFWFCTALRGLGSIMILLVLAIVGVTYYAVVLCNYGPALLTGGGTTLAALAVLLLFHFLLAMLLWSYFSVVLTDPGSVPPNWNLDFDAERGETAPLTSSEFSSQMNSQQSVALGNTANPRARYCRKCNQLKPPRCHHCSVCGRCVLKMDHHCVWVVNCVGALNYKYFLLFLFYTFLETTLVTLSLLPHFIAFFSDIEIPGSPAALATTFLTFVLNLAFSLSVFGL

SEQ ID NO: 6622 - DNA, 1676 bp, Zea mays subsp. mays
  misc_feature (1)..(1676): Ceres Seq. ID no. 12408456
  misc_feature (1)..(1676): Ortholog of  Ceres SEQ ID NO 14302255 as cited in SEQ ID NO 65021
gcgccagcagactctttttaatagccgacctcaaccaacgtcgagaggaaacccactgttgcagcgcgagtgtagcaggctgcacacacaaggaaggggacaaccacaagcgcctaagatcccgtcctccgcgtcgagatctttgccgaggcggtgaccgtcgagggatcgccatggcgttgagggcgtcccccgtgtcgcatggcaccgcggcagcgccgctgccgcctttcgcgcggaggaggatggcccgtggggtggtggtggccatggcgtccaccatcaacagggtcaaaactgtcaaagaaccctatacccctccacgagaggtacatcgccaaattacccattcactaccacctcaaaagcgggagattttcgattcacttcaaccttgggccaaggataacctactgaacctactgaagccagttgaaaagtcatggcagccacaggacttcctaccagagccttcttctgatgggttttatgatgaagttaaagaactgagggagcgggcaaatgaaatacctgatgaatactttgtttgcttagttggtgatatggttactgaggaagccttacctacataccaaacaatgcttaacactcttgatggagtccgggatgaaactggtgcaagtccaaccacgtgggcggtttggacaagggcatggacagctgaagagaacagacatggtgacctccttaacaagtacatgtaccttactggacgggttgacatgaaacaaattgagaagaccatacaatatctgattggttccggaatggatcctggaactgagaacaacccctacttgggtttcctctacacatcattccaagaaagggcaacatttgtgtcgcatgggaatactgcaaggcatgccaaggagtatggtgatctcaagctggcccagatatgtggcacgatagcagccgatgagaagcgccacgaaacagcctacaccaagatagtcgagaagctcttcgagatggaccctgattacacagtgcttgcgtttgctgacatgatgaggaagaagatcacgatgccagcccatctcatgtacgacggtaaggacgacaacctgttcgagcacttcagcgcggtggcgcagaggctgggcgtctacaccgccaaagactacgccgacatcctcgagttcctggtccagaggtggaaagtcgcggagctcacagggctgtctggagaagggagaagggcgcaggactttgtctgtaccttggcgccgaggatcaggcggctggatgatagagctcaagcgagggcgaagcaagcaccggttattcctttcagttgggtttatgaccgcaaggtgcagctttaatcaagaacgctaggcaatgtgggcatttactacgtatatcattttcagtcctggggttctctataagaaacagtctctaggttatctagcagggtacaattcaactactcgtggatctcactcggtgcaaagtagtgcaaagtacgctatctgttgttaccgtgcaagctgcagagtttggattactatgtgggcctggtgatggagaggaattctgtggggtgcctgcagccagttatgagtggcagctccatcgcaactgagttgttgtattgaatatgttacaggacctatagtaaccgaaagtaataatatggagtttgt

SEQ ID NO: 6623 - protein, 449 aa, Zea mays subsp. mays
  peptide (1)..(449): Ceres Seq. ID no. 12408457
ASRLFLIADLNQRREETHCCSASVAGCTHKEGDNHKRLRSRPPRRDLCRGGDRRGIAMALRASPVSHGTAAAPLPPFARRRMARGVVVAMASTINRVKTVKEPYTPPREVHRQITHSLPPQKREIFDSLQPWAKDNLLNLLKPVEKSWQPQDFLPEPSSDGFYDEVKELRERANEIPDEYFVCLVGDMVTEEALPTYQTMLNTLDGVRDETGASPTTWAVWTRAWTAEENRHGDLLNKYMYLTGRVDMKQIEKTIQYLIGSGMDPGTENNPYLGFLYTSFQERATFVSHGNTARHAKEYGDLKLAQICGTIAADEKRHETAYTKIVEKLFEMDPDYTVLAFADMMRKKITMPAHLMYDGKDDNLFEHFSAVAQRLGVYTAKDYADILEFLVQRWKVAELTGLSGEGRRAQDFVCTLAPRIRRLDDRAQARAKQAPVIPFSWVYDRKVQL

SEQ ID NO: 6624 - protein, 392 aa, Zea mays subsp. mays
  peptide (1)..(392): Ceres Seq. ID no. 12408458
MALRASPVSHGTAAAPLPPFARRRMARGVVVAMASTINRVKTVKEPYTPPREVHRQITHSLPPQKREIFDSLQPWAKDNLLNLLKPVEKSWQPQDFLPEPSSDGFYDEVKELRERANEIPDEYFVCLVGDMVTEEALPTYQTMLNTLDGVRDETGASPTTWAVWTRAWTAEENRHGDLLNKYMYLTGRVDMKQIEKTIQYLIGSGMDPGTENNPYLGFLYTSFQERATFVSHGNTARHAKEYGDLKLAQICGTIAADEKRHETAYTKIVEKLFEMDPDYTVLAFADMMRKKITMPAHLMYDGKDDNLFEHFSAVAQRLGVYTAKDYADILEFLVQRWKVAELTGLSGEGRRAQDFVCTLAPRIRRLDDRAQARAKQAPVIPFSWVYDRKVQL

SEQ ID NO: 6625 - protein, 368 aa, Zea mays subsp. mays
  peptide (1)..(368): Ceres Seq. ID no. 12408459
MARGVVVAMASTINRVKTVKEPYTPPREVHRQITHSLPPQKREIFDSLQPWAKDNLLNLLKPVEKSWQPQDFLPEPSSDGFYDEVKELRERANEIPDEYFVCLVGDMVTEEALPTYQTMLNTLDGVRDETGASPTTWAVWTRAWTAEENRHGDLLNKYMYLTGRVDMKQIEKTIQYLIGSGMDPGTENNPYLGFLYTSFQERATFVSHGNTARHAKEYGDLKLAQICGTIAADEKRHETAYTKIVEKLFEMDPDYTVLAFADMMRKKITMPAHLMYDGKDDNLFEHFSAVAQRLGVYTAKDYADILEFLVQRWKVAELTGLSGEGRRAQDFVCTLAPRIRRLDDRAQARAKQAPVIPFSWVYDRKVQL

SEQ ID NO: 6626 - DNA, 1683 bp, Zea mays subsp. mays
  misc_feature (1)..(1683): Ceres Seq. ID no. 12408452
  misc_feature (1)..(1683): Ortholog of  Ceres SEQ ID NO 15168348 as cited in SEQ ID NO 58074
accatctttaggataagatagcaaatatatggccatcatactcgtacgagcagcgtcgccggggctctccgccgccgacagcatcagccaccaggggactctccagtgctccaccctgctcaagacgaagaggccggcggcgcgccggtggatgccctgctcgctccttggcctccacccgtgggaggctggccgtccctcccccgccgtctactccagcctcgccgtcaacccggcgggagaggccgtcgtctcgtccgagcagaaggtctacgacgtcgtgctcaagcaggccgcattgctcaaacgccagctgcgcacgccggtcctacgccaggccccaggacatggacatgccacgcaacgggctcaaggaagcctacgaccgctgcggcgagatctgtgaggagtatgccaagacgttttacctcggaactatgttgatgacagaggagcggcgccgcgccatatgggccatctatgtgtggtgtaggaggacagatgagcttgtagatgggccaaacgccaactacattacaccaacagctttggaccggtgggagaagagacttgaggatctgttcacgggacgtccttacgacatgcttgatgccgctctctctgataccatctcaaggttccccatagacattcagccattcagggacatgattgaagggatgaggagtgatcttaggaagacaaggtataacaacttcgacgagctctacatgtactgctactatgttgctggaactgtcgggttaatgagcgtacctgtgatgggcatcgcaaccgagtctaaagcaacaactgaaagcgtatacagtgctgccttggctctgggaattgcgaaccaactcacgaacatactccgggatgttggagaggatgctagaagaggaaggatatatttaccacaagatgagcttgcacaggcagggctctctgatgaggacatcttcaaaggggtcgtcacgaaccggtggagaaacttcatgaagaggcagatcaagagggccaggatgttttttgaggaggcagagagaggggtaaatgagctctcacaggctagcagatggccagtatgggcttccctgttgttgtacaggcagatcctggatgagatcgaagccaacgactacaacaacttcacgaagagggcgtatgttggtaaagggaagaagttgctagcacttcctgtggcatatggaaaatcgctactgctcccatgttcattgagaaatggccagacctagccatcagagaagctgcaatgcaaggttcaggttaggctagatagaaagttaaatggggcaacatcaggaggccttgatgaaaaacagacaacctggtgaattgttgttgggatcaggcacagaacagataagagccgcgcagccaacctagatggatacggaacattcgcctcttattcggagcaatatatgtctctcaaggaaagagcccaacatgtatactgccttctttttctcatcccagatttgggggaaaaacaatgtaaatgccaatggtatcgtaggaagattactagaagtaaatgccaatgtaaaaacagatgagttggcatttacatgataggatggtggggtcatcagactgaaaatgataggggattgtgctcccctgcgactccaactattaaacaaggaatccgtcagc

SEQ ID NO: 6627 - protein, 303 aa, Zea mays subsp. mays
  peptide (1)..(303): Ceres Seq. ID no. 12408453
MDMPRNGLKEAYDRCGEICEEYAKTFYLGTMLMTEERRRAIWAIYVWCRRTDELVDGPNANYITPTALDRWEKRLEDLFTGRPYDMLDAALSDTISRFPIDIQPFRDMIEGMRSDLRKTRYNNFDELYMYCYYVAGTVGLMSVPVMGIATESKATTESVYSAALALGIANQLTNILRDVGEDARRGRIYLPQDELAQAGLSDEDIFKGVVTNRWRNFMKRQIKRARMFFEEAERGVNELSQASRWPVWASLLLYRQILDEIEANDYNNFTKRAYVGKGKKLLALPVAYGKSLLLPCSLRNGQT

SEQ ID NO: 6628 - protein, 301 aa, Zea mays subsp. mays
  peptide (1)..(301): Ceres Seq. ID no. 12408454
MPRNGLKEAYDRCGEICEEYAKTFYLGTMLMTEERRRAIWAIYVWCRRTDELVDGPNANYITPTALDRWEKRLEDLFTGRPYDMLDAALSDTISRFPIDIQPFRDMIEGMRSDLRKTRYNNFDELYMYCYYVAGTVGLMSVPVMGIATESKATTESVYSAALALGIANQLTNILRDVGEDARRGRIYLPQDELAQAGLSDEDIFKGVVTNRWRNFMKRQIKRARMFFEEAERGVNELSQASRWPVWASLLLYRQILDEIEANDYNNFTKRAYVGKGKKLLALPVAYGKSLLLPCSLRNGQT

SEQ ID NO: 6629 - protein, 273 aa, Zea mays subsp. mays
  peptide (1)..(273): Ceres Seq. ID no. 12408455
MLMTEERRRAIWAIYVWCRRTDELVDGPNANYITPTALDRWEKRLEDLFTGRPYDMLDAALSDTISRFPIDIQPFRDMIEGMRSDLRKTRYNNFDELYMYCYYVAGTVGLMSVPVMGIATESKATTESVYSAALALGIANQLTNILRDVGEDARRGRIYLPQDELAQAGLSDEDIFKGVVTNRWRNFMKRQIKRARMFFEEAERGVNELSQASRWPVWASLLLYRQILDEIEANDYNNFTKRAYVGKGKKLLALPVAYGKSLLLPCSLRNGQT

SEQ ID NO: 6630 - DNA, 1225 bp, Zea mays subsp. mays
  misc_feature (1)..(1225): Ceres Seq. ID no. 12344366
  misc_feature (1)..(1225): Ortholog of  Ceres SEQ ID NO 13582052 as cited in SEQ ID NO 59823
  misc_feature (1)..(1225): Ortholog of  Ceres SEQ ID NO 13659378 as cited in SEQ ID NO 67014
  misc_feature (1)..(1225): Ortholog of  Ceres SEQ ID NO 13599365 as cited in SEQ ID NO 0
gtgacagaggcatagagcaaaagccaaactggcagccagcacagcagagcgccactcgactcatcctttcggttcccctcccccctccgcgttccacaaccctcgagaagcttccaccctcccctcctgcgacgccgccagagccgcggaaaccctacccaccccggccgctcacgcaccgggcgcccgcagccgccggtcgcgtgcctgccgccgacaccgcccaaagcgattggatctcgagatcgtcgaagccacgatggaggactgggattctgaagaattccagccagttgtgcctgttgtgaaagccgagccacttaaaaatcagtgggctgatgaagatgttgaagaagatgatgtaaaagaatcatgggaagaagaggaggaggaggagaaacctaagccagcgccagtggaaaaggtcgctgcaaaacctagcactaaggctcctgctaaaaagggaaaacaacaagcattgacaagtgctgaagaaccagatgagcctcctcttagtcccacttcacagaaaattcgccaacaaagacttgtggaagaagctgacttcaagtcgaccaccgagctttttgcaaagaagggcagtgagcaaaagtcactagatacttttattccaaagtccaagagtgactttgcggaatacgcggagcttattgcaaacaaactacgcccctatgagaaaagctttcactacatggctctgcttaagaatgtcatgagactttccatgacatcgttgaaaggtgcggacgccaaagatatatcttcttccgtgacggcaattgctaacgagaagatcaaggctgagaaggaggctgcagcaggcaaaaagaaacaaggagcgaaaaagaagcaactccacatcgagaaaggagacgacgacttcatccccggccggggtggtggctacgatgaccccgatgagtacgacttcatgtgatctggctgggagggatagtaggtttctgttatgtatacctttggcgggcagagaatatatcacaagagtttgcggcatactattgcatggaacatgcgttatctattcgagaatgatttttgactctgcaggataagaagagcacttgtgatctggatgcatgggtgttttcttatttatccttgaatctttgtgttatttttttttcaacattgcattttttgccaaatgtactatctggttactccgtgagtcatgaaagcaatt

SEQ ID NO: 6631 - protein, 232 aa, Zea mays subsp. mays
  peptide (1)..(232): Ceres Seq. ID no. 12344367
MEDWDSEEFQPVVPVVKAEPLKNQWADEDVEEDDVKESWEEEEEEEKPKPAPVEKVAAKPSTKAPAKKGKQQALTSAEEPDEPPLSPTSQKIRQQRLVEEADFKSTTELFAKKGSEQKSLDTFIPKSKSDFAEYAELIANKLRPYEKSFHYMALLKNVMRLSMTSLKGADAKDISSSVTAIANEKIKAEKEAAAGKKKQGAKKKQLHIEKGDDDFIPGRGGGYDDPDEYDFM

SEQ ID NO: 6632 - DNA, 1233 bp, Zea mays subsp. mays
  misc_feature (1)..(1233): Ceres Seq. ID no. 12367623
  misc_feature (1)..(1233): Ortholog of  Ceres SEQ ID NO 13638746 as cited in SEQ ID NO 59296
  misc_feature (1)..(1233): Ortholog of  Ceres SEQ ID NO 14314050 as cited in SEQ ID NO 59952
  misc_feature (1)..(1233): Ortholog of  Ceres SEQ ID NO 13596474 as cited in SEQ ID NO 62169
  misc_feature (1)..(1233): Ortholog of  Ceres SEQ ID NO 13598714 as cited in SEQ ID NO 62656
  misc_feature (1)..(1233): Ortholog of  Ceres SEQ ID NO 13597519 as cited in SEQ ID NO 64759
  misc_feature (1)..(1233): Ortholog of  Ceres SEQ ID NO 14302388 as cited in SEQ ID NO 65655
  misc_feature (1)..(1233): Ortholog of  Ceres SEQ ID NO 13587054 as cited in SEQ ID NO 0
aacatcatcaccacacgctaaatttacagctagctagctgaattcgatcgatatccgggaactaataatccaccgaccccctcatggcggcttcgtcgcgaatgggcgtatctgtctacctcgccatcatggcggcggtgctcgcctcggcgctcggagcggagctcaccgcggactactatagcgagacgtgcccgcaagcgctgaccaccatcaagctcctcgtcggcgccgccatcctgagggagcccaggatgggggcgtcgctggtccgcctccactttcacgattgcttcgtcaatggctgcgacggctccatcctgctggacgacaccgacgacatggtcggagagaagacggcgaagcccaacaacaactccgtgagaggctacgacgtcatcgacaccatcaagtcggcggtgaacacgatatgcttgggcaacgtcgtctcctgcgccgatatcttggccgtggccgctcgcgattccattgtcgctctgggaggaacctcgtacgacgtgctcctggggcggcgcgacgcgacgacggcgagcatggacgacgcgaacaacgacatcccgacgccgttcatggacctgccggcgctacaggacagcttcgagtcccacggcctgtccctgcacgacctggtggtgctctccggcggccacacgctgggctactcccgctgcctcttcttccgcggccgcctgtacaacgagaccggcacgctggacccggcgtacgccgggtcgctggacgagcgctgcccgctggcgggcgacgacgacgcgctgtcggcgctggacgacacccccaccaccgtcgacgctgactactaccagggcctcatgcagggacgcgcgctgctgcactcggatcagcagctttaccaggcaggcggcgccgctggcgacctggtggagtactacgccgacaacccgaccaagttctgggaggacttcggcgcggcaatggtcaagctgggcagcctgagcccgctcaccggcgacgaaggggatgtcagggagaactgccgggtcgtcaaccaggtgtgagtgtgacttcgccgccatcgtcgaatcaacgaggcatcagcttcgttccgtacgtacactctggctgctagctgcaccggcaagctatgcaccaagattctgtagcgtgtgtctgatcattatttgtattcgcgtgcctacttaattttgtgagaaattggtcttatgtttggtt

SEQ ID NO: 6633 - protein, 324 aa, Zea mays subsp. mays
  peptide (1)..(324): Ceres Seq. ID no. 12367624
MAASSRMGVSVYLAIMAAVLASALGAELTADYYSETCPQALTTIKLLVGAAILREPRMGASLVRLHFHDCFVNGCDGSILLDDTDDMVGEKTAKPNNNSVRGYDVIDTIKSAVNTICLGNVVSCADILAVAARDSIVALGGTSYDVLLGRRDATTASMDDANNDIPTPFMDLPALQDSFESHGLSLHDLVVLSGGHTLGYSRCLFFRGRLYNETGTLDPAYAGSLDERCPLAGDDDALSALDDTPTTVDADYYQGLMQGRALLHSDQQLYQAGGAAGDLVEYYADNPTKFWEDFGAAMVKLGSLSPLTGDEGDVRENCRVVNQV

SEQ ID NO: 6634 - protein, 318 aa, Zea mays subsp. mays
  peptide (1)..(318): Ceres Seq. ID no. 12367625
MGVSVYLAIMAAVLASALGAELTADYYSETCPQALTTIKLLVGAAILREPRMGASLVRLHFHDCFVNGCDGSILLDDTDDMVGEKTAKPNNNSVRGYDVIDTIKSAVNTICLGNVVSCADILAVAARDSIVALGGTSYDVLLGRRDATTASMDDANNDIPTPFMDLPALQDSFESHGLSLHDLVVLSGGHTLGYSRCLFFRGRLYNETGTLDPAYAGSLDERCPLAGDDDALSALDDTPTTVDADYYQGLMQGRALLHSDQQLYQAGGAAGDLVEYYADNPTKFWEDFGAAMVKLGSLSPLTGDEGDVRENCRVVNQV

SEQ ID NO: 6635 - protein, 309 aa, Zea mays subsp. mays
  peptide (1)..(309): Ceres Seq. ID no. 12367626
MAAVLASALGAELTADYYSETCPQALTTIKLLVGAAILREPRMGASLVRLHFHDCFVNGCDGSILLDDTDDMVGEKTAKPNNNSVRGYDVIDTIKSAVNTICLGNVVSCADILAVAARDSIVALGGTSYDVLLGRRDATTASMDDANNDIPTPFMDLPALQDSFESHGLSLHDLVVLSGGHTLGYSRCLFFRGRLYNETGTLDPAYAGSLDERCPLAGDDDALSALDDTPTTVDADYYQGLMQGRALLHSDQQLYQAGGAAGDLVEYYADNPTKFWEDFGAAMVKLGSLSPLTGDEGDVRENCRVVNQV

SEQ ID NO: 6636 - DNA, 1879 bp, Zea mays subsp. mays
  misc_feature (1)..(1879): Ceres Seq. ID no. 12357342
  misc_feature (1)..(1879): Ortholog of  Ceres SEQ ID NO 13599900 as cited in SEQ ID NO 531
  misc_feature (1)..(1879): Ortholog of  Ceres SEQ ID NO 15171402 as cited in SEQ ID NO 51174
  misc_feature (1)..(1879): Ortholog of  Ceres SEQ ID NO 14310498 as cited in SEQ ID NO 55066
  misc_feature (1)..(1879): Ortholog of  Ceres SEQ ID NO 15172875 as cited in SEQ ID NO 60423
  misc_feature (1)..(1879): Ortholog of  Ceres SEQ ID NO 13659971 as cited in SEQ ID NO 67565
  misc_feature (1)..(1879): Ortholog of  Ceres SEQ ID NO 13500385 as cited in SEQ ID NO 67583
accagcccgacccaccaccaccatcgccaccattaccctctcgcccctgcctctccggccgccagcccatcccgtccccgtcccatgccgcagcgcgcagcggccgcactgacacaccagtgagcgagcagagcgagagcgaggcctgatgcggcagcggcagcaaggcgaggagcaccgggagatattcgtccagtggagaccctgcgacaagaagaggtcttaggccctccgccgccacgcgcaccggcagacaaatccgcgcaggccttcttccgatccgcaaaggcgccgcctttttcgccgattccacaggccggagcccggggagaaaggcagacagacagaccggaagatgagcgcgtccgtgggccggacccgtgtggggcggtacgagctcggccggaccctcggcgaaggcaccttcgccaaggtcaagttcgcccggaacgtcgagaccggagagaatgtcgccatcaagatcctcgacaaggagaaggtcctcaagcacaagatgatcgcccagatcaagcgggagatctcgaccatgaagctcatcaggcaccccaacgtcatccggatgtatgaggtgatggccagcaagacaaagatatacatcgtcatggagctcgtcaccggtggcgaactcttcgacaaaatcgcctcgcgtggaaggctgaaagaggatgacgcaaggaagtacttccagcagctgatcaactctgtcgattactgccatagccgaggcgtctaccaccgcgatctcaagcctgaaaatctcctgcttgatgctagcggcacgctcaaggtttcggattttggactgagcgcactatctcaacaagtccgagaggatggtctgctgcacacaacctgtggaactcccaactatgttgctcccgaggttataaacaataagggctatgatggagctaaggctgatctgtggtcatgtggagtgattctctttgtcctcatggcggggtacctcccatttgaagattcgaacctgatgtcgctctacaagaagattttcaaagcggatttcagttgcccgtcctggttctccacaagcgcaaagaagctcatcaagaagatacttgaacctaatgctaacaatagaataactattgcagagctcattaacaacgagtggttcaagaaggggtatcagcctcccagatttgaaacagcagatgttaatctggatgacgtgaactccatcttcgatgaatccggggagccagcacagcttgttgttgagaggagagaagaaaggccatcagtgatgaacgctttcgagttaatctctacgtctcagggcctcaatctcgggacgctcttcgagaagcaaacgggttctgttaagcgagaaacaaggtttgcgtcaaggcttcctgcaaatgagatactgtcgaagatcgaagcagcagcgggacccatgggcttcaacgttcagaagcgcaactataagctgaagctgcaaggggagaaccctggaaggaaaggtcagctggccatcgcaacagaggttttcgaggtcacgccttccctgtacatggttgagctgcgcaagtccaacggcgacacccttgaattccacaagttctaccacaacatctcaaatggactgaaggacgtgatgtggaagccggagagcggcatcgtggaaggcgacgaggcgcggcaaaggaggtccccgtgatggggtctgcaaccaagttttagaagtagcgctgcagataactagtcatcagggagcctggcgggaactgagcctgtgactgcttcctgtttgtttggatgttttgtttttgtctaaggtgctttctgactaaagtatgctggataatgtgaatgaagaatgtgcagagttttc

SEQ ID NO: 6637 - protein, 449 aa, Zea mays subsp. mays
  peptide (1)..(449): Ceres Seq. ID no. 12357343
MSASVGRTRVGRYELGRTLGEGTFAKVKFARNVETGENVAIKILDKEKVLKHKMIAQIKREISTMKLIRHPNVIRMYEVMASKTKIYIVMELVTGGELFDKIASRGRLKEDDARKYFQQLINSVDYCHSRGVYHRDLKPENLLLDASGTLKVSDFGLSALSQQVREDGLLHTTCGTPNYVAPEVINNKGYDGAKADLWSCGVILFVLMAGYLPFEDSNLMSLYKKIFKADFSCPSWFSTSAKKLIKKILEPNANNRITIAELINNEWFKKGYQPPRFETADVNLDDVNSIFDESGEPAQLVVERREERPSVMNAFELISTSQGLNLGTLFEKQTGSVKRETRFASRLPANEILSKIEAAAGPMGFNVQKRNYKLKLQGENPGRKGQLAIATEVFEVTPSLYMVELRKSNGDTLEFHKFYHNISNGLKDVMWKPESGIVEGDEARQRRSP

SEQ ID NO: 6638 - protein, 396 aa, Zea mays subsp. mays
  peptide (1)..(396): Ceres Seq. ID no. 12357344
MIAQIKREISTMKLIRHPNVIRMYEVMASKTKIYIVMELVTGGELFDKIASRGRLKEDDARKYFQQLINSVDYCHSRGVYHRDLKPENLLLDASGTLKVSDFGLSALSQQVREDGLLHTTCGTPNYVAPEVINNKGYDGAKADLWSCGVILFVLMAGYLPFEDSNLMSLYKKIFKADFSCPSWFSTSAKKLIKKILEPNANNRITIAELINNEWFKKGYQPPRFETADVNLDDVNSIFDESGEPAQLVVERREERPSVMNAFELISTSQGLNLGTLFEKQTGSVKRETRFASRLPANEILSKIEAAAGPMGFNVQKRNYKLKLQGENPGRKGQLAIATEVFEVTPSLYMVELRKSNGDTLEFHKFYHNISNGLKDVMWKPESGIVEGDEARQRRSP

SEQ ID NO: 6639 - protein, 385 aa, Zea mays subsp. mays
  peptide (1)..(385): Ceres Seq. ID no. 12357345
MKLIRHPNVIRMYEVMASKTKIYIVMELVTGGELFDKIASRGRLKEDDARKYFQQLINSVDYCHSRGVYHRDLKPENLLLDASGTLKVSDFGLSALSQQVREDGLLHTTCGTPNYVAPEVINNKGYDGAKADLWSCGVILFVLMAGYLPFEDSNLMSLYKKIFKADFSCPSWFSTSAKKLIKKILEPNANNRITIAELINNEWFKKGYQPPRFETADVNLDDVNSIFDESGEPAQLVVERREERPSVMNAFELISTSQGLNLGTLFEKQTGSVKRETRFASRLPANEILSKIEAAAGPMGFNVQKRNYKLKLQGENPGRKGQLAIATEVFEVTPSLYMVELRKSNGDTLEFHKFYHNISNGLKDVMWKPESGIVEGDEARQRRSP

SEQ ID NO: 6640 - DNA, 1297 bp, Zea mays subsp. mays
  misc_feature (1)..(1297): Ceres Seq. ID no. 13492533
  misc_feature (1)..(1297): Ortholog of  Ceres SEQ ID NO 14312711 as cited in SEQ ID NO 1401
  misc_feature (1)..(1297): Ortholog of  Ceres SEQ ID NO 13586635 as cited in SEQ ID NO 14217
  misc_feature (1)..(1297): Ortholog of  Ceres SEQ ID NO 15170220 as cited in SEQ ID NO 55383
  misc_feature (1)..(1297): Ortholog of  Ceres SEQ ID NO 14304198 as cited in SEQ ID NO 56479
  misc_feature (1)..(1297): Ortholog of  Ceres SEQ ID NO 14316543 as cited in SEQ ID NO 57118
  misc_feature (1)..(1297): Ortholog of  Ceres SEQ ID NO 12616285 as cited in SEQ ID NO 63483
acgcatcgatcaccctcctcgctcccggtcaacagcagcggcgcagagcacgacgccgacacgcgccatggcggcggtgaggcaccggcagctggaggccaacggcatcacgatgcacgtcgcggaggccggccccgtgaacgcctccgcgccggcggtgctgttcgtgcacggcttcccggagctctggtactcgtggcgccaccagatgggctacctcgccgcgcgcggctaccgctgcgtggcacccgacctccgaggctacggcggcaccaccgcgccgccggaaccgacctcctacaccgtcttccatatcgtcggcgacatcgtcgcgctcctcgacgccctccacctcccgcaggtgttcgttgtcggccacgactggggcgccatcgtgtcgtggaacctctgcctgctgcggccggatcgggtgcgcgcgctcgtcaacctcagcgttgccttcatgccccggaggcccggcgtcaagcctcttgagtacttccgcgccgcatacggggatgagtactacgtctgccgattccaggaaccaggactcgaagcagaatttgctacgtttgacttgaagagtttcttcacattagcattgactcttcgggcaacaggttcttcagctatggaccttcgaaaaatgcaaacttatagtaagcaaatggtgctaccttcttggctatctgaggaagatgtcagttaccttgcaagtgtgtactcaaaaactggatttgctggtggagtaaattactatcgctgcttggacctgaactgggaactgatggcgccatggacaggagcaaaggtgcaagttccaaccaagttcatcgttggggacggtgacctggcgtaccatcaccctggagtgaagaggtacatccacaagggcgggttcaagagggacgtgcccatgcttgaggaggtggtggtcatcaagggcgctggggcacttcatccagcaggaaagagcgcaggaaatcagtgagcacatccatgactacatcaagaagttcgaagcttgtggtctgccgccactgagagtttcaaagctatgagagacctgatggcttctgtacataactcaaatggtctgggagctattgtagttgtttgtagtgctgcagatctatatattatgaatggtatggagtactgacgatctattcaatggacccacgttgcgttgtgctgtgtggggggcacgggtccccacttaattttcttgtttcagtggacatcttattttatttgatgtagctacaaaggttcattagggcatgtacaatcc

SEQ ID NO: 6641 - protein, 330 aa, Zea mays subsp. mays
  peptide (1)..(330): Ceres Seq. ID no. 13492534
RIDHPPRSRSTAAAQSTTPTRAMAAVRHRQLEANGITMHVAEAGPVNASAPAVLFVHGFPELWYSWRHQMGYLAARGYRCVAPDLRGYGGTTAPPEPTSYTVFHIVGDIVALLDALHLPQVFVVGHDWGAIVSWNLCLLRPDRVRALVNLSVAFMPRRPGVKPLEYFRAAYGDEYYVCRFQEPGLEAEFATFDLKSFFTLALTLRATGSSAMDLRKMQTYSKQMVLPSWLSEEDVSYLASVYSKTGFAGGVNYYRCLDLNWELMAPWTGAKVQVPTKFIVGDGDLAYHHPGVKRYIHKGGFKRDVPMLEEVVVIKGAGALHPAGKSAGNQ

SEQ ID NO: 6642 - protein, 308 aa, Zea mays subsp. mays
  peptide (1)..(308): Ceres Seq. ID no. 13492535
MAAVRHRQLEANGITMHVAEAGPVNASAPAVLFVHGFPELWYSWRHQMGYLAARGYRCVAPDLRGYGGTTAPPEPTSYTVFHIVGDIVALLDALHLPQVFVVGHDWGAIVSWNLCLLRPDRVRALVNLSVAFMPRRPGVKPLEYFRAAYGDEYYVCRFQEPGLEAEFATFDLKSFFTLALTLRATGSSAMDLRKMQTYSKQMVLPSWLSEEDVSYLASVYSKTGFAGGVNYYRCLDLNWELMAPWTGAKVQVPTKFIVGDGDLAYHHPGVKRYIHKGGFKRDVPMLEEVVVIKGAGALHPAGKSAGNQ

SEQ ID NO: 6643 - protein, 293 aa, Zea mays subsp. mays
  peptide (1)..(293): Ceres Seq. ID no. 13492536
MHVAEAGPVNASAPAVLFVHGFPELWYSWRHQMGYLAARGYRCVAPDLRGYGGTTAPPEPTSYTVFHIVGDIVALLDALHLPQVFVVGHDWGAIVSWNLCLLRPDRVRALVNLSVAFMPRRPGVKPLEYFRAAYGDEYYVCRFQEPGLEAEFATFDLKSFFTLALTLRATGSSAMDLRKMQTYSKQMVLPSWLSEEDVSYLASVYSKTGFAGGVNYYRCLDLNWELMAPWTGAKVQVPTKFIVGDGDLAYHHPGVKRYIHKGGFKRDVPMLEEVVVIKGAGALHPAGKSAGNQ

SEQ ID NO: 6644 - DNA, 1121 bp, Zea mays subsp. mays
  misc_feature (1)..(1121): Ceres Seq. ID no. 12355468
  misc_feature (1)..(1121): Ortholog of  Ceres SEQ ID NO 15176379 as cited in SEQ ID NO 59735
acacgcagaggctcgtcgcttttattaaatcagcgctcgtcgccacgcaccctcgcctccccagcgtaacaagtgtccttcctccatcttcctcctccactccactcccaagtccccaccacccccaaccccgtctctccactgcggcgcaggcttcgcttcggctccgctcggctcgagcagaagaaaatgcaacggggcagtgcaggccgtcaggtcacacggcaatgttcttaaatatgctgttctacaacacatcagcgctcccaagccagcaatgcttcctgctgccttttctcgtttcatgtcagtttcatctgctcgcctagaggatcgtggatttgaaactgccactgtagcagatgtcttgaagtctaaagggaagagtgctgatggatcttggctctggtgcaccacagaggatagcgtctatgacgctgtcaaatctatgactcagcacaacgtgggagctttggtggttgtcaaacctggacagaataaatcaatcgctggcattgtcactgagagagattatctccggaaaatcatagtgcagggaaggtcttccaagtcaactaaggttggcgacatcatgactgaagagaacaaactgatcacagtgaatcccgacaccaaggtcctgcaggcaatgcagctcatgacagaaaaccgcgtcagacacatcccggtgatcgacggcacggggatgctggggatggtctccatcggcgacgtcgtgcgcgcggtggtggccgagcacagggaggagctgaaccggctcaatgactacatccagggaggctactaggacggcgtgtgcagcgacgaccccctccgatcccgccagtcagtgaagtccgcctttgaaatccaataactcggaacaatgatgatgacgaaataggccgtgttttcttggacaatgatgttaagttcggcaaggttttcctttctctttttttattctactgcgtggtctatgtgtatattgccaaaggcatgcgtgagccatgcgcccggtgctggggcgcagagaccatctgatggtggaaacaccggaaataagagcgtgccgctgtgtgtttcctttgaaggaataaaaatggtgttcgtgttgtgcc

SEQ ID NO: 6645 - protein, 176 aa, Zea mays subsp. mays
  peptide (1)..(176): Ceres Seq. ID no. 12355469
MLPAAFSRFMSVSSARLEDRGFETATVADVLKSKGKSADGSWLWCTTEDSVYDAVKSMTQHNVGALVVVKPGQNKSIAGIVTERDYLRKIIVQGRSSKSTKVGDIMTEENKLITVNPDTKVLQAMQLMTENRVRHIPVIDGTGMLGMVSIGDVVRAVVAEHREELNRLNDYIQGGY

SEQ ID NO: 6646 - protein, 167 aa, Zea mays subsp. mays
  peptide (1)..(167): Ceres Seq. ID no. 12355470
MSVSSARLEDRGFETATVADVLKSKGKSADGSWLWCTTEDSVYDAVKSMTQHNVGALVVVKPGQNKSIAGIVTERDYLRKIIVQGRSSKSTKVGDIMTEENKLITVNPDTKVLQAMQLMTENRVRHIPVIDGTGMLGMVSIGDVVRAVVAEHREELNRLNDYIQGGY

SEQ ID NO: 6647 - protein, 119 aa, Zea mays subsp. mays
  peptide (1)..(119): Ceres Seq. ID no. 12355471
MTQHNVGALVVVKPGQNKSIAGIVTERDYLRKIIVQGRSSKSTKVGDIMTEENKLITVNPDTKVLQAMQLMTENRVRHIPVIDGTGMLGMVSIGDVVRAVVAEHREELNRLNDYIQGGY

SEQ ID NO: 6648 - DNA, 887 bp, Zea mays subsp. mays
  misc_feature (1)..(887): Ceres Seq. ID no. 12372498
  misc_feature (1)..(887): Ortholog of  Ceres SEQ ID NO 15177027 as cited in SEQ ID NO 58171
  misc_feature (1)..(887): Ortholog of  Ceres SEQ ID NO 13583887 as cited in SEQ ID NO 63100
cattttcatgaagcccagtaagggaagggagagccgattcatttgcatttttctgagcagatgcagatcgatcccgagttccgctgactgcagaggagagagatctagagcgagggagggagggaaatgggccacgaggctgcggcgccggggtcgtcggtgctcggccgcgcggtggaggaggtgcgctcggccctcaacgagcacgccgacgtggttgccgacctcttcggtcgcgtctcctccgaagtgcgcaccggcttcgcgcccgccgtcgactccttcgttggcttcttccacgccgtcgactggaaggagccttggctgatcagcatactatctttccatgccattctgctactggttaccatcatctcgaggaggaatatcaatttccagctcatcttgtcagctctaacattttctggtgtattccttgctgagagattaaatacgttcctggcgcaaaactggaagagcttctctacccaaaactattttgatccccagggccttttcatttcggtcatctggtctggccctctcctcctgataacgatccttattctggtgaacactctcgtgacgctctgcacgctaatggtaaggtggaaaagggcaaagctcaggcatcgcgctcggcaagctcgtgacaagcaggactgatctgaaacctgcgtctatgtatcattcggtggcaagtagaaagtcgtgttcttgctacggttggtctaaccaagaatcacatccctggaaacggtgcccatttcattaggtagcagaatataacgttaagatggtcagattttgctcttgtggacccttttggtgcccgggtagccatttactacgctgcaatattatcacgtcacacgatttctttgggc

SEQ ID NO: 6649 - protein, 179 aa, Zea mays subsp. mays
  peptide (1)..(179): Ceres Seq. ID no. 12372499
MGHEAAAPGSSVLGRAVEEVRSALNEHADVVADLFGRVSSEVRTGFAPAVDSFVGFFHAVDWKEPWLISILSFHAILLLVTIISRRNINFQLILSALTFSGVFLAERLNTFLAQNWKSFSTQNYFDPQGLFISVIWSGPLLLITILILVNTLVTLCTLMVRWKRAKLRHRARQARDKQD

SEQ ID NO: 6650 - protein, 108 aa, Zea mays subsp. mays
  peptide (1)..(108): Ceres Seq. ID no. 12372500
IFMKPSKGRESRFICIFLSRCRSIPSSADCRGERSRAREGGKWATRLRRRGRRCSAARWRRCARPSTSTPTWLPTSSVASPPKCAPASRPPSTPSLASSTPSTGRSLG

SEQ ID NO: 6651 - protein, 106 aa, Zea mays subsp. mays
  peptide (1)..(106): Ceres Seq. ID no. 12372501
MKPSKGRESRFICIFLSRCRSIPSSADCRGERSRAREGGKWATRLRRRGRRCSAARWRRCARPSTSTPTWLPTSSVASPPKCAPASRPPSTPSLASSTPSTGRSLG

SEQ ID NO: 6652 - DNA, 1978 bp, Zea mays subsp. mays
  misc_feature (1)..(1978): Ceres Seq. ID no. 12387049
  misc_feature (1)..(1978): Ortholog of  Ceres SEQ ID NO 13579556 as cited in SEQ ID NO 53743
aaaccaaacccagctcaggcacaaccccaacgcaccgccgccgctcgcctggcctcacctcgccggagaagagttataagacaggagaaccccgtccccggggcgcaggcctcggcagcttccgtgaccaccgcccaatcctgccacagctgccctccctcctcccctctgggcgtggccgagttgtaggcatcacggctagcgttgcagccccccggcgcggccccgcagctgcgcaggtggagcccacgggcaccatcgcctccgctgtcgcgtccagccccgctccgcacggcggccgcgggggcgctgccctcggccggaggaagcccgtccgatctcctcttcctcgccggcggcggtcgcctctgagccgttcctgtctctcaccttcttcctttcctagcaattagtcccttctgctaacccccccggaccccgacgagttctcaccccgagagtaactgaccgacctaccggcatggagatgaagctgaccatcaggagggtgcccaccgtcgtctccaactaccaggaggacgccgacaagccgcgcgcgggctgcgggaggaactgcctcggcgactgctgcctgcctgcttccaagcttcccctctacgcgttcaagttgactccggcaaagggctcgcaggaggatgctgcttcaaccaagttacttgttgatattctccttagtgagtgggaggacaggatgactcgaggcttattccgctacgatgtcactgcctgtgagaccaaggtcattcctggcaaccttgggtttgttgcacaactcaatgaagggcgccatcttaagaagcgccctactgagtttcgtgtggaccgtgtgctccagccgtttgaccctgccaaattcaatttcacaaaagttggccaggaagaggttctcttccaatttgagaatagtggtggtgatgacagctatttcctgaacaacgctccaatcattgctgttgatcgggctccaaatgttattgctatcaatgtaagcccaattgaatatggacatgtgcttctcattcctcgtgttctggaccgcctgcctcagaggattgatccagagagcttcttgcttgcactgcaaatggcagccgagggaggtagcccatacttcaggcttggttacaatagcttgggtgcgtttgccaccatcaatcacctccactttcaggcgtactacttgtcagtgcctttccctgttgagaaggcagctacccacaagatcccactctctgaggacacgaagaagaatggggtgaccgtgtccaagctgataaattatcctgtgagaggcctggtatttgagggagggaacaccctggacgacctggccactgtggtttctaatgcttgcatttggctgcaagacaacaatgtgccttacaatgtgctcatttctgactgtggcaagagggttttcctgttcccccagtgctacgcagagaagcaggctctgggtgaagtgagccaggagctgctggacactcaggtgaacccagctgtgtgggagatcagtggacacatggtgctgaaacggaggatggactatgaggaggcatctgaaacctccgcgtggaaactcctcgccgaggtctctctctccgaggagcgcttcgaggaagtgaaggcgtacatcttcagcgctgctggcctggttcagtatgatgaggaagaggaggaagccagcgacggtgagggccctacggcctatgttcctgtcaaggttacccctctgcccatcgctgaagggtgcctcgtcctcccgtgagtccgtggtcggttaaataaagggccgtatatgattgcgagccctgtgctctgccgctattttcttctcgtttgtgtcttgctgctctcgtggtgaactcgctactccagtactctgcaatattaagcagaagctattgtattgtttgggtcgtttgtcagctaaattgaaatgcgatggacatttact

SEQ ID NO: 6653 - protein, 435 aa, Zea mays subsp. mays
  peptide (1)..(435): Ceres Seq. ID no. 12387050
MEMKLTIRRVPTVVSNYQEDADKPRAGCGRNCLGDCCLPASKLPLYAFKLTPAKGSQEDAASTKLLVDILLSEWEDRMTRGLFRYDVTACETKVIPGNLGFVAQLNEGRHLKKRPTEFRVDRVLQPFDPAKFNFTKVGQEEVLFQFENSGGDDSYFLNNAPIIAVDRAPNVIAINVSPIEYGHVLLIPRVLDRLPQRIDPESFLLALQMAAEGGSPYFRLGYNSLGAFATINHLHFQAYYLSVPFPVEKAATHKIPLSEDTKKNGVTVSKLINYPVRGLVFEGGNTLDDLATVVSNACIWLQDNNVPYNVLISDCGKRVFLFPQCYAEKQALGEVSQELLDTQVNPAVWEISGHMVLKRRMDYEEASETSAWKLLAEVSLSEERFEEVKAYIFSAAGLVQYDEEEEEASDGEGPTAYVPVKVTPLPIAEGCLVLP

SEQ ID NO: 6654 - protein, 433 aa, Zea mays subsp. mays
  peptide (1)..(433): Ceres Seq. ID no. 12387051
MKLTIRRVPTVVSNYQEDADKPRAGCGRNCLGDCCLPASKLPLYAFKLTPAKGSQEDAASTKLLVDILLSEWEDRMTRGLFRYDVTACETKVIPGNLGFVAQLNEGRHLKKRPTEFRVDRVLQPFDPAKFNFTKVGQEEVLFQFENSGGDDSYFLNNAPIIAVDRAPNVIAINVSPIEYGHVLLIPRVLDRLPQRIDPESFLLALQMAAEGGSPYFRLGYNSLGAFATINHLHFQAYYLSVPFPVEKAATHKIPLSEDTKKNGVTVSKLINYPVRGLVFEGGNTLDDLATVVSNACIWLQDNNVPYNVLISDCGKRVFLFPQCYAEKQALGEVSQELLDTQVNPAVWEISGHMVLKRRMDYEEASETSAWKLLAEVSLSEERFEEVKAYIFSAAGLVQYDEEEEEASDGEGPTAYVPVKVTPLPIAEGCLVLP

SEQ ID NO: 6655 - protein, 358 aa, Zea mays subsp. mays
  peptide (1)..(358): Ceres Seq. ID no. 12387052
MTRGLFRYDVTACETKVIPGNLGFVAQLNEGRHLKKRPTEFRVDRVLQPFDPAKFNFTKVGQEEVLFQFENSGGDDSYFLNNAPIIAVDRAPNVIAINVSPIEYGHVLLIPRVLDRLPQRIDPESFLLALQMAAEGGSPYFRLGYNSLGAFATINHLHFQAYYLSVPFPVEKAATHKIPLSEDTKKNGVTVSKLINYPVRGLVFEGGNTLDDLATVVSNACIWLQDNNVPYNVLISDCGKRVFLFPQCYAEKQALGEVSQELLDTQVNPAVWEISGHMVLKRRMDYEEASETSAWKLLAEVSLSEERFEEVKAYIFSAAGLVQYDEEEEEASDGEGPTAYVPVKVTPLPIAEGCLVLP

SEQ ID NO: 6656 - DNA, 1410 bp, Zea mays subsp. mays
  misc_feature (1)..(1410): Ceres Seq. ID no. 12405518
  misc_feature (1)..(1410): Ortholog of  Ceres SEQ ID NO 14315455 as cited in SEQ ID NO 56988
gtaatctcaatcgtatcgtccacctcaacaaaccttcgtccacgcttcgactcctgcaggagtgagggagagagtgatggagaggtgcgggagctgggactgcgacgcggcggcagcgcagaaggcggtaccggcgccgttcctgaccaagacgtaccagctggtggacgacccggccacggaccacatcgtctcctggggggacgaccgggtctccaccttcgtggtctggcgcccgccggagttcgcgcgcgacatcctccccaactacttcaagcacaacaacttctcctccttcgttcgacagctaaacacctacgggttccggaaggtcgtcccggagcggtgggagttcgggaacgagttcttccggaagggggagaagcagctgctgtgcgagatccaccggcggaagacgtcgacgtccgcggctccgccgtcgcctccgccattcttcggcggcgcctcacttcccgctcttccacccggacgccccgcaccaccaccaccaccaccagttcgtggggggaggagacgacggggctgtggcggccgcgcacgtcggcggcgtcggcgtcgccctcgcgttcccgcacccgcattgttggagggagccgccgcantccgccgcgccggtagccacgcggctgctagccctgggcgcggctcctccggcgccgtcgtccccgctgccggccgccgatgccggcggaggcgggcgcgcggccgtgctggtggaggagaacgagcggctgcggcgcagcaacgcggcgctgctgcaggagctggcgcacatgcgcaagctgtacaacgacatcatctacttcgtgcagaaccacgtgcgccccgcggcgcccagccctgccgcggccgcgttcctgcagggcctcggcctgcaggcgcgcaagaagcccgccgcggggccgctcaaccactccggtgggagcaccacgtccagcagctcgctcaccatcgcggaggaggagccctcgcccccgcccccgccgcagcaggccgacaagagcgccggaagcagcggcactgcgcggtctgccgccgaccgcgcgccgcccaccatgctcttcggagtgcacctcagcgccgcgcgaggcagcaagaggccggcttccccggaggaagaagacgaccagtcgcccacgtcgcctgctgggaagccacggctggcgctggagtgcgccggcttgagcctggccgtcgcggtgccctccgccggcgcctcgtcccctgctagcactagctagctaagcctcactcaccttgcgcgcaacctgacgcgcgtttgcatgctgctgcatgcaaacgcaacggcgggcgtggccgttttgttgttctagctctagtttgatcgacgtgttccatttgaaccggtagatccagatgggttctctc

SEQ ID NO: 6657 - protein, 391 aa, Zea mays subsp. mays
  peptide (1)..(391): Ceres Seq. ID no. 12405519
  misc_feature (183)..(183): Xaa is any aa, unknown or other
MERCGSWDCDAAAAQKAVPAPFLTKTYQLVDDPATDHIVSWGDDRVSTFVVWRPPEFARDILPNYFKHNNFSSFVRQLNTYGFRKVVPERWEFGNEFFRKGEKQLLCEIHRRKTSTSAAPPSPPPFFGGASLPALPPGRPAPPPPPPVRGGRRRRGCGGRARRRRRRRPRVPAPALLEGAAAXRRAGSHAAASPGRGSSGAVVPAAGRRCRRRRARGRAGGGERAAAAQQRGAAAGAGAHAQAVQRHHLLRAEPRAPRGAQPCRGRVPAGPRPAGAQEARRGAAQPLRWEHHVQQLAHHRGGGALAPAPAAAGRQERRKQRHCAVCRRPRAAHHALRSAPQRRARQQEAGFPGGRRRPVAHVACWEATAGAGVRRLEPGRRGALRRRLVPC

SEQ ID NO: 6658 - protein, 212 aa, Zea mays subsp. mays
  peptide (1)..(212): Ceres Seq. ID no. 12405520
  misc_feature (208)..(208): Xaa is any aa, unknown or other
VISIVSSTSTNLRPRFDSCRSEGESDGEVRELGLRRGGSAEGGTGAVPDQDVPAGGRPGHGPHRLLGGRPGLHLRGLAPAGVRARHPPQLLQAQQLLLLRSTAKHLRVPEGRPGAVGVRERVLPEGGEAAAVRDPPAEDVDVRGSAVASAILRRRLTSRSSTRTPRTTTTTTSSWGEETTGLWRPRTSAASASPSRSRTRIVGGSRRXPPRR

SEQ ID NO: 6659 - DNA, 2035 bp, Zea mays subsp. mays
  misc_feature (1)..(2035): Ceres Seq. ID no. 12405514
  misc_feature (1)..(2035): Ortholog of  Ceres SEQ ID NO 13599965 as cited in SEQ ID NO 0
actctctttcccaccgccttcttccactactcttcaccctcccctcctccccatcgcgaactcacaagagaaccaagtagacgagggagaaggagatggcgaagaagaaggagaaggcggtgaacgtgtcgggcaagccgcggcactcgaacgacgtcaaccgccccaatgacaagaagggcgcgggcggcggcgccggtggcgggagccggtccgcggctaccgtgcggcggctcaagatgtacaagacgcggcccaagagggaccgctcctggaaggtgctcaggaacgattttcagtctaaagagctccccaacacccgcatcgagcccgaccgccggtggttcggcaatactcgcgttgtgggccagccacagcttgaaatgttccgggaggaactccagagtcggctttccgacaacttcagtgtcatcctgaaagaacggaagctgccactatcgctcctgcaagatcatcaaaagcaagcgaaggcacatctgcttgaagttgaaccttttgagcatgcttttgggccaaagggcaagaggaaacgtccgaaactaactgctcttgactacgaatctttgctgaagagagctgatgattcccaagatgtgtttgagcaaaagtatgcttcatcaaagttgccaagggaggaagaagaagatggcttacgtgatctagtgaggcatacaatgtttgagaagggacagagcaaaagaatctggggtgaactatacaaagttattgactcttcggacgttgttgtgcaggtgttggacgccagggatccaatgggcactcgatgctaccatctagagagacatctaaaagagaactgcaagcacaaacacttggttttcttgctaaataagtgtgatctaatccctgcttgggctacaaaaggatggttaaggaccctttcgaaggactatcccaccctagcattccatgcaagcatcaacaagtcatttggcaaaggatctcttctgtcagtattgaggcaatttgctcgtttgaagaatgacaaacaagctatttctgtcgggtttgttgggtaccccaatgttgggaagtcatcaattattaacacactacggtcgaagagtgtctgcaaggttgctccaatacctggagagacaaaagtgtggcagtacatcactctcactaaaaagatatttttgattcattgtcccggtgttgtatatcaaaacaatgattcagaaactgatatagttctgaagggtgtggtccgggtgacaaatttggcggatgctgctgagcacattggtgaagttcttaggcgtgttaaaaaggagcatctccaaagagcgtacaaaattcaagattggtctgatgataacgattttcttgtccagctgtgcaggaccactggaaaacttctcaagggcggggagcctgatctgacaacagcagccaagatggtacttcatgactggcagaggggtaaaatccccttctttgtaccccctccgcagcaaagcgacggcggtgcatctgaaagtgctgaacaacctattgggattaccaaagaggacggagtaagcagcgacaggactgccgcagccatgaaagccattgcaggaataatctcgtcacagcagaacatgaatgtgccctgccataaggaaaacaatgcagacaatgaagacactgaaaatgcagataacgaagacattgagagttcagataacgaagacaatgatgacatcgagcctgcaggagcgatctgagtgatctttgggtacagatgtggattattagagttgatatgtcaaggctaatgaatttgtcagccccaggtgttgtgtagctacttgaccatatcactggcgtgccaggaaaaaaaggatcatgttgagttgcactttttgtaactatcgtacctgaatctttgtaatagggcaagaagagagttttgctaggtacctggttgtatcgggatgcttatctgtgctgtctactacagatacagttacatctattttacttaaatcaagtggaagttatctcc

SEQ ID NO: 6660 - protein, 552 aa, Zea mays subsp. mays
  peptide (1)..(552): Ceres Seq. ID no. 12405515
MAKKKEKAVNVSGKPRHSNDVNRPNDKKGAGGGAGGGSRSAATVRRLKMYKTRPKRDRSWKVLRNDFQSKELPNTRIEPDRRWFGNTRVVGQPQLEMFREELQSRLSDNFSVILKERKLPLSLLQDHQKQAKAHLLEVEPFEHAFGPKGKRKRPKLTALDYESLLKRADDSQDVFEQKYASSKLPREEEEDGLRDLVRHTMFEKGQSKRIWGELYKVIDSSDVVVQVLDARDPMGTRCYHLERHLKENCKHKHLVFLLNKCDLIPAWATKGWLRTLSKDYPTLAFHASINKSFGKGSLLSVLRQFARLKNDKQAISVGFVGYPNVGKSSIINTLRSKSVCKVAPIPGETKVWQYITLTKKIFLIHCPGVVYQNNDSETDIVLKGVVRVTNLADAAEHIGEVLRRVKKEHLQRAYKIQDWSDDNDFLVQLCRTTGKLLKGGEPDLTTAAKMVLHDWQRGKIPFFVPPPQQSDGGASESAEQPIGITKEDGVSSDRTAAAMKAIAGIISSQQNMNVPCHKENNADNEDTENADNEDIESSDNEDNDDIEPAGAI

SEQ ID NO: 6661 - protein, 504 aa, Zea mays subsp. mays
  peptide (1)..(504): Ceres Seq. ID no. 12405516
MYKTRPKRDRSWKVLRNDFQSKELPNTRIEPDRRWFGNTRVVGQPQLEMFREELQSRLSDNFSVILKERKLPLSLLQDHQKQAKAHLLEVEPFEHAFGPKGKRKRPKLTALDYESLLKRADDSQDVFEQKYASSKLPREEEEDGLRDLVRHTMFEKGQSKRIWGELYKVIDSSDVVVQVLDARDPMGTRCYHLERHLKENCKHKHLVFLLNKCDLIPAWATKGWLRTLSKDYPTLAFHASINKSFGKGSLLSVLRQFARLKNDKQAISVGFVGYPNVGKSSIINTLRSKSVCKVAPIPGETKVWQYITLTKKIFLIHCPGVVYQNNDSETDIVLKGVVRVTNLADAAEHIGEVLRRVKKEHLQRAYKIQDWSDDNDFLVQLCRTTGKLLKGGEPDLTTAAKMVLHDWQRGKIPFFVPPPQQSDGGASESAEQPIGITKEDGVSSDRTAAAMKAIAGIISSQQNMNVPCHKENNADNEDTENADNEDIESSDNEDNDDIEPAGAI

SEQ ID NO: 6662 - protein, 456 aa, Zea mays subsp. mays
  peptide (1)..(456): Ceres Seq. ID no. 12405517
MFREELQSRLSDNFSVILKERKLPLSLLQDHQKQAKAHLLEVEPFEHAFGPKGKRKRPKLTALDYESLLKRADDSQDVFEQKYASSKLPREEEEDGLRDLVRHTMFEKGQSKRIWGELYKVIDSSDVVVQVLDARDPMGTRCYHLERHLKENCKHKHLVFLLNKCDLIPAWATKGWLRTLSKDYPTLAFHASINKSFGKGSLLSVLRQFARLKNDKQAISVGFVGYPNVGKSSIINTLRSKSVCKVAPIPGETKVWQYITLTKKIFLIHCPGVVYQNNDSETDIVLKGVVRVTNLADAAEHIGEVLRRVKKEHLQRAYKIQDWSDDNDFLVQLCRTTGKLLKGGEPDLTTAAKMVLHDWQRGKIPFFVPPPQQSDGGASESAEQPIGITKEDGVSSDRTAAAMKAIAGIISSQQNMNVPCHKENNADNEDTENADNEDIESSDNEDNDDIEPAGAI

SEQ ID NO: 6663 - DNA, 1025 bp, Zea mays subsp. mays
  misc_feature (1)..(1025): Ceres Seq. ID no. 12356370
  misc_feature (1)..(1025): Ortholog of  Ceres SEQ ID NO 14302919 as cited in SEQ ID NO 20338
  misc_feature (1)..(1025): Ortholog of  Ceres SEQ ID NO 13595497 as cited in SEQ ID NO 51127
  misc_feature (1)..(1025): Ortholog of  Ceres SEQ ID NO 14306765 as cited in SEQ ID NO 53275
  misc_feature (1)..(1025): Ortholog of  Ceres SEQ ID NO 14314046 as cited in SEQ ID NO 59316
ccaatctgtgtttgtctttgcttgccccccttctcccccctcatctccccccttttcttgttcctgtgcctgtgcattggctggcgatggggtccacttctccttcaggcctggagctcaccatggctgtcccgggcctcagctcctcctctggctcagaggggtttggatgcaacaacaacaacgggagcgggaacgggaacaacatgagggacctggacatgaaccagccggcgagcggcggcgaggaggaggagttcccaatggggagcgtggaggaggaggaggacgagcgcggcggcgccggcgggccgcaccgcgccaagaagctccggctgtccaaggagcagtcccgcctcctggaggagagcttccgcctcaaccacaccctcacaccgaagcaaaaggaggccttggctgtcaagctcaagctgcggcccaggcaggtggaggtctggttccagaaccgcagggctaggacgaagcttaagcagacggagctggagtgcgagtacctgaagcgctgcttcggctcgctgaccgaggagaaccggcggctgcagcgggaggtggaggagctgcgcgcgatgcgggtggccccgcccaccgtgctctccccgcacacccggcagccgctcccggcgtccgcgctcaccatgtgcccgcgctgcgagcgcatcaccgccgcaacggccgcgcgcaccccacgcccggcgcccgccgcgagccccttccacccgcgccgcccgtccgcggcgttttagcctagtctcccgctgcatgcggttccggccggtagggggaaggagcggaaagtttggttgttagggggggggggcagagtgtttgtgctgtgtaaatttgatgatggatggagaaaaccagcgcgggcccgtgtagctttttaggtgtaggtgtaggtgtagggtttggaccttggagtcccttcgcgtcaacgtccccgtccccgtgttccgttccatgccgtgcatggcttgatggatcaaaagtttgtactagcttcc

SEQ ID NO: 6664 - protein, 253 aa, Zea mays subsp. mays
  peptide (1)..(253): Ceres Seq. ID no. 12356371
NLCLSLLAPLLPPHLPPFLVPVPVHWLAMGSTSPSGLELTMAVPGLSSSSGSEGFGCNNNNGSGNGNNMRDLDMNQPASGGEEEEFPMGSVEEEEDERGGAGGPHRAKKLRLSKEQSRLLEESFRLNHTLTPKQKEALAVKLKLRPRQVEVWFQNRRARTKLKQTELECEYLKRCFGSLTEENRRLQREVEELRAMRVAPPTVLSPHTRQPLPASALTMCPRCERITAATAARTPRPAPAASPFHPRRPSAAF

SEQ ID NO: 6665 - protein, 225 aa, Zea mays subsp. mays
  peptide (1)..(225): Ceres Seq. ID no. 12356372
MGSTSPSGLELTMAVPGLSSSSGSEGFGCNNNNGSGNGNNMRDLDMNQPASGGEEEEFPMGSVEEEEDERGGAGGPHRAKKLRLSKEQSRLLEESFRLNHTLTPKQKEALAVKLKLRPRQVEVWFQNRRARTKLKQTELECEYLKRCFGSLTEENRRLQREVEELRAMRVAPPTVLSPHTRQPLPASALTMCPRCERITAATAARTPRPAPAASPFHPRRPSAAF

SEQ ID NO: 6666 - protein, 213 aa, Zea mays subsp. mays
  peptide (1)..(213): Ceres Seq. ID no. 12356373
MAVPGLSSSSGSEGFGCNNNNGSGNGNNMRDLDMNQPASGGEEEEFPMGSVEEEEDERGGAGGPHRAKKLRLSKEQSRLLEESFRLNHTLTPKQKEALAVKLKLRPRQVEVWFQNRRARTKLKQTELECEYLKRCFGSLTEENRRLQREVEELRAMRVAPPTVLSPHTRQPLPASALTMCPRCERITAATAARTPRPAPAASPFHPRRPSAAF

SEQ ID NO: 6667 - DNA, 688 bp, Zea mays subsp. mays
  misc_feature (1)..(688): Ceres Seq. ID no. 12383120
  misc_feature (1)..(688): Ortholog of  Ceres SEQ ID NO 13502858 as cited in SEQ ID NO 65109
gtgtcaagcatgatattacggacaacctttctttaaagataaatgctcagttgacaagtgagccccactactcccaagggatgctgaattttgattataagggcaaagattttagatctcaggttcaattcggaaacaatggtttctatggagcaaactacatccagagtgtcagcaagaacctttccttgggaactgaagccttttggcttgggcagcaaaggaagtctggagtcggtgttgttgctcgctatgacacaaagaaaatggttgcgactgcacaaattgcaaccactggaatggtcgcgcttagttatgtacagaaagtttctgaaaaggtttcccttgcatctgatttcatgtacaatcaaatgacaaaggatgtaacagcaagctttggttatgattatatgctgagacagtgtcgattgagagggaaactggataccaatggcgtaatttcttctcttttggaggagcgattgactccaggtgtcactttccagttgtctgcagagctggaccactggaagaaagattacaaatttgggtttggtatggctctcggagagtaagacgatttgagcaaattctagacacatgtacaattagtggttggcattagtcgacagggattaaaacgattctactttatctttgcatttatttgtctcccagttattcgttt

SEQ ID NO: 6668 - protein, 190 aa, Zea mays subsp. mays
  peptide (1)..(190): Ceres Seq. ID no. 12383121
VKHDITDNLSLKINAQLTSEPHYSQGMLNFDYKGKDFRSQVQFGNNGFYGANYIQSVSKNLSLGTEAFWLGQQRKSGVGVVARYDTKKMVATAQIATTGMVALSYVQKVSEKVSLASDFMYNQMTKDVTASFGYDYMLRQCRLRGKLDTNGVISSLLEERLTPGVTFQLSAELDHWKKDYKFGFGMALGE

SEQ ID NO: 6669 - protein, 164 aa, Zea mays subsp. mays
  peptide (1)..(164): Ceres Seq. ID no. 12383122
MLNFDYKGKDFRSQVQFGNNGFYGANYIQSVSKNLSLGTEAFWLGQQRKSGVGVVARYDTKKMVATAQIATTGMVALSYVQKVSEKVSLASDFMYNQMTKDVTASFGYDYMLRQCRLRGKLDTNGVISSLLEERLTPGVTFQLSAELDHWKKDYKFGFGMALGE

SEQ ID NO: 6670 - protein, 102 aa, Zea mays subsp. mays
  peptide (1)..(102): Ceres Seq. ID no. 12383123
MVATAQIATTGMVALSYVQKVSEKVSLASDFMYNQMTKDVTASFGYDYMLRQCRLRGKLDTNGVISSLLEERLTPGVTFQLSAELDHWKKDYKFGFGMALGE

SEQ ID NO: 6671 - DNA, 1761 bp, Zea mays subsp. mays
  misc_feature (1)..(1761): Ceres Seq. ID no. 12382163
  misc_feature (1)..(1761): Ortholog of  Ceres SEQ ID NO 13599900 as cited in SEQ ID NO 531
  misc_feature (1)..(1761): Ortholog of  Ceres SEQ ID NO 14310498 as cited in SEQ ID NO 55066
  misc_feature (1)..(1761): Ortholog of  Ceres SEQ ID NO 13596509 as cited in SEQ ID NO 62004
  misc_feature (1)..(1761): Ortholog of  Ceres SEQ ID NO 13659971 as cited in SEQ ID NO 67565
  misc_feature (1)..(1761): Ortholog of  Ceres SEQ ID NO 13500385 as cited in SEQ ID NO 67583
gcacgagaccattacctagaacatcctaatcaaaaaagaaggaacatcgaagaaaggaaggaggtgggcggcaatggaggatgcgatggcggcggacgggaagagcgtgctgcaggggcggtacgagctggggcgggtgctggggcacggcaacttcgggcgggtgcacgcggcgcgggacctgcgcacgggccgcagcgtcgcggtcaaggtggtggccaaggacaagctggagcgcgcgggcatggcggagcagatcaagcgggagatcgccgtcatgaagatggtgtcccaccccaacatcgtggagctgcacgaggtgatggccacccgctccaagatctacctcgcgctcgagctcgtccgcggcggggagctcttctcccgcatcgcgcgcgcggggcgggtccgggaggacgtggcgcgctgttacttccggcagctcgtcgccgcggtcgacttctgccacggccgcggggtgttccaccgagacctgaagctcgagaacctgctcctcgacgaggtaggcaacctcaaagtggcggactttgggctcagcgcgctcgccgggcacgcgcgctccgacgggctgctccataccgcctgtggcacgccgtcatacgtcgcccccgaggtgctcggcgggaagggctacgacggcgccaaggcggacctctggtcctgtggcgtcatcctctacgtgctcctcgttggcagcttgccattccacgaggacaacctcatggtcatgtaccggaagatgcagcgcggcgagttcctctgcccgccgtgggtctcagcggacgcccggaagctcatcggcgagctgctcgaccccgacccgagcacgcgcatcaccgtcgctcgcctcgtcgagacgccgtggtaccggaagccgttgcccgtcctgccgccgctcaacctcaaggagccaaccccggacgcgcgccgcgccacctctgacaaggaagagcccgaggtgctgaacgcgttccacctcatctctttctcggagggcttcgacctgtccccgctcttcgaccagggccgtggcggcggcgtagggaggtctagcgcgggcggcatccgtttcgtgacgcgcgaggccgccagcagcgtggtctcccgtctggagtcgctggtcaccggccgcggagccaacatgcgcgtgacaaagagcggctcgcggggcgttcgtttggaggccgtgtcgcgcgggcgctcgggggcgcggctggcagtggccgcggagatcttcagcgtggcgccgtcggtgctcctggtggacgtgaagaaggacggcggcgacacgatggagtaccggtcgttctgttgcgaggagctccggccggcgctcaaggacatcgtctgggcctccagccaggacacaccgggcgccgcttgatgtcgtcgctgtcgctcctgccaccattattgtccttgcccatcaattgctgttggtgtccgtgtagggggggtcgtgctcgtgcattattgtttggtgacgaagtgatgtttgtttgtcgtttgccactctcgtagttggtttctgctgtggtgcagcggctgctggcagttgcagttgggctgttgcccgcggggcgcgagcaaagcagaatcagcgggaactagcattcgtatcctgcatgcacgcccataccgtgtcagctctgaagtgggaagaactgtaacaagtagtagtacgaatgtaccagggtgatgtgctttcgagtcacttgtgtatatattcatttttttagc

SEQ ID NO: 6672 - protein, 443 aa, Zea mays subsp. mays
  peptide (1)..(443): Ceres Seq. ID no. 12382164
MEDAMAADGKSVLQGRYELGRVLGHGNFGRVHAARDLRTGRSVAVKVVAKDKLERAGMAEQIKREIAVMKMVSHPNIVELHEVMATRSKIYLALELVRGGELFSRIARAGRVREDVARCYFRQLVAAVDFCHGRGVFHRDLKLENLLLDEVGNLKVADFGLSALAGHARSDGLLHTACGTPSYVAPEVLGGKGYDGAKADLWSCGVILYVLLVGSLPFHEDNLMVMYRKMQRGEFLCPPWVSADARKLIGELLDPDPSTRITVARLVETPWYRKPLPVLPPLNLKEPTPDARRATSDKEEPEVLNAFHLISFSEGFDLSPLFDQGRGGGVGRSSAGGIRFVTREAASSVVSRLESLVTGRGANMRVTKSGSRGVRLEAVSRGRSGARLAVAAEIFSVAPSVLLVDVKKDGGDTMEYRSFCCEELRPALKDIVWASSQDTPGAA

SEQ ID NO: 6673 - protein, 439 aa, Zea mays subsp. mays
  peptide (1)..(439): Ceres Seq. ID no. 12382165
MAADGKSVLQGRYELGRVLGHGNFGRVHAARDLRTGRSVAVKVVAKDKLERAGMAEQIKREIAVMKMVSHPNIVELHEVMATRSKIYLALELVRGGELFSRIARAGRVREDVARCYFRQLVAAVDFCHGRGVFHRDLKLENLLLDEVGNLKVADFGLSALAGHARSDGLLHTACGTPSYVAPEVLGGKGYDGAKADLWSCGVILYVLLVGSLPFHEDNLMVMYRKMQRGEFLCPPWVSADARKLIGELLDPDPSTRITVARLVETPWYRKPLPVLPPLNLKEPTPDARRATSDKEEPEVLNAFHLISFSEGFDLSPLFDQGRGGGVGRSSAGGIRFVTREAASSVVSRLESLVTGRGANMRVTKSGSRGVRLEAVSRGRSGARLAVAAEIFSVAPSVLLVDVKKDGGDTMEYRSFCCEELRPALKDIVWASSQDTPGAA

SEQ ID NO: 6674 - protein, 386 aa, Zea mays subsp. mays
  peptide (1)..(386): Ceres Seq. ID no. 12382166
MAEQIKREIAVMKMVSHPNIVELHEVMATRSKIYLALELVRGGELFSRIARAGRVREDVARCYFRQLVAAVDFCHGRGVFHRDLKLENLLLDEVGNLKVADFGLSALAGHARSDGLLHTACGTPSYVAPEVLGGKGYDGAKADLWSCGVILYVLLVGSLPFHEDNLMVMYRKMQRGEFLCPPWVSADARKLIGELLDPDPSTRITVARLVETPWYRKPLPVLPPLNLKEPTPDARRATSDKEEPEVLNAFHLISFSEGFDLSPLFDQGRGGGVGRSSAGGIRFVTREAASSVVSRLESLVTGRGANMRVTKSGSRGVRLEAVSRGRSGARLAVAAEIFSVAPSVLLVDVKKDGGDTMEYRSFCCEELRPALKDIVWASSQDTPGAA

SEQ ID NO: 6675 - DNA, 733 bp, Zea mays subsp. mays
  misc_feature (1)..(733): Ceres Seq. ID no. 12414009
  misc_feature (1)..(733): Ortholog of  Ceres SEQ ID NO 13594583 as cited in SEQ ID NO 52001
  misc_feature (1)..(733): Ortholog of  Ceres SEQ ID NO 13639278 as cited in SEQ ID NO 59801
  misc_feature (1)..(733): Ortholog of  Ceres SEQ ID NO 12598299 as cited in SEQ ID NO 68409
gttccccagcagcctcttccccttcccgaccagagcaagcacgccaccgcttccgtcgtcgtcctcccgaccgtctcactcccgcccccacctccgcatccgatctccgaaacctaataatccaacggtcgcgcccgcgtcctctcggatggaggtggcccagccccaggcgagcaacgcccagggaggggcggagccggccatgaagctactgttcgtggagatgggcgtcggctacgatcagcacggccaagatatcaccgccgccgccgtgcgcgcctgcaaggacgccatcacctccaactccatccccgccttccggggcgggtccattccaggagtgaacacggaccagatgaagctgcagatcaagctcggagtgcctaggtcgacgcagcacttgctggatgctgagagagtcaaggccgtcttcccctatggcaagataatcagctttgaggtcgttgacggtggcatgatctgttcaagcggcgtgtgcctggaagcaatgggggataagaacgatgactgctacatagtcaacgctgcagtgtatgtcggctactgatgtactgtagtacctggaatggaacagtagagattggttatggttcctccgttatagaaaaaaaaaactgctacctccgtcctaaaataaaacagttgatattttttcttcatagaagccaaatattgtaaactttgactaaatattactccctccattttcttt

SEQ ID NO: 6676 - protein, 188 aa, Zea mays subsp. mays
  peptide (1)..(188): Ceres Seq. ID no. 12414010
FPSSLFPFPTRASTPPLPSSSSRPSHSRPHLRIRSPKPNNPTVAPASSRMEVAQPQASNAQGGAEPAMKLLFVEMGVGYDQHGQDITAAAVRACKDAITSNSIPAFRGGSIPGVNTDQMKLQIKLGVPRSTQHLLDAERVKAVFPYGKIISFEVVDGGMICSSGVCLEAMGDKNDDCYIVNAAVYVGY

SEQ ID NO: 6677 - protein, 139 aa, Zea mays subsp. mays
  peptide (1)..(139): Ceres Seq. ID no. 12414011
MEVAQPQASNAQGGAEPAMKLLFVEMGVGYDQHGQDITAAAVRACKDAITSNSIPAFRGGSIPGVNTDQMKLQIKLGVPRSTQHLLDAERVKAVFPYGKIISFEVVDGGMICSSGVCLEAMGDKNDDCYIVNAAVYVGY

SEQ ID NO: 6678 - protein, 121 aa, Zea mays subsp. mays
  peptide (1)..(121): Ceres Seq. ID no. 12414012
MKLLFVEMGVGYDQHGQDITAAAVRACKDAITSNSIPAFRGGSIPGVNTDQMKLQIKLGVPRSTQHLLDAERVKAVFPYGKIISFEVVDGGMICSSGVCLEAMGDKNDDCYIVNAAVYVGY

SEQ ID NO: 6679 - DNA, 1220 bp, Zea mays subsp. mays
  misc_feature (1)..(1220): Ceres Seq. ID no. 12366799
  misc_feature (1)..(1220): Ortholog of  Ceres SEQ ID NO 13583408 as cited in SEQ ID NO 62616
  misc_feature (1)..(1220): Ortholog of  Ceres SEQ ID NO 15179752 as cited in SEQ ID NO 63074
aattcacgattgagaaaccctcacctcttcccttccttggttcctccccaccgccgccaccgccggaaaaaaaaaaaatgggtgccgatggggaagaagcgtcgcggatagtcgtgccaatggcggtggaggggacctcggagcagctggcgttcgtggaggagtcgaagctgcagaagcgcaaggagaacgcggactgggccgtcaggaaccgggagcgcagggcggtaaagcgccagcgcatccgcgacgagcacaaggtcaccgtaaggcggcctgaggacttcgttgccgcgttccggaacaaggaacgcgacttcctgcggatgaggacccgcctcaaggtccgcaagcagccgcccgccgaggcgctcggctccaagctcgtcttcgcaattcgcatccctggctgcgtggacttgcatccgaacatcaggaaggtcttgaggaagctacggctgacgacggtcctcaccggcgtattcctcagggccaccgagctgacgctgaagaggcttcttgtggtcgaaccctttgtcacctacgggtttccaaacttgaagaacgtgaaagagcttatttacaagaagggccgtgggtttttcgacaaggagcctttccctcttaccagtaacgatctaattgagaaggctcttggagatcacggcatcatatgcttggaagacgttgtgcacgagatcgccacggttggccgcacttccgagaagcatcgaggttcctcatgcccttcaggctcaagtgtccggagaggaggctgcagatgaagaggaaaccctacaaggatggcggcgactcgggcgaccgtggcgacaagatcaacgaactaatcgagaagctgaactagaagcgcagaccttgcctcctccggccgtcgttttgcgttggagctatggatctgttattaccttgtcggttttgtaatagcattagctgagtgtgccttcggctttgaaaccttacctgcacttgtgcgatcaggtcatgaaatagcaggcgcttctttggttatccacatgcctcttcggttggtgcgacaatatatcagctgtgttatgaatgatgtagtgtgctagtgtagtgcagacgcttataatgtatgcacacttacaaccgtgaacggacatatatgcaaacacttctatgatcttcgaaggagattgatgaaagtcactttgcttgatttagggcctgtttaattc

SEQ ID NO: 6680 - protein, 260 aa, Zea mays subsp. mays
  peptide (1)..(260): Ceres Seq. ID no. 12366800
FTIEKPSPLPFLGSSPPPPPPEKKKMGADGEEASRIVVPMAVEGTSEQLAFVEESKLQKRKENADWAVRNRERRAVKRQRIRDEHKVTVRRPEDFVAAFRNKERDFLRMRTRLKVRKQPPAEALGSKLVFAIRIPGCVDLHPNIRKVLRKLRLTTVLTGVFLRATELTLKRLLVVEPFVTYGFPNLKNVKELIYKKGRGFFDKEPFPLTSNDLIEKALGDHGIICLEDVVHEIATVGRTSEKHRGSSCPSGSSVRRGGCR

SEQ ID NO: 6681 - protein, 235 aa, Zea mays subsp. mays
  peptide (1)..(235): Ceres Seq. ID no. 12366801
MGADGEEASRIVVPMAVEGTSEQLAFVEESKLQKRKENADWAVRNRERRAVKRQRIRDEHKVTVRRPEDFVAAFRNKERDFLRMRTRLKVRKQPPAEALGSKLVFAIRIPGCVDLHPNIRKVLRKLRLTTVLTGVFLRATELTLKRLLVVEPFVTYGFPNLKNVKELIYKKGRGFFDKEPFPLTSNDLIEKALGDHGIICLEDVVHEIATVGRTSEKHRGSSCPSGSSVRRGGCR

SEQ ID NO: 6682 - protein, 221 aa, Zea mays subsp. mays
  peptide (1)..(221): Ceres Seq. ID no. 12366802
MAVEGTSEQLAFVEESKLQKRKENADWAVRNRERRAVKRQRIRDEHKVTVRRPEDFVAAFRNKERDFLRMRTRLKVRKQPPAEALGSKLVFAIRIPGCVDLHPNIRKVLRKLRLTTVLTGVFLRATELTLKRLLVVEPFVTYGFPNLKNVKELIYKKGRGFFDKEPFPLTSNDLIEKALGDHGIICLEDVVHEIATVGRTSEKHRGSSCPSGSSVRRGGCR

SEQ ID NO: 6683 - DNA, 1285 bp, Zea mays subsp. mays
  misc_feature (1)..(1285): Ceres Seq. ID no. 12353872
  misc_feature (1)..(1285): Ortholog of  Ceres SEQ ID NO 14302757 as cited in SEQ ID NO 56631
tcctccccgctccagcgcccctgcagttctcgctccactgacagctcgccgaggggccgcgccgcgctcgagacccgtcgatggcgaggcggagcctggcggtcgacgcaaccgcaggcgccgcatcccgggttcggttcgcgcccacctccaataacctgctcgtctcctcatgggattcggggctgcggttgtacgatgccgacgagggcacgctcagggtcaacgtggagtcagaggcggcattcctcgactgctgcttcgaggatgagtctgcagcgtttgcctgcggctctgatggatctgtgagaaggtacgacttccactcaggttcgcaggatacggtggggctccatgaagatgcactagcctgcattgagttctcttcactgaccggtcagattatgacaggcagccttgacaagaagctaaagctttgggattcaaaaacaagaaatgtaagcccgagcggcaccataaccttaaattcagatgtggcctcaatttctatatgcggcatttacatattagctgcagttgagagaaatgtttatctttatgacatgaggaatctaacaagaccagttgatgaaaaagactgtcctctggattatcaaattcgatgccttcatacttctctagagtggaatgcttatgttgctggctctgtggatggagttgttgcattgaagtatcttgatcgtggaacagatagagatttgggatatgcatttcgttgtcatccaaattccagaaacggaaaatggaatctggtccctgtaaattgcatctcagttcatccctgcaacagaactttcgttacgggagatgataaaggatgcactattgtttgggatgctcaattgaaaaagaagctgattgagcttccaatgtatttgggcagtgtggcgtcagtggcatacaaccataatggccaacttctggcggttgcctcaaactattttttagaagtataaagaggagcaacaccaccaggtattcattgaaactgtggagaacttcaaaggcaagtcccgtgtgggatagagccttctaacaaaacatgttctgttcatctgttgtattgtattttgtctaccatacatgttaaaggtcaccaagatgtgacagcatgttgtattatgttgtatgactaagcattttttttaggaaacgacataatatggctaagcaatacttgtatatattggttacatctagtctgagacagctgtggtgtgttgtaactcttttgagcttttgcaaccagtattgctgttctggt

SEQ ID NO: 6684 - protein, 298 aa, Zea mays subsp. mays
  peptide (1)..(298): Ceres Seq. ID no. 12353873
MARRSLAVDATAGAASRVRFAPTSNNLLVSSWDSGLRLYDADEGTLRVNVESEAAFLDCCFEDESAAFACGSDGSVRRYDFHSGSQDTVGLHEDALACIEFSSLTGQIMTGSLDKKLKLWDSKTRNVSPSGTITLNSDVASISICGIYILAAVERNVYLYDMRNLTRPVDEKDCPLDYQIRCLHTSLEWNAYVAGSVDGVVALKYLDRGTDRDLGYAFRCHPNSRNGKWNLVPVNCISVHPCNRTFVTGDDKGCTIVWDAQLKKKLIELPMYLGSVASVAYNHNGQLLAVASNYFLEV

SEQ ID NO: 6685 - protein, 190 aa, Zea mays subsp. mays
  peptide (1)..(190): Ceres Seq. ID no. 12353874
MTGSLDKKLKLWDSKTRNVSPSGTITLNSDVASISICGIYILAAVERNVYLYDMRNLTRPVDEKDCPLDYQIRCLHTSLEWNAYVAGSVDGVVALKYLDRGTDRDLGYAFRCHPNSRNGKWNLVPVNCISVHPCNRTFVTGDDKGCTIVWDAQLKKKLIELPMYLGSVASVAYNHNGQLLAVASNYFLEV

SEQ ID NO: 6686 - DNA, 1274 bp, Zea mays subsp. mays
  misc_feature (1)..(1274): Ceres Seq. ID no. 12405506
  misc_feature (1)..(1274): Ortholog of  Ceres SEQ ID NO 14314252 as cited in SEQ ID NO 57492
  misc_feature (1)..(1274): Ortholog of  Ceres SEQ ID NO 12608276 as cited in SEQ ID NO 57871
  misc_feature (1)..(1274): Ortholog of  Ceres SEQ ID NO 13598492 as cited in SEQ ID NO 63882
  misc_feature (1)..(1274): Ortholog of  Ceres SEQ ID NO 13657914 as cited in SEQ ID NO 66230
  misc_feature (1)..(1274): Ortholog of  Ceres SEQ ID NO 13595877 as cited in SEQ ID NO 67702
gtccgcctcgctgtgcctgtgttgtacttgtactactgctactgctaggtagccaactcatttcctcccccaacccaaatgggcgactccaccgccaccaacccctcctcggcgaccgcagccatggatcccgactccgaggtcgtcttcgacttccagccctacctctgccagtacaagagcggccgcatccaccggcccggcggcgcccccaccgtccccgccggcacggacccggccaccggcgtcgtctccaaggacatccgctccggccccgcctccgcgcgcgtctacctccctcccggcgccaccggcaagatcccggtgatcgtctacttccacggcggcggcttcgtggtcggctcgccggcgcggccgggcacgcacagctacctgaacgacctcgtcgcccggtcgggcgccatcggcgtgtccgtctactaccgcctcgcgccggagcacaagctgcccgccgcgtacgacgacgcgtgggcggcgctgcggtgggcggtgacgctcggcggcgaggacccgtggctgctggagcacgccgacctgtcccgcgtgttcctggcgggctgcagcgccggcgccaacatcgcgcacgacacggccgtgcgagcctccgcggccggcgcgctccccgacggcgtggccatccgcgggctcgccctggtgcacccgtacttcactggcagggaggccgtgggcggcgagacggcggcgttcggccccgagatccggccgtccatggaccggacttggcggttcgtggtgtcggacacggtggggctggacgacccgcgcgtgaacccgttcgtggacgacgcggcgcgcaaggcctccgccgggatcccgtgccagcgcgtgctggtgtgtgtggccgagaacgacttcctgctcaaggagcgcgcgctgtggtaccaccgggagatcaaggccagtggctacgccggcgaggtcgagctgttcgagtctaagggcgtcggccacgcgttccacttcgacatgctggactcggagcagggcgtcgcactccaggagcggatcgtggctttcataaataaatgaaaaccgagacgataaataagagttttcttttttttgtccactatcgattcacggagtaaatcgattgtttggtttggtccattttatccgctgtcggtccacggagtaattcgttgtctcgttttttgttagaacaatttgtatcgattcacagagctatcagtgcggtgattgatcaccagcggtatgtaactccattcctg

SEQ ID NO: 6687 - protein, 330 aa, Zea mays subsp. mays
  peptide (1)..(330): Ceres Seq. ID no. 12405507
MGDSTATNPSSATAAMDPDSEVVFDFQPYLCQYKSGRIHRPGGAPTVPAGTDPATGVVSKDIRSGPASARVYLPPGATGKIPVIVYFHGGGFVVGSPARPGTHSYLNDLVARSGAIGVSVYYRLAPEHKLPAAYDDAWAALRWAVTLGGEDPWLLEHADLSRVFLAGCSAGANIAHDTAVRASAAGALPDGVAIRGLALVHPYFTGREAVGGETAAFGPEIRPSMDRTWRFVVSDTVGLDDPRVNPFVDDAARKASAGIPCQRVLVCVAENDFLLKERALWYHREIKASGYAGEVELFESKGVGHAFHFDMLDSEQGVALQERIVAFINK

SEQ ID NO: 6688 - protein, 325 aa, Zea mays subsp. mays
  peptide (1)..(325): Ceres Seq. ID no. 12405508
PPRCACVVLVLLLLLGSQLISSPNPNGRLHRHQPLLGDRSHGSRLRGRLRLPALPLPVQERPHPPARRRPHRPRRHGPGHRRRLQGHPLRPRLRARLPPSRRHRQDPGDRLLPRRRLRGRLAGAAGHAQLPERPRRPVGRHRRVRLLPPRAGAQAARRVRRRVGGAAVGGDARRRGPVAAGARRPVPRVPGGLQRRRQHRARHGRASLRGRRAPRRRGHPRARPGAPVLHWQGGRGRRDGGVRPRDPAVHGPDLAVRGVGHGGAGRPAREPVRGRRGAQGLRRDPVPARAGVCGRERLPAQGARAVVPPGDQGQWLRRRGRAVRV

SEQ ID NO: 6689 - protein, 315 aa, Zea mays subsp. mays
  peptide (1)..(315): Ceres Seq. ID no. 12405509
MDPDSEVVFDFQPYLCQYKSGRIHRPGGAPTVPAGTDPATGVVSKDIRSGPASARVYLPPGATGKIPVIVYFHGGGFVVGSPARPGTHSYLNDLVARSGAIGVSVYYRLAPEHKLPAAYDDAWAALRWAVTLGGEDPWLLEHADLSRVFLAGCSAGANIAHDTAVRASAAGALPDGVAIRGLALVHPYFTGREAVGGETAAFGPEIRPSMDRTWRFVVSDTVGLDDPRVNPFVDDAARKASAGIPCQRVLVCVAENDFLLKERALWYHREIKASGYAGEVELFESKGVGHAFHFDMLDSEQGVALQERIVAFINK

SEQ ID NO: 6690 - DNA, 1280 bp, Zea mays subsp. mays
  misc_feature (1)..(1280): Ceres Seq. ID no. 12405502
  misc_feature (1)..(1280): Ortholog of  Ceres SEQ ID NO 15175496 as cited in SEQ ID NO 56127
  misc_feature (1)..(1280): Ortholog of  Ceres SEQ ID NO 15175700 as cited in SEQ ID NO 58584
  misc_feature (1)..(1280): Ortholog of  Ceres SEQ ID NO 13596474 as cited in SEQ ID NO 62169
  misc_feature (1)..(1280): Ortholog of  Ceres SEQ ID NO 13596969 as cited in SEQ ID NO 63375
  misc_feature (1)..(1280): Ortholog of  Ceres SEQ ID NO 13597519 as cited in SEQ ID NO 64759
  misc_feature (1)..(1280): Ortholog of  Ceres SEQ ID NO 13597870 as cited in SEQ ID NO 64982
cattccatccgagattacttaacaagaacattcttgctctacccacatcacataattgacgctctgagccctgcttttgtttaacaccgatagatccatccatcagcagcatggcattcaggtcttgtctagtacggctgctgctccctatggcagcactgcttctgctcgctgcaagctcgcccgccgcggctcagctggtggccggctactacagcaagacatgcccggacgccgaggccatcgtccgcaacgagacggagaagatcatcgccgccgcgcccagcctcgccggcccacttctcaggctccatttccacgactgcttcgtcaggggttgtgatgcctcggtcctgctcgacgaccccaacgggggtaacaaggccgagaaggacgccaagccgaacaggagcctgcggggcttcggctccgtggagagagtgaaggccaagctggaagccgcatgccccagcacggtttcctgcgccgacgtcctggccctgatggcccgcgacgccgtggtgctcgccaagggcccatcctggccagtggccctggggaggcgagacggcagggtgtcgagcgccacggaagcggccgacagcctgcctcccgccttcggcgacgtcccgctgctcgccgagatcttcgccgccaacggcctcgacctcaaggacctggcccgtgctctctggcgcgcacaccctcggcacggcgcactgcccgtcgtacgccgggcggctctacaacttcagcaccgcctacggcggcgcggacccgtccctcgacagcgagtacgccgaccggctgaggacgcgctgccggagcgccgacgacacggccacgctctccgagatggaccccggcagctacaagaccttcgacacgagctactaccgccacgtcgccaagcggaggggcctcttccagtccgacgccgcgctgctcgccgacgccaccaccagggagtacgtcctgcgcatggccaccggcaggttcgacggcgtgttcttccaggacttcggcgagtccatgatcaagatgggcaacgctggcgtgctcatcggtgctgctcagggggagatcaggaagaaatgctacatcgtcaactaactagctagttattatatatacaagctagctatactacgaaagcttttaatttgtttgtttgccgcaacggaattgtagcttgctgtattaattaatcaatcagttctctacatatgttatttgcatgcttatgtatagcctattattaatggacgatagactataat

SEQ ID NO: 6691 - protein, 336 aa, Zea mays subsp. mays
  peptide (1)..(336): Ceres Seq. ID no. 12405503
MAFRSCLVRLLLPMAALLLLAASSPAAAQLVAGYYSKTCPDAEAIVRNETEKIIAAAPSLAGPLLRLHFHDCFVRGCDASVLLDDPNGGNKAEKDAKPNRSLRGFGSVERVKAKLEAACPSTVSCADVLALMARDAVVLAKGPSWPVALGRRDGRVSSATEAADSLPPAFGDVPLLAEIFAANGLDLKDLARALWRAHPRHGALPVVRRAALQLQHRLRRRGPVPRQRVRRPAEDALPERRRHGHALRDGPRQLQDLRHELLPPRRQAEGPLPVRRRAARRRHHQGVRPAHGHRQVRRRVLPGLRRVHDQDGQRWRAHRCCSGGDQEEMLHRQLTS

SEQ ID NO: 6692 - protein, 323 aa, Zea mays subsp. mays
  peptide (1)..(323): Ceres Seq. ID no. 12405504
MAALLLLAASSPAAAQLVAGYYSKTCPDAEAIVRNETEKIIAAAPSLAGPLLRLHFHDCFVRGCDASVLLDDPNGGNKAEKDAKPNRSLRGFGSVERVKAKLEAACPSTVSCADVLALMARDAVVLAKGPSWPVALGRRDGRVSSATEAADSLPPAFGDVPLLAEIFAANGLDLKDLARALWRAHPRHGALPVVRRAALQLQHRLRRRGPVPRQRVRRPAEDALPERRRHGHALRDGPRQLQDLRHELLPPRRQAEGPLPVRRRAARRRHHQGVRPAHGHRQVRRRVLPGLRRVHDQDGQRWRAHRCCSGGDQEEMLHRQLTS

SEQ ID NO: 6693 - protein, 205 aa, Zea mays subsp. mays
  peptide (1)..(205): Ceres Seq. ID no. 12405505
MARDAVVLAKGPSWPVALGRRDGRVSSATEAADSLPPAFGDVPLLAEIFAANGLDLKDLARALWRAHPRHGALPVVRRAALQLQHRLRRRGPVPRQRVRRPAEDALPERRRHGHALRDGPRQLQDLRHELLPPRRQAEGPLPVRRRAARRRHHQGVRPAHGHRQVRRRVLPGLRRVHDQDGQRWRAHRCCSGGDQEEMLHRQLTS

SEQ ID NO: 6694 - DNA, 1472 bp, Zea mays subsp. mays
  misc_feature (1)..(1472): Ceres Seq. ID no. 12409035
  misc_feature (1)..(1472): Ortholog of  Ceres SEQ ID NO 14311938 as cited in SEQ ID NO 51615
  misc_feature (1)..(1472): Ortholog of  Ceres SEQ ID NO 14302059 as cited in SEQ ID NO 68322
actctcctctcctctccgcctcaccttgccctgcccgcacacaccacctgtccccgcacggccgcaccgctccgctcccgaggcttagggctccggccgcgctcccttcccttcccggcattcccgatctctcgccgccgcccgcctggccttgatctcgatcgccctcccctctccgctctcgctccggcaggccggcccgggtttgtctcgccgctattgggcctcggcacgctgcgatggtgtcgggcgtgtgcgtggggacggaggggcaggtggaccctgaggcggtggcgccggctgtcgcggaggaggcggtggtgccggcgcccgcgagggaggtcgtggtggggtacgcgctcacgagtaagaaggccaagagcttcctccaacccaagctccggggggctcgccaggaaaaagggaatcttgtttgtcgctattgatcagaaacgcccattgtctgatcaaggtccatttgacattgttcttcataagttgactggaagggggtggcagcaattgctggaggaatatagggaggcacacccagaagttactgttcttgatccacctggcgcaatagcaaacttgcttgatcgccagtctatgcttcaagaagtatctgaattggacctcacagattgtcatggtaaagtacgtgtgcctaagcagctattcgttaatactgatccctcatcaataccagctgcagttaggagggcaggtctctctctcccattggtggcaaaacccttggtggcgaagtcccatgagctatcccttgcttatgatccaacttcactgaccaaacttgagccccccttggttcttcaggaatttgttaaccatggtggcgtcatgtttaaggtgtacattgttggggatgcaataagggttgtacgtcgattttcactcccaaatgttgatgaaggcgatctatcgaacaatgctggggtatttcggtttccaagggtctcttgtgctgcagccagtgcagatgatgcagatcttgaccctcgtgttgctgaacttcctccgagaccattgcttgagatcttggcacgagagctgcgccgacgactgggtcttagactattcaacatcgatatgattagggagcatgggacgcgagatcggttttatgtcatagacatgaactactttcctgggtacggcaaaatgcctggatacgagcacgtgttcaccgacttcctgctgagccttgccaagaaagagtacaagagacgacaaagctatagctcgctaagctcaggcgaatggtgataagcgaggagactactcggcggggcatgtatatgtctatcatccacgatgcgtgcgtacagatgtacttgtgcatgacgagagataatgggtcgtagaagcggagggctgttgtcaggctataactaactgttgctttacatgtgctaactgttgatgcttcagaataaattttgtttgggtgg

SEQ ID NO: 6695 - protein, 428 aa, Zea mays subsp. mays
  peptide (1)..(428): Ceres Seq. ID no. 12409036
TLLSSPPHLALPAHTTCPRTAAPLRSRGLGLRPRSLPFPAFPISRRRPPGLDLDRPPLSALAPAGRPGFVSPLLGLGTLRWCRACAWGRRGRWTLRRWRRLSRRRRWCRRPRGRSWWGTRSRVRRPRASSNPSSGGLARKKGILFVAIDQKRPLSDQGPFDIVLHKLTGRGWQQLLEEYREAHPEVTVLDPPGAIANLLDRQSMLQEVSELDLTDCHGKVRVPKQLFVNTDPSSIPAAVRRAGLSLPLVAKPLVAKSHELSLAYDPTSLTKLEPPLVLQEFVNHGGVMFKVYIVGDAIRVVRRFSLPNVDEGDLSNNAGVFRFPRVSCAAASADDADLDPRVAELPPRPLLEILARELRRRLGLRLFNIDMIREHGTRDRFYVIDMNYFPGYGKMPGYEHVFTDFLLSLAKKEYKRRQSYSSLSSGEW

SEQ ID NO: 6696 - protein, 225 aa, Zea mays subsp. mays
  peptide (1)..(225): Ceres Seq. ID no. 12409037
MLQEVSELDLTDCHGKVRVPKQLFVNTDPSSIPAAVRRAGLSLPLVAKPLVAKSHELSLAYDPTSLTKLEPPLVLQEFVNHGGVMFKVYIVGDAIRVVRRFSLPNVDEGDLSNNAGVFRFPRVSCAAASADDADLDPRVAELPPRPLLEILARELRRRLGLRLFNIDMIREHGTRDRFYVIDMNYFPGYGKMPGYEHVFTDFLLSLAKKEYKRRQSYSSLSSGEW

SEQ ID NO: 6697 - DNA, 1041 bp, Zea mays subsp. mays
  misc_feature (1)..(1041): Ceres Seq. ID no. 12412692
  misc_feature (1)..(1041): Ortholog of  Ceres SEQ ID NO 13598455 as cited in SEQ ID NO 62908
gaaaatacatcgccatttccccaatttaccgctgacaccctccacaaaccgcgaatttcctccccggctcctctccctcctccccagtcaatccccacacagtctcggccgggccctcgcgaggccgccgtggaaggacccccagcgatgggctccggcgaggaggacacaggaggcggaggaggggcggtgcggggcgcggtgctgaaggcgctcgtggttgtcggcggcgtcctgctgctccgccgcctgcgccgctccactacccgatgggaccacgcgcgagccgtcgccgacgcgctctccggagaaaagttctcgagggagcaggcgaggaaggatcctgacaacttcttcaatttgagaatgctcacatgtcctgcaaccgagatggtggatggttcaagggtgctttactttgagcaggcattttggagatctccagaaaagccttttagacaaagattctacatggtaaagccctgtccgaaggagatgaaatgcgatgttgagttgagttcatatgcaattagggatgctgaagagtacaagaatttctgtgaccgtcaaaaggatcagaggccacaggcagaagaagtaattgcagatatcgcagagcatctgaccaccatacacttgtcacgatgcggacgaggaaagcgttgcttatacgaaggatctaccccacctgaaggttttcccaacaactggagcggcgcgtcgtactgtacgtcggatctgtccatccacaaaaacggcgaagtacatatctgggacaaaggttttgacgacgaagggaaccaggtttgggggaccaaggctggcccctacgagttcaagcctgctcccaaatccaaatatgacgacatgttctcgccgttaaatttctcggctcctttgtcgctagagaagaagctggataaagcatatgtaattgatgaccagtagggcctgccctaaatttttgttcataggaatggaataagtgaatagaatgtatatgtatatactgtactgagttataatgcattctttgttttg

SEQ ID NO: 6698 - protein, 315 aa, Zea mays subsp. mays
  peptide (1)..(315): Ceres Seq. ID no. 12412693
ENTSPFPQFTADTLHKPRISSPAPLPPPQSIPTQSRPGPREAAVEGPPAMGSGEEDTGGGGGAVRGAVLKALVVVGGVLLLRRLRRSTTRWDHARAVADALSGEKFSREQARKDPDNFFNLRMLTCPATEMVDGSRVLYFEQAFWRSPEKPFRQRFYMVKPCPKEMKCDVELSSYAIRDAEEYKNFCDRQKDQRPQAEEVIADIAEHLTTIHLSRCGRGKRCLYEGSTPPEGFPNNWSGASYCTSDLSIHKNGEVHIWDKGFDDEGNQVWGTKAGPYEFKPAPKSKYDDMFSPLNFSAPLSLEKKLDKAYVIDDQ

SEQ ID NO: 6699 - protein, 266 aa, Zea mays subsp. mays
  peptide (1)..(266): Ceres Seq. ID no. 12412694
MGSGEEDTGGGGGAVRGAVLKALVVVGGVLLLRRLRRSTTRWDHARAVADALSGEKFSREQARKDPDNFFNLRMLTCPATEMVDGSRVLYFEQAFWRSPEKPFRQRFYMVKPCPKEMKCDVELSSYAIRDAEEYKNFCDRQKDQRPQAEEVIADIAEHLTTIHLSRCGRGKRCLYEGSTPPEGFPNNWSGASYCTSDLSIHKNGEVHIWDKGFDDEGNQVWGTKAGPYEFKPAPKSKYDDMFSPLNFSAPLSLEKKLDKAYVIDDQ

SEQ ID NO: 6700 - protein, 193 aa, Zea mays subsp. mays
  peptide (1)..(193): Ceres Seq. ID no. 12412695
MLTCPATEMVDGSRVLYFEQAFWRSPEKPFRQRFYMVKPCPKEMKCDVELSSYAIRDAEEYKNFCDRQKDQRPQAEEVIADIAEHLTTIHLSRCGRGKRCLYEGSTPPEGFPNNWSGASYCTSDLSIHKNGEVHIWDKGFDDEGNQVWGTKAGPYEFKPAPKSKYDDMFSPLNFSAPLSLEKKLDKAYVIDDQ

SEQ ID NO: 6701 - DNA, 1439 bp, Zea mays subsp. mays
  misc_feature (1)..(1439): Ceres Seq. ID no. 12377701
  misc_feature (1)..(1439): Ortholog of  Ceres SEQ ID NO 13597697 as cited in SEQ ID NO 69098
gcacgagaccattacctagaacatcctaatcgaaaacgggtcgtcggcgtcctggtggtggtcgtatcttatctctctcactgccatagtgccatcgtgcgagcggcgagaaagtagaaggaagtgtgtcgtactcgtactcataccgggttggttggtttttgagacgtgtgcggtcgggagaggggatggagagaaagggagggtgctgcctcgcgccgaggtacgccgccaccgcggccgcgcagcaggcaggcgcggcctggcagatggggaggatcatgctcaagttccgcccgattgcncctaagccggcggccatggcgcccgcgccggcaccggcatcggcaccggtgaccggatcagccgccggtgccgggagagggaagcgaaaggccgcgtgcggaggcggcgggaggaggggccggaagcccaagaaggcggccaaagttgcgatggtgactgcagcgcctgcggcgacggcggcggcgcaagatgtgggcgactgccgggagcactgcgacaaggagaagtcgtcttcgtcgccgtcctcgtcctcgtcggggacgtcatccgtggactcgtcgccgccaccccggccgcagcagcgccagctcgcaacgctgccgctcatgcccgtgacggcggcggaggataaggccgctgcttgtcctgcgacagtggggccggatcagctcgtgccgtctcaggtggctacggcggcacggccgttggctccgcgcgcgatgcgccccgctgctgctgcagcttacttggtgacggtggaagaggtgaccgcgacgtggcgcgacggcgaggcgccggcctccgcgacgggcgcagacgaggccccggcgttcgtgtcggaccagtgggggcgcgtcacgtggtggaacgccgcgtttgtccgcgctgcatccgcggacgacggcgacgaggcggcggcgcccgtcgtgctcggcggagccctcccggcgtggggcacctgcgcgggattcacgtgccgcgtccgcgcccggcactggagcgcccggcgcntcggttcccccgtggtggcgccctgcgatgtttggcgtctggacgccgccggcagctacctttggcggctggacctgcaggccgcgctcactctcggcggctgcctgtgaaccgtacaccactgtcaagagcaagcaacgaatatgctgtgctactcctctacgtgcggagacgtgttgtattttattctatgagcgttatttactgacgtaaggcatggtttaatcgacggattgctatcctggtcgggcttaattaaggacgttgaagcctggtaaggtatactaagttagcgtccctcggaatgggagtgagtgagttgggaggacttgaaaatgtaagaagaaaaaaaacaaagcatgtgatggatgcttctagatgtgcaagatcagtcttcatcc

SEQ ID NO: 6702 - protein, 319 aa, Zea mays subsp. mays
  peptide (1)..(319): Ceres Seq. ID no. 12377702
  misc_feature (39)..(39): Xaa is any aa, unknown or other
  misc_feature (284)..(284): Xaa is any aa, unknown or other
MERKGGCCLAPRYAATAAAQQAGAAWQMGRIMLKFRPIXPKPAAMAPAPAPASAPVTGSAAGAGRGKRKAACGGGGRRGRKPKKAAKVAMVTAAPAATAAAQDVGDCREHCDKEKSSSSPSSSSSGTSSVDSSPPPRPQQRQLATLPLMPVTAAEDKAAACPATVGPDQLVPSQVATAARPLAPRAMRPAAAAAYLVTVEEVTATWRDGEAPASATGADEAPAFVSDQWGRVTWWNAAFVRAASADDGDEAAAPVVLGGALPAWGTCAGFTCRVRARHWSARRXGSPVVAPCDVWRLDAAGSYLWRLDLQAALTLGGCL

SEQ ID NO: 6703 - protein, 292 aa, Zea mays subsp. mays
  peptide (1)..(292): Ceres Seq. ID no. 12377703
  misc_feature (12)..(12): Xaa is any aa, unknown or other
  misc_feature (257)..(257): Xaa is any aa, unknown or other
MGRIMLKFRPIXPKPAAMAPAPAPASAPVTGSAAGAGRGKRKAACGGGGRRGRKPKKAAKVAMVTAAPAATAAAQDVGDCREHCDKEKSSSSPSSSSSGTSSVDSSPPPRPQQRQLATLPLMPVTAAEDKAAACPATVGPDQLVPSQVATAARPLAPRAMRPAAAAAYLVTVEEVTATWRDGEAPASATGADEAPAFVSDQWGRVTWWNAAFVRAASADDGDEAAAPVVLGGALPAWGTCAGFTCRVRARHWSARRXGSPVVAPCDVWRLDAAGSYLWRLDLQAALTLGGCL

SEQ ID NO: 6704 - protein, 288 aa, Zea mays subsp. mays
  peptide (1)..(288): Ceres Seq. ID no. 12377704
  misc_feature (8)..(8): Xaa is any aa, unknown or other
  misc_feature (253)..(253): Xaa is any aa, unknown or other
MLKFRPIXPKPAAMAPAPAPASAPVTGSAAGAGRGKRKAACGGGGRRGRKPKKAAKVAMVTAAPAATAAAQDVGDCREHCDKEKSSSSPSSSSSGTSSVDSSPPPRPQQRQLATLPLMPVTAAEDKAAACPATVGPDQLVPSQVATAARPLAPRAMRPAAAAAYLVTVEEVTATWRDGEAPASATGADEAPAFVSDQWGRVTWWNAAFVRAASADDGDEAAAPVVLGGALPAWGTCAGFTCRVRARHWSARRXGSPVVAPCDVWRLDAAGSYLWRLDLQAALTLGGCL

SEQ ID NO: 6705 - DNA, 1746 bp, Zea mays subsp. mays
  misc_feature (1)..(1746): Ceres Seq. ID no. 13498516
  misc_feature (1)..(1746): Ortholog of  Ceres SEQ ID NO 15179015 as cited in SEQ ID NO 0
  misc_feature (1)..(1746): Ortholog of  Ceres SEQ ID NO 15179613 as cited in SEQ ID NO 0
cttcaatttttactatttaattatacagatacatatccagccggcgcagccaggaggcgactgaccgaattgtattgtttgttcgatcgaagcaggcagatggcaggcggcggattcgtggaggacatgaacatgatgagggagcagagcctcctcgaggcgacgtgcggcgacctcttcgaccacatcgacgacctcctcgacttccccaacgaggactccgccgccgccgtgctcctcctggacgcgccggcgccggggagcccgctgtcggcgcgcatcatcgacgtcggccgcgccggcaatgcgctcgccccgcctgctgcccccgcgcagcacgacgcttccgctagcgccttcttcgccgccgcggggaacgatgtgttcgacaccaaggacgtcgtcggcgcacacatcggctcgtgcgacgacattgacatggacatggcgcagctggagtggctatcggggctcttcgacgacgcctccatcccgcacgagccggtgttccctggcgcgacggcgggcggcgcggcgcccatcatgaagagctccgcgctggcggccggcagcgctgctgccgccggacaaaatggaggacgcgctgctgttccgcagctccagccccatctcggtgctggagcacggcagcggtggcagcggcagcgccagcgccaccggctccgcgtcctcgtcctcctcctcggcgtcctcctcctcggagtccttctccgggagtgggagtggaggagggcatgtttggtcggcgccagtgtcgccgcgcccggcgccgccgccggtgctcgtcataccggcgcgcgcgcggagcaagcgctcccgttcgtccgcgttcaccggcgccgccgcgcgcgccggggcggagacgccaaccatcctcgtgccgacgcccatgtactcgtccgggtctgcccactcggaccccgagagcatcgccgagtccagcccgcacccggcgccgcccatgaagaagaagaagaaggccaagaagcctgcgccccccgcgccagctgcctcttctgacgacaacgatggcgacgccgactacgaggaaggcggcgagcaagcggagccgcagggcggcgccgtcaggaggtgcacgcattgccagatcgagaagacgccgcagtggcgcgcggggccgctggggcccaagacgctctgcaacgcctgcggcgtgcgctacaagtccggtcgcctgttcccggagtaccgccccgcggcgagccccaccttcgtgccgtccatccactccaactcgcacaagagggtggtggagatgcgccagaaggctgtccggagcggcgaccccgtcgtgcgaccttctccatttcatccgccgccgggattgacgtcccggcatggcgtcgccggactgtcggtcggtctcgtcccccatatagctatatatgtatgcatgcatggttgcttcatcagtcgtcgtcgcccattatggtcatcatcaccgcttcaccggtcaccgccatggatcgtctcccgcccatcatcacatgcattggtttgtgtcagcatccatccaatcccaatccatcgccgggcgtcccggcgttgttagttcattaggtcttttttttcctcatcggggggctagtgttattttacctttgatccttttgtctattggttaattggtttcccctggatgttttttgtttgtatagagtgaaaaagagagaggagaaatagatgaatcagagtggttgctgc

SEQ ID NO: 6706 - protein, 346 aa, Zea mays subsp. mays
  peptide (1)..(346): Ceres Seq. ID no. 13498517
LQFLLFNYTDTYPAGAARRRLTELYCLFDRSRQMAGGGFVEDMNMMREQSLLEATCGDLFDHIDDLLDFPNEDSAAAVLLLDAPAPGSPLSARIIDVGRAGNALAPPAAPAQHDASASAFFAAAGNDVFDTKDVVGAHIGSCDDIDMDMAQLEWLSGLFDDASIPHEPVFPGATAGGAAPIMKSSALAAGSAAAAGQNGGRAAVPQLQPHLGAGARQRWQRQRQRHRLRVLVLLLGVLLLGVLLREWEWRRACLVGASVAAPGAAAGARHTGARAEQALPFVRVHRRRRARRGGDANHPRADAHVLVRVCPLGPREHRRVQPAPGAAHEEEEEGQEACAPRASCLF

SEQ ID NO: 6707 - protein, 333 aa, Zea mays subsp. mays
  peptide (1)..(333): Ceres Seq. ID no. 13498518
MEDALLFRSSSPISVLEHGSGGSGSASATGSASSSSSSASSSSESFSGSGSGGGHVWSAPVSPRPAPPPVLVIPARARSKRSRSSAFTGAAARAGAETPTILVPTPMYSSGSAHSDPESIAESSPHPAPPMKKKKKAKKPAPPAPAASSDDNDGDADYEEGGEQAEPQGGAVRRCTHCQIEKTPQWRAGPLGPKTLCNACGVRYKSGRLFPEYRPAASPTFVPSIHSNSHKRVVEMRQKAVRSGDPVVRPSPFHPPPGLTSRHGVAGLSVGLVPHIAIYVCMHGCFISRRRPLWSSSPLHRSPPWIVSRPSSHALVCVSIHPIPIHRRASRRC

SEQ ID NO: 6708 - protein, 313 aa, Zea mays subsp. mays
  peptide (1)..(313): Ceres Seq. ID no. 13498519
MAGGGFVEDMNMMREQSLLEATCGDLFDHIDDLLDFPNEDSAAAVLLLDAPAPGSPLSARIIDVGRAGNALAPPAAPAQHDASASAFFAAAGNDVFDTKDVVGAHIGSCDDIDMDMAQLEWLSGLFDDASIPHEPVFPGATAGGAAPIMKSSALAAGSAAAAGQNGGRAAVPQLQPHLGAGARQRWQRQRQRHRLRVLVLLLGVLLLGVLLREWEWRRACLVGASVAAPGAAAGARHTGARAEQALPFVRVHRRRRARRGGDANHPRADAHVLVRVCPLGPREHRRVQPAPGAAHEEEEEGQEACAPRASCLF

SEQ ID NO: 6709 - DNA, 1124 bp, Zea mays subsp. mays
  misc_feature (1)..(1124): Ceres Seq. ID no. 12409031
  misc_feature (1)..(1124): Ortholog of  Ceres SEQ ID NO 13503499 as cited in SEQ ID NO 68684
atgagactctgaggctctgagctgagcgcgctccgtttcagtttcagagagcggttgctgtgcatgtgctggtgctgcgacttgactgttcgagcacagctgcgtctgcgtccccatggtgtagataggaggggaggaagcaggaagagggggaggcagcctgtgtgtgtgagagagaggcagaagtagtgaggaaggaagcaggaagatggcttggaatgcccgcttcggcgatgacgaggaaggcagcggccttgagctcagcctgggccttccgggctacttctccgggtcgccagaccaagccgcaggtttcgaggagaaagcgagccggggttctgctgctgctcctcctcctcctcctcccgctgctgctcgagcgaaaggaagcgacggcttcaaggcgaggccggcggcagctgctccggtcgtgggatggccgccggtgcgcgcgttccggcggaacctcgccacgtcgtcctccaagccgtcgagccacggaggcaaggagcccgccgcgagcgccgacggcggcaacaagggcctgttcgtcaaggtcaacatggacggcgtccccatcggccgtaagctcgacctggcggcgcacgccggctacgacacgctctccgccgccgttgacagcctcttccgcggcctcttcgctgctcaagcggcggggccaggcggggagcagcaggctgtcgcgggtatcctgagcggcggcggcggcggcgagcacacgctggtgtacgaggacgacgagggcgaccagatgctggtcggggacgtgccgtggccgatgttcgtcgccaccgctaggcgtctgcgcgtgctcaagagctccgacctgagcccgtcgtcgctgagggcagcgagagccgcagctgagtgctgaacgcaccctggacctggagcctgaacgttttgcggcctctccggagggcccatccgtgtaaaatcgaagcagttttcgtcgattttgcttttagcaagggattatatgtcctagtgatcaagtagggaagcaagaatctatctagaggtgatgaggggtgtcgtagaaccatgcaatcctagtgctagattttttttctgaaagtttaacaaggtttcttggcgctggc

SEQ ID NO: 6710 - protein, 228 aa, Zea mays subsp. mays
  peptide (1)..(228): Ceres Seq. ID no. 12409032
MAWNARFGDDEEGSGLELSLGLPGYFSGSPDQAAGFEEKASRGSAAAPPPPPPAAARAKGSDGFKARPAAAAPVVGWPPVRAFRRNLATSSSKPSSHGGKEPAASADGGNKGLFVKVNMDGVPIGRKLDLAAHAGYDTLSAAVDSLFRGLFAAQAAGPGGEQQAVAGILSGGGGGEHTLVYEDDEGDQMLVGDVPWPMFVATARRLRVLKSSDLSPSSLRAARAAAEC

SEQ ID NO: 6711 - protein, 165 aa, Zea mays subsp. mays
  peptide (1)..(165): Ceres Seq. ID no. 12409033
MPASAMTRKAAALSSAWAFRATSPGRQTKPQVSRRKRAGVLLLLLLLLLPLLLERKEATASRRGRRQLLRSWDGRRCARSGGTSPRRPPSRRATEARSPPRAPTAATRACSSRSTWTASPSAVSSTWRRTPATTRSPPPLTASSAASSLLKRRGQAGSSRLSRVS

SEQ ID NO: 6712 - protein, 160 aa, Zea mays subsp. mays
  peptide (1)..(160): Ceres Seq. ID no. 12409034
MTRKAAALSSAWAFRATSPGRQTKPQVSRRKRAGVLLLLLLLLLPLLLERKEATASRRGRRQLLRSWDGRRCARSGGTSPRRPPSRRATEARSPPRAPTAATRACSSRSTWTASPSAVSSTWRRTPATTRSPPPLTASSAASSLLKRRGQAGSSRLSRVS

SEQ ID NO: 6713 - DNA, 1403 bp, Zea mays subsp. mays
  misc_feature (1)..(1403): Ceres Seq. ID no. 12387046
  misc_feature (1)..(1403): Ortholog of  Ceres SEQ ID NO 15180309 as cited in SEQ ID NO 1272
agctgcactgcagcacacgcgccaccgaagcgctctgcccacctcgctcccctccagtggccgccagcgcggctcagcggtccatcctcctgacgccacctgcaacggcgtcaggcggtgatccattccaactcgcgctccgtcctggcaatcactttgggaaggtggtcagtggaatagctttgcttaaaaagcttgaagcagttggtagtgaaactggaaatccttcttatcaagtgaaaattgtagactgtggtgaagtttccaacacaaattctcaggatccgctaaagggagataaagtaagctcaaagacagataacagcagttcagacagtgaaaagggtggccatcgtaccaagcgttccttaccgaaaggaatgatccaggtggaagctccaggaacaatcccattcagtttgatgtaaatttaatgaaaccagtaaatgtagatggcaacattggtggtgataatgcagaggctagcatgtctagaactggtgaaggaaggcatctgccaagcaatgaacctttgtccaccaatggtaaagatttaggtgtgggttctgcagacaatgggcaacctcaacaaatcaggaaaggacgtggttttactcagaagtatgggtatgcacgccgatataggacgccatctcccgagcgtccctctgtttgaccccgctacgatggagggagagatgatagatggaacaatttcaataggtatgaaagaaatggtccttacagtagacgctcgccagtaaggagataccatggctcgccaagagccaatagcccatccagtactacccaagcctcaaccgttcaaagtgttgctcgaagaggatatgtacaggtaatgcatccatcgtactgttgatttagccatcccaacctgcaaataacctttgcatattctgtttgacatttttacatagtgttttctttaaatgaaaccgactcatactactcggcctacacagtgcccattctgcaaaacgcccaattatgctgtggagtatcgtggcatcaaaacaaaggagtaaaggagcatagagcagtttacagacaattgaaaaagagaattgatcttttttatgggcgaagtgttgaagatggctttggtgaaggaaatgtcttgttagcatcaagtaagtggcgacatcacaacccctacaagcttgtgccttaaaacaagaggatacaagaagttggagtgcttttgtgaaggcttttacgaatcacttgaagtgttagtacttttgtgaatgattttgtaaagtgtttgcaaatatgtgcaaaacataataacatgtgtaggttttgtgaatgattttgttgtggtgcttgttgatggtttatgtgatgtggatctaccattgtgcaatactaattaaatttgt

SEQ ID NO: 6714 - protein, 141 aa, Zea mays subsp. mays
  peptide (1)..(141): Ceres Seq. ID no. 12387047
LHCSTRATEALCPPRSPPVAASAAQRSILLTPPATASGGDPFQLALRPGNHFGKVVSGIALLKKLEAVGSETGNPSYQVKIVDCGEVSNTNSQDPLKGDKVSSKTDNSSSDSEKGGHRTKRSLPKGMIQVEAPGTIPFSLM

SEQ ID NO: 6715 - protein, 80 aa, Zea mays subsp. mays
  peptide (1)..(80): Ceres Seq. ID no. 12387048
MKPVNVDGNIGGDNAEASMSRTGEGRHLPSNEPLSTNGKDLGVGSADNGQPQQIRKGRGFTQKYGYARRYRTPSPERPSV

SEQ ID NO: 6716 - DNA, 1254 bp, Zea mays subsp. mays
  misc_feature (1)..(1254): Ceres Seq. ID no. 13498495
  misc_feature (1)..(1254): Ortholog of  Ceres SEQ ID NO 14303282 as cited in SEQ ID NO 0
gcaaatccccttccgcgtctgtctggcctctggggcttctaggttagcgcgtgccaccaccatggccgaggaggtccaggctccactttccgccaccatggccgaggaggtgcaggctccactttccgccaccatggcgaaggaggcccagtcgccgccgtccgcaaccatagcggaggcgacggcgccgccgcagctcgtattgtttaactcctttacgaagagggaggagccattccagccccgggtagaggggaaggtagggatgtacgtctgtggcgtcactccctacgactttagccacatcggccacgcgcgtgcctacgtcgccttcgacgtcctctacaggtaccttaaattcttggggtatgaagttgaatatgtccgtaatttcacggatattgatgacaagattattaagcgtgccaatgaacgcggtgaaacagtaacaagcttgagtagccagtttatcaatcaatttcttcttgacatgactgagctccagtgcttgcctcctacctgcgagccacgggtaacagaacacattgagcatattataaagttgataacacagataatggacaatggcaaagcctatgctattgaaggagatgtttacttttcagttgaaagttttcctgaatatctcagtttatctggaagaaaatttgatcaaaatcaggcaggtgcacgggttgcttttgatacaagaaagcacaatcctgcagacttcgcactctggaaagctgcaaaggagggtgaacctttttgggatagcccttggggccgtggaagaccaggctggcatattgaatgcagcgcaatgagtgctcactatttaggacatgtattcgatattcatggtggggggaaagatttgatttttcctcatcatgagaatgagcttgcacaaagccgcgcagcttatcctgagagcgaggtcaagtgctggatgcacaatggctttgttaacaaggatgataaaaaaatggcaaaatcagataataactttttcacgattagagatatcactgctctttaccatccaatggctttaagatttttcttgatgcgcacacattatagatcagatgttaaccattctgatcaagcgcttgagattgcatctgatcgtgtctactacatttatcagactttatatgactgtgaggaagtgttagctacatatcgtgaagagggtacctctctcccagtgccgtctgaggagcaaaatctgattggaaagcaccattc

SEQ ID NO: 6717 - protein, 417 aa, Zea mays subsp. mays
  peptide (1)..(417): Ceres Seq. ID no. 13498496
QIPFRVCLASGASRLARATTMAEEVQAPLSATMAEEVQAPLSATMAKEAQSPPSATIAEATAPPQLVLFNSFTKREEPFQPRVEGKVGMYVCGVTPYDFSHIGHARAYVAFDVLYRYLKFLGYEVEYVRNFTDIDDKIIKRANERGETVTSLSSQFINQFLLDMTELQCLPPTCEPRVTEHIEHIIKLITQIMDNGKAYAIEGDVYFSVESFPEYLSLSGRKFDQNQAGARVAFDTRKHNPADFALWKAAKEGEPFWDSPWGRGRPGWHIECSAMSAHYLGHVFDIHGGGKDLIFPHHENELAQSRAAYPESEVKCWMHNGFVNKDDKKMAKSDNNFFTIRDITALYHPMALRFFLMRTHYRSDVNHSDQALEIASDRVYYIYQTLYDCEEVLATYREEGTSLPVPSEEQNLIGKHH

SEQ ID NO: 6718 - protein, 397 aa, Zea mays subsp. mays
  peptide (1)..(397): Ceres Seq. ID no. 13498497
MAEEVQAPLSATMAEEVQAPLSATMAKEAQSPPSATIAEATAPPQLVLFNSFTKREEPFQPRVEGKVGMYVCGVTPYDFSHIGHARAYVAFDVLYRYLKFLGYEVEYVRNFTDIDDKIIKRANERGETVTSLSSQFINQFLLDMTELQCLPPTCEPRVTEHIEHIIKLITQIMDNGKAYAIEGDVYFSVESFPEYLSLSGRKFDQNQAGARVAFDTRKHNPADFALWKAAKEGEPFWDSPWGRGRPGWHIECSAMSAHYLGHVFDIHGGGKDLIFPHHENELAQSRAAYPESEVKCWMHNGFVNKDDKKMAKSDNNFFTIRDITALYHPMALRFFLMRTHYRSDVNHSDQALEIASDRVYYIYQTLYDCEEVLATYREEGTSLPVPSEEQNLIGKHH

SEQ ID NO: 6719 - protein, 385 aa, Zea mays subsp. mays
  peptide (1)..(385): Ceres Seq. ID no. 13498498
MAEEVQAPLSATMAKEAQSPPSATIAEATAPPQLVLFNSFTKREEPFQPRVEGKVGMYVCGVTPYDFSHIGHARAYVAFDVLYRYLKFLGYEVEYVRNFTDIDDKIIKRANERGETVTSLSSQFINQFLLDMTELQCLPPTCEPRVTEHIEHIIKLITQIMDNGKAYAIEGDVYFSVESFPEYLSLSGRKFDQNQAGARVAFDTRKHNPADFALWKAAKEGEPFWDSPWGRGRPGWHIECSAMSAHYLGHVFDIHGGGKDLIFPHHENELAQSRAAYPESEVKCWMHNGFVNKDDKKMAKSDNNFFTIRDITALYHPMALRFFLMRTHYRSDVNHSDQALEIASDRVYYIYQTLYDCEEVLATYREEGTSLPVPSEEQNLIGKHH

SEQ ID NO: 6720 - DNA, 1442 bp, Zea mays subsp. mays
  misc_feature (1)..(1442): Ceres Seq. ID no. 13498707
  misc_feature (1)..(1442): Ortholog of  Ceres SEQ ID NO 13638750 as cited in SEQ ID NO 52185
ctgaaagaaacaaaaaaataaataaaacaaagataaatcattggggttgggggattgcaattgcaagttgccgctgtgcggtngcggtcgctcccctcccgactccggccagcagcagcgacggtgccggcagtcgattactccacgcggcggcggcggcggcggtagcccatcctttcccgttttctgatccagtcctactgataccgggcacagcacgcctgctcttgtgatatactctattaaggtacggcgtgaagatgagggttttcttggtctcgtgaaggcgacgctcttgtctgctaactacatattatagaatgttttgcttgaggggctactggtcgccttcactagctccagtgagggaagggcctgttcgacatcatataaagttcaattctatagtggtttgtggtgccaggggtccgagaccgagatatccccgtgtgtggaaaactcgtaagaaaattgggactatttccaagtcgcagaagcttgtcgaatgtattaaaggtctgtctaatgtaaaggaggaagtttatggggcacttgactcatttgttgcatgggaactggagtttcccttgatagtggtaaagaaggcactgaagaaacttgaggacgaaaaggaatggaaacgaataattcaggtcattaaatggatgttcaacaaaggtcaagggaagacaatgggaagctattacaccttgttgaatgctttgatcgaggatggacggattgaggaagcagaagagttatttggaatggtgttctcacgatatatggagggtttgcctcgtacatttttcatgagaatgatttctttctattacaacgtggaagcgtatgataatatgtttgagatttttgctgatatggaggaactaggcgtaagacctgatggttctattatcaggatgctaggtgatgtatttcagaagttagagatgatggacaaatatgaaaagttaaaaaagaaataccgaccaccgaaatgggaatatcgacacatcaaaggcaagcgcataagaatcagagtttatcctgacagtaatcctgaagtggcggcaaaaggagatcccgacactgatgagctcgaagagttagaaagcacacaccttaataacgaattggatgaagcagcaagctcaggcctcgacaggagtgtattggacgatgcagcttctggagaccttgaatatatgtagatcagagcttccatttggtacttttttgtgcctgcttaaccaaagcggtctagagcaaattgaactggtaacatactctctgttttgatttgacatcctagaacccgtgtcgtcatactgccaagacatgggcatcgctatcttctgaagtatttttactacctagaatgagtagaaactacatgccaggctttgccatcagcagtcttttcaagacatcatggtggtttc

SEQ ID NO: 6721 - protein, 296 aa, Zea mays subsp. mays
  peptide (1)..(296): Ceres Seq. ID no. 13498708
MFCLRGYWSPSLAPVREGPVRHHIKFNSIVVCGARGPRPRYPRVWKTRKKIGTISKSQKLVECIKGLSNVKEEVYGALDSFVAWELEFPLIVVKKALKKLEDEKEWKRIIQVIKWMFNKGQGKTMGSYYTLLNALIEDGRIEEAEELFGMVFSRYMEGLPRTFFMRMISFYYNVEAYDNMFEIFADMEELGVRPDGSIIRMLGDVFQKLEMMDKYEKLKKKYRPPKWEYRHIKGKRIRIRVYPDSNPEVAAKGDPDTDELEELESTHLNNELDEAASSGLDRSVLDDAASGDLEYM

SEQ ID NO: 6722 - protein, 181 aa, Zea mays subsp. mays
  peptide (1)..(181): Ceres Seq. ID no. 13498709
MFNKGQGKTMGSYYTLLNALIEDGRIEEAEELFGMVFSRYMEGLPRTFFMRMISFYYNVEAYDNMFEIFADMEELGVRPDGSIIRMLGDVFQKLEMMDKYEKLKKKYRPPKWEYRHIKGKRIRIRVYPDSNPEVAAKGDPDTDELEELESTHLNNELDEAASSGLDRSVLDDAASGDLEYM

SEQ ID NO: 6723 - protein, 172 aa, Zea mays subsp. mays
  peptide (1)..(172): Ceres Seq. ID no. 13498710
MGSYYTLLNALIEDGRIEEAEELFGMVFSRYMEGLPRTFFMRMISFYYNVEAYDNMFEIFADMEELGVRPDGSIIRMLGDVFQKLEMMDKYEKLKKKYRPPKWEYRHIKGKRIRIRVYPDSNPEVAAKGDPDTDELEELESTHLNNELDEAASSGLDRSVLDDAASGDLEYM

SEQ ID NO: 6724 - DNA, 1387 bp, Zea mays subsp. mays
  misc_feature (1)..(1387): Ceres Seq. ID no. 13492693
  misc_feature (1)..(1387): Ortholog of  Ceres SEQ ID NO 13654187 as cited in SEQ ID NO 68219
acttccaaactgcaacgaaaacccacgtctaaaacaggtggcccaccaacgattcacttccccgatcccagggggcggcgatcggaattcgcaacttctcccacgcggcgaacacggcagagatgatgagctcccgggccggatccatcctcctccgccacgccggctcccgtctcttcaccgcagcggcgatctctccggcggcggcctcgaggccactgctcgccggcggcaatggtgttccggcagtcatgctacggcttatgtccacgtcctcccccgccgctcccacggaggcgaaggacgaggcagccaaggcctccaaggtgggaggagacaagaaggcggtggtgatcaacagctactgggggatcgagcaaaacaacaagctagcgcgggacgacggcaccgagtggaagtggacttgctttaggccatgggagacgtacacggcggacacgtccattgacctcaccagacaccatgagcccaagacgctgatggataaggtcgcatactggaccgtcaagtcgctgcgcttccccacggacatcttcttccagaggcggtatggctgccgggcgatgatgctggaaaccgtggctgcggtgcctgggatggtgggcggcatgctgctccacctgcgctcactccgccgcttcgagcagagcggcggctggatccgcgctttgctggaggaggccgagaacgagcgcatgcacctcatgaccttcatggaggtggcgaagccgaggtggtacgagcgcgcgctcgttatcaccgtccagggcgtcttcttcaacgcatacttcctcggctacctcttgtccccgaagttcgcgcaccgcgtcgtcggctacctggaggaggaggccatccactcgtacaccgagtacctcaaggatctggaggccggcaagatcgagaacgtccccgccccggccatcgccatcgactactggcgcctccccgctaacgccacgctcaaggacgtagtcaccgtcgtccgcgccgacgaggctcaccaccgcgacgtcaaccactttgcatcggacatccattgccagggaatgcagctgaagcagtcccctgcgccgatcggataccactgaggatgtttgtgctcttcttaattttgcatcgctaataagcaattgtctttaagggaaggaaaggatgcttattgagttacgagtactgctacggcgattaggatattttccaaccagttgtttgagagtgaaacctattatatgtacgcatgttacatgtacatatctctaagtgcgagaggtgcttttctggcgtttatcacttcttcctggagttcctttgttcttcatgtcagctgaattgggctcgctaatatcgaatgtacaatttttgc

SEQ ID NO: 6725 - protein, 329 aa, Zea mays subsp. mays
  peptide (1)..(329): Ceres Seq. ID no. 13492694
MMSSRAGSILLRHAGSRLFTAAAISPAAASRPLLAGGNGVPAVMLRLMSTSSPAAPTEAKDEAAKASKVGGDKKAVVINSYWGIEQNNKLARDDGTEWKWTCFRPWETYTADTSIDLTRHHEPKTLMDKVAYWTVKSLRFPTDIFFQRRYGCRAMMLETVAAVPGMVGGMLLHLRSLRRFEQSGGWIRALLEEAENERMHLMTFMEVAKPRWYERALVITVQGVFFNAYFLGYLLSPKFAHRVVGYLEEEAIHSYTEYLKDLEAGKIENVPAPAIAIDYWRLPANATLKDVVTVVRADEAHHRDVNHFASDIHCQGMQLKQSPAPIGYH

SEQ ID NO: 6726 - protein, 328 aa, Zea mays subsp. mays
  peptide (1)..(328): Ceres Seq. ID no. 13492695
MSSRAGSILLRHAGSRLFTAAAISPAAASRPLLAGGNGVPAVMLRLMSTSSPAAPTEAKDEAAKASKVGGDKKAVVINSYWGIEQNNKLARDDGTEWKWTCFRPWETYTADTSIDLTRHHEPKTLMDKVAYWTVKSLRFPTDIFFQRRYGCRAMMLETVAAVPGMVGGMLLHLRSLRRFEQSGGWIRALLEEAENERMHLMTFMEVAKPRWYERALVITVQGVFFNAYFLGYLLSPKFAHRVVGYLEEEAIHSYTEYLKDLEAGKIENVPAPAIAIDYWRLPANATLKDVVTVVRADEAHHRDVNHFASDIHCQGMQLKQSPAPIGYH

SEQ ID NO: 6727 - protein, 286 aa, Zea mays subsp. mays
  peptide (1)..(286): Ceres Seq. ID no. 13492696
MLRLMSTSSPAAPTEAKDEAAKASKVGGDKKAVVINSYWGIEQNNKLARDDGTEWKWTCFRPWETYTADTSIDLTRHHEPKTLMDKVAYWTVKSLRFPTDIFFQRRYGCRAMMLETVAAVPGMVGGMLLHLRSLRRFEQSGGWIRALLEEAENERMHLMTFMEVAKPRWYERALVITVQGVFFNAYFLGYLLSPKFAHRVVGYLEEEAIHSYTEYLKDLEAGKIENVPAPAIAIDYWRLPANATLKDVVTVVRADEAHHRDVNHFASDIHCQGMQLKQSPAPIGYH

SEQ ID NO: 6728 - DNA, 1316 bp, Zea mays subsp. mays
  misc_feature (1)..(1316): Ceres Seq. ID no. 12347498
  misc_feature (1)..(1316): Ortholog of  Ceres SEQ ID NO 15176532 as cited in SEQ ID NO 58184
  misc_feature (1)..(1316): Ortholog of  Ceres SEQ ID NO 14303627 as cited in SEQ ID NO 62070
  misc_feature (1)..(1316): Ortholog of  Ceres SEQ ID NO 13597546 as cited in SEQ ID NO 65017
  misc_feature (1)..(1316): Ortholog of  Ceres SEQ ID NO 14308015 as cited in SEQ ID NO 65798
  misc_feature (1)..(1316): Ortholog of  Ceres SEQ ID NO 14307912 as cited in SEQ ID NO 66380
  misc_feature (1)..(1316): Ortholog of  Ceres SEQ ID NO 15176077 as cited in SEQ ID NO 66728
  misc_feature (1)..(1316): Ortholog of  Ceres SEQ ID NO 14307908 as cited in SEQ ID NO 67189
  misc_feature (1)..(1316): Ortholog of  Ceres SEQ ID NO 14308045 as cited in SEQ ID NO 67444
  misc_feature (1)..(1316): Ortholog of  Ceres SEQ ID NO 13654353 as cited in SEQ ID NO 68318
gagaggctcaggctgctcgtgatggcttggctcgcagacagacaggcagacagagagatatcaaaacatttgagggaaatgttatttgtgtatcactgtgcatgcagtacgcagtgagtaatgaatgaattctggtgtggccagcagatcgtgttcgagatcctggtgaggggtctgatcgggctggaggcaggcccggagatgcagcagctcaagcaccagttccaggaattcattgtcggcctcatgtccctccccatcaagctgccggggactaggctctacaggtccctccaggccaagaagaggatggccacgctgatacaggggatcatacaggagaagaggcggcggcggagggccgcccttgaggatggcggagagggcgagggcgaggccggtcccccgcgcgacgtcatcgacgtgctcataagcggcggcgacgagctcaccgacgagctcatatccgacaacatgatcgacctgatgatccccgccgaggactctgtgcccgtgctcatcacgctcgccgtcaagtatctcagcgagtgcccgcttgctctgcaacaacttgaggaggagaacatgcagctgaagaggcggaaaaccgacgtgggagagaccttgcagtggacggactacatgtcactgtcgttcacacaacatgtgataacggagacactgcggatggggaatatcatcaacgggatcatgcgcaaagcggtgcgggacgtggaggtgaaggggcacctcatccccaagggctggtgcgtgttcgtgtacttccggtcggtccacctcgacgacaagcgctacgacgagccctacaggttcaacccgtggaggtggaaggagaaggacacgagcaccatgggcttcaccccttttggcggtgggcagaggctgtgcccaggcctggatctggccaggctggaagcttccatctttctccatcacctggtgaccagcttcaggtgggtggcggaggaggaccacatcgtcaacttcccaaccgtgcggctcaagcgaggcatgcccgtcaggctcaccagcaaagactagctagctagtcactacgacctgcttgtgcatgccatgcatgcagatttcagtcacgtcatatgcaatatatattggaccctggaggttgcacgtgtacagaagagaggatgcaggagctagcagatgatcggaggtatttaggcagactgaaattgaatcgaccgcgaagagtagcacactactataccacgagtatgatctgtagtagtagtaataagaggaatataatatcattagtgtggtagtatttactg

SEQ ID NO: 6729 - protein, 313 aa, Zea mays subsp. mays
  peptide (1)..(313): Ceres Seq. ID no. 12347499
MNEFWCGQQIVFEILVRGLIGLEAGPEMQQLKHQFQEFIVGLMSLPIKLPGTRLYRSLQAKKRMATLIQGIIQEKRRRRRAALEDGGEGEGEAGPPRDVIDVLISGGDELTDELISDNMIDLMIPAEDSVPVLITLAVKYLSECPLALQQLEEENMQLKRRKTDVGETLQWTDYMSLSFTQHVITETLRMGNIINGIMRKAVRDVEVKGHLIPKGWCVFVYFRSVHLDDKRYDEPYRFNPWRWKEKDTSTMGFTPFGGGQRLCPGLDLARLEASIFLHHLVTSFRWVAEEDHIVNFPTVRLKRGMPVRLTSKD

SEQ ID NO: 6730 - protein, 286 aa, Zea mays subsp. mays
  peptide (1)..(286): Ceres Seq. ID no. 12347500
MQQLKHQFQEFIVGLMSLPIKLPGTRLYRSLQAKKRMATLIQGIIQEKRRRRRAALEDGGEGEGEAGPPRDVIDVLISGGDELTDELISDNMIDLMIPAEDSVPVLITLAVKYLSECPLALQQLEEENMQLKRRKTDVGETLQWTDYMSLSFTQHVITETLRMGNIINGIMRKAVRDVEVKGHLIPKGWCVFVYFRSVHLDDKRYDEPYRFNPWRWKEKDTSTMGFTPFGGGQRLCPGLDLARLEASIFLHHLVTSFRWVAEEDHIVNFPTVRLKRGMPVRLTSKD

SEQ ID NO: 6731 - protein, 271 aa, Zea mays subsp. mays
  peptide (1)..(271): Ceres Seq. ID no. 12347501
MSLPIKLPGTRLYRSLQAKKRMATLIQGIIQEKRRRRRAALEDGGEGEGEAGPPRDVIDVLISGGDELTDELISDNMIDLMIPAEDSVPVLITLAVKYLSECPLALQQLEEENMQLKRRKTDVGETLQWTDYMSLSFTQHVITETLRMGNIINGIMRKAVRDVEVKGHLIPKGWCVFVYFRSVHLDDKRYDEPYRFNPWRWKEKDTSTMGFTPFGGGQRLCPGLDLARLEASIFLHHLVTSFRWVAEEDHIVNFPTVRLKRGMPVRLTSKD

SEQ ID NO: 6732 - DNA, 1538 bp, Zea mays subsp. mays
  misc_feature (1)..(1538): Ceres Seq. ID no. 12346101
  misc_feature (1)..(1538): Ortholog of  Ceres SEQ ID NO 13656783 as cited in SEQ ID NO 69218
atcgtcaaactgcccgcggtccaaaatccaaaccctgcgagtgtatagaagaagaaccccccaccccatcgcaacccgcaatggtcgcggcggaagatccggaacacttcttcgccgcctcgccgccgctgcgcgacgctgccgttgtcgccgccagcctgcaggagttcgtcgcgcgcaattcgcacgcatcatcagacggcgtcgggcggcggcgcatcgtctgcgtcacgtcgggcgggaccacggtgccgctggagcagcgatgcgtgcgctacatcgacaacttcagctccggccaccgcggcgccgcgtccaccgagtatttcttaaaggctggctatgcggtcattttcgtccatcggcgagggagttgccagcctttctccaggttcctgcctgatgactcgtttctccacttctttgatgtcacaacatattcgaaggttcaagtggccgagtcccaggcaacggtggtaaagagagcaattggggattatcgcaaggctactgaaggaggctctctgctgaaactcccattcaccacgatatttgagtatcttcagttactgaagatggttgctacatccatgagctgtgtgggtctccacgggatgttctatctcgctgcagctgtgtctgacttctatgttccatgggatagcatggcaaaacataagatccagtcagccggaggcccactggatatgaagctcagccaggttccaaaaatgctccccgttctgcgcaaccattgggcccccttggccttctgcgtatccttcaagctggagacggatccagacattctagttcagaaagcagagacggctctgagcaagtacaggatggacgttgttgtggccaatctacttgcaacgtacaaggaggaggtcgtcatcatctcgaatggcaaaagcaacaccattcgaaggtgcagcaaaggcgaggatctggaggagcatatcatcaagctcctagagaagagccactccaagtttatttacagcagcacggaagggtgcagtaagaacgactacgaaaagcttataccgttaggcatcaaaagtctggcttaagggaaacattgatcggttctggagctcaaattaatagggaagccccatcagcactcttgtagtgtttggatggatggacgaggaaggatgaagagggatgggataggatcattctaagttgacccatgtttggtttggaggtctagagtcacggtcaaggaatatttttcaaaaatagtggatggggccatcccttaaaaaataagggatggagtcaactcagagttgatcccatcccatctctcgttgacaccgaaccaaacacatcataaagctctacatgcagtgtgtacatttgctggtaatgtatatgtaagcaggactaataggattgttctgttctcacacgcacacaaacacgccaccaaaaaagatggtccaaagttgtatgtatcgtttgctattcacctgttaattaatggctttgtaatcagaaatgattattgttcaaattgtttc

SEQ ID NO: 6733 - protein, 358 aa, Zea mays subsp. mays
  peptide (1)..(358): Ceres Seq. ID no. 12346102
RQTARGPKSKPCECIEEEPPTPSQPAMVAAEDPEHFFAASPPLRDAAVVAASLQEFVARNSHASSDGVGRRRIVCVTSGGTTVPLEQRCVRYIDNFSSGHRGAASTEYFLKAGYAVIFVHRRGSCQPFSRFLPDDSFLHFFDVTTYSKVQVAESQATVVKRAIGDYRKATEGGSLLKLPFTTIFEYLQLLKMVATSMSCVGLHGMFYLAAAVSDFYVPWDSMAKHKIQSAGGPLDMKLSQVPKMLPVLRNHWAPLAFCVSFKLETDPDILVQKAETALSKYRMDVVVANLLATYKEEVVIISNGKSNTIRRCSKGEDLEEHIIKLLEKSHSKFIYSSTEGCSKNDYEKLIPLGIKSLA

SEQ ID NO: 6734 - protein, 332 aa, Zea mays subsp. mays
  peptide (1)..(332): Ceres Seq. ID no. 12346103
MVAAEDPEHFFAASPPLRDAAVVAASLQEFVARNSHASSDGVGRRRIVCVTSGGTTVPLEQRCVRYIDNFSSGHRGAASTEYFLKAGYAVIFVHRRGSCQPFSRFLPDDSFLHFFDVTTYSKVQVAESQATVVKRAIGDYRKATEGGSLLKLPFTTIFEYLQLLKMVATSMSCVGLHGMFYLAAAVSDFYVPWDSMAKHKIQSAGGPLDMKLSQVPKMLPVLRNHWAPLAFCVSFKLETDPDILVQKAETALSKYRMDVVVANLLATYKEEVVIISNGKSNTIRRCSKGEDLEEHIIKLLEKSHSKFIYSSTEGCSKNDYEKLIPLGIKSLA

SEQ ID NO: 6735 - DNA, 1850 bp, Zea mays subsp. mays
  misc_feature (1)..(1850): Ceres Seq. ID no. 12349999
  misc_feature (1)..(1850): Ortholog of  Ceres SEQ ID NO 14311183 as cited in SEQ ID NO 58495
  misc_feature (1)..(1850): Ortholog of  Ceres SEQ ID NO 14306857 as cited in SEQ ID NO 60035
  misc_feature (1)..(1850): Ortholog of  Ceres SEQ ID NO 15227091 as cited in SEQ ID NO 60294
  misc_feature (1)..(1850): Ortholog of  Ceres SEQ ID NO 14316039 as cited in SEQ ID NO 62062
  misc_feature (1)..(1850): Ortholog of  Ceres SEQ ID NO 15176783 as cited in SEQ ID NO 65590
  misc_feature (1)..(1850): Ortholog of  Ceres SEQ ID NO 15176091 as cited in SEQ ID NO 65733
  misc_feature (1)..(1850): Ortholog of  Ceres SEQ ID NO 14308019 as cited in SEQ ID NO 65849
  misc_feature (1)..(1850): Ortholog of  Ceres SEQ ID NO 15169611 as cited in SEQ ID NO 65939
  misc_feature (1)..(1850): Ortholog of  Ceres SEQ ID NO 15169599 as cited in SEQ ID NO 66096
  misc_feature (1)..(1850): Ortholog of  Ceres SEQ ID NO 14307960 as cited in SEQ ID NO 66187
  misc_feature (1)..(1850): Ortholog of  Ceres SEQ ID NO 14307964 as cited in SEQ ID NO 66191
  misc_feature (1)..(1850): Ortholog of  Ceres SEQ ID NO 15170167 as cited in SEQ ID NO 66224
  misc_feature (1)..(1850): Ortholog of  Ceres SEQ ID NO 13502874 as cited in SEQ ID NO 66298
  misc_feature (1)..(1850): Ortholog of  Ceres SEQ ID NO 14307944 as cited in SEQ ID NO 66503
  misc_feature (1)..(1850): Ortholog of  Ceres SEQ ID NO 12614124 as cited in SEQ ID NO 68392
  misc_feature (1)..(1850): Ortholog of  Ceres SEQ ID NO 14307980 as cited in SEQ ID NO 69214
  misc_feature (1)..(1850): Ortholog of  Ceres SEQ ID NO 14308011 as cited in SEQ ID NO 69234
actttatttctcgcactgcacctgcacgcaacagagacgtactcattcaggcgatcgaatccatggagctcgtgctcactacacctgatctcccaaccccgctgctgctctccaccttaacgatagtgtccgtggtcgtatgctatgtcctcttctggaagcagcaggcggcggcgaggcgagcgccgctgccgcccgggccgaggggctggcccgtgctgggcaacctaccgcagctgggcgggaagactcaccagacgctgcacgagatgaccaaggtgtacggcccgctgctgcggctgcggttcggcagctccaccgtggtggtggccgggtcggcggccgtggcgcagcagttcctccgcgcccacgacgccaacttcagcagccgcccgcccaactccggcggcgagctcatggcgtacaactaccaggacgtggtgttcgcgccctacgggccccggtggcgcgcgatgcgcaaggtgtgcgccgtgaacctcttctccgcgcgcgcgctcgacgacgtccgcggcgtccgggagcgcgaggcggcgctcatggtgaggtcgctcgcggagcaggcccacggcggcctcgacgcgccgccggcggcggtgccggttggcaaggccatcaacgtgtgcacgacgaacgcgctctcgcgggcggccgttgggcggcgggtgttcgctgccgccggcggcgacgggggcgcgagggagttcaaggagatcgtgctcgaggtgatgcaggtgggcggggtgctcaacgtcggcgacttcgtgccggcgctccggtggctcgacccgcagggcgtggcggccaagatgaagaagctgcaccgccggttcgacgacatgatggacgagatcattgcaggttatagggaggccaggagggttgcggcagacggagaggagagcaaggatttgcttggcttgctgctgtcgatggttgacgagcggccgttcgacagcggggaagaagtcaggatcaccgaaaccgatgtcaaggcactcattttgaacctgttcgtggcagggaccgacacgacgtcgaccatagtggagtggtctctcgcagagctgatccgccacccggaaatcctgaggcaagcgcaggaggagatggacgcggtggccgggcgcgggaggctggtcacggagtcggacctccgaagcctcaccttcttcaacgcggtcatcaaggagacgttccgcctgcacccgtcgacgccgctctccctaccgcgcatggccgccgaggagtgcgaggtcgcgggctaccgcgtccccaggggctcggagctgctggtcaacgtgtggggcatcgcccgcgacccggcgctgtggcctgacccgctggagttccggccggccaggttcctgccgggcgggtcgcatgcggacgtggacgtcaaaggcgccgacttcgggctcatcccgttcggcgccggccggaggatctgcgccggcctcagctgggggctgcggatggtcacgctcaccagcgccaccctggtgcacgcgttcgactgggagttgccggcagggcagacgccggacaagctgaacatggaggaggccttcaccctcctgctgcagcgggctgttccgttagtggctcgtccagtacccaggctgctgccgtcggcgtatgagatcgcataggaaggctcgctcaagggcctcagcttggctgtatcaagcacgtacaatggcgtgaaagacgacgtgtgtatgtattgttgttcactttgttgacttttgtaaacactagtaaatgttcttgctatggctaatatctgtaacgaatttttatattttgacatgattacgcttctggcttgt

SEQ ID NO: 6736 - protein, 555 aa, Zea mays subsp. mays
  peptide (1)..(555): Ceres Seq. ID no. 12350000
FISRTAPARNRDVLIQAIESMELVLTTPDLPTPLLLSTLTIVSVVVCYVLFWKQQAAARRAPLPPGPRGWPVLGNLPQLGGKTHQTLHEMTKVYGPLLRLRFGSSTVVVAGSAAVAQQFLRAHDANFSSRPPNSGGELMAYNYQDVVFAPYGPRWRAMRKVCAVNLFSARALDDVRGVREREAALMVRSLAEQAHGGLDAPPAAVPVGKAINVCTTNALSRAAVGRRVFAAAGGDGGAREFKEIVLEVMQVGGVLNVGDFVPALRWLDPQGVAAKMKKLHRRFDDMMDEIIAGYREARRVAADGEESKDLLGLLLSMVDERPFDSGEEVRITETDVKALILNLFVAGTDTTSTIVEWSLAELIRHPEILRQAQEEMDAVAGRGRLVTESDLRSLTFFNAVIKETFRLHPSTPLSLPRMAAEECEVAGYRVPRGSELLVNVWGIARDPALWPDPLEFRPARFLPGGSHADVDVKGADFGLIPFGAGRRICAGLSWGLRMVTLTSATLVHAFDWELPAGQTPDKLNMEEAFTLLLQRAVPLVARPVPRLLPSAYEIA

SEQ ID NO: 6737 - protein, 535 aa, Zea mays subsp. mays
  peptide (1)..(535): Ceres Seq. ID no. 12350001
MELVLTTPDLPTPLLLSTLTIVSVVVCYVLFWKQQAAARRAPLPPGPRGWPVLGNLPQLGGKTHQTLHEMTKVYGPLLRLRFGSSTVVVAGSAAVAQQFLRAHDANFSSRPPNSGGELMAYNYQDVVFAPYGPRWRAMRKVCAVNLFSARALDDVRGVREREAALMVRSLAEQAHGGLDAPPAAVPVGKAINVCTTNALSRAAVGRRVFAAAGGDGGAREFKEIVLEVMQVGGVLNVGDFVPALRWLDPQGVAAKMKKLHRRFDDMMDEIIAGYREARRVAADGEESKDLLGLLLSMVDERPFDSGEEVRITETDVKALILNLFVAGTDTTSTIVEWSLAELIRHPEILRQAQEEMDAVAGRGRLVTESDLRSLTFFNAVIKETFRLHPSTPLSLPRMAAEECEVAGYRVPRGSELLVNVWGIARDPALWPDPLEFRPARFLPGGSHADVDVKGADFGLIPFGAGRRICAGLSWGLRMVTLTSATLVHAFDWELPAGQTPDKLNMEEAFTLLLQRAVPLVARPVPRLLPSAYEIA

SEQ ID NO: 6738 - protein, 466 aa, Zea mays subsp. mays
  peptide (1)..(466): Ceres Seq. ID no. 12350002
MTKVYGPLLRLRFGSSTVVVAGSAAVAQQFLRAHDANFSSRPPNSGGELMAYNYQDVVFAPYGPRWRAMRKVCAVNLFSARALDDVRGVREREAALMVRSLAEQAHGGLDAPPAAVPVGKAINVCTTNALSRAAVGRRVFAAAGGDGGAREFKEIVLEVMQVGGVLNVGDFVPALRWLDPQGVAAKMKKLHRRFDDMMDEIIAGYREARRVAADGEESKDLLGLLLSMVDERPFDSGEEVRITETDVKALILNLFVAGTDTTSTIVEWSLAELIRHPEILRQAQEEMDAVAGRGRLVTESDLRSLTFFNAVIKETFRLHPSTPLSLPRMAAEECEVAGYRVPRGSELLVNVWGIARDPALWPDPLEFRPARFLPGGSHADVDVKGADFGLIPFGAGRRICAGLSWGLRMVTLTSATLVHAFDWELPAGQTPDKLNMEEAFTLLLQRAVPLVARPVPRLLPSAYEIA

SEQ ID NO: 6739 - DNA, 1488 bp, Zea mays subsp. mays
  misc_feature (1)..(1488): Ceres Seq. ID no. 12373586
  misc_feature (1)..(1488): Ortholog of  Ceres SEQ ID NO 14316161 as cited in SEQ ID NO 52384
  misc_feature (1)..(1488): Ortholog of  Ceres SEQ ID NO 14315249 as cited in SEQ ID NO 52512
  misc_feature (1)..(1488): Ortholog of  Ceres SEQ ID NO 15174595 as cited in SEQ ID NO 53460
  misc_feature (1)..(1488): Ortholog of  Ceres SEQ ID NO 13503553 as cited in SEQ ID NO 64822
  misc_feature (1)..(1488): Ortholog of  Ceres SEQ ID NO 13660155 as cited in SEQ ID NO 67635
gcccttctcccctcccctcgtgcgttgacaaaaaagaaagtgaagtgaagaatcaaccaacaatggccggcggaatccaccgaccacaatgctgattttgtttgagccatctggactggactggaccctataaaaaacagatcagatctcccccaccctcgcttccccagcctgcaggttgtcgtcgccctcttcctcctccttcgctgttgctgttgctgttgcttccgcttccgccgccgccgccgcggaaatcaaactaatctgatcgagaccacaccgttccagagagatcccccaaacaaaaaaagagcacgggatcgaaatggagctcgacggcaagtacagcaaggaccagagcctcaaatgcgaatgcctcctcttcgacctcgatgacacactatacccgttcaactccggcattgctgccgacataaagaagaacatccaagactatatggtgcacaagctcggcgttgacgaggccataagcttggacctatgcgtcctcctctacaagcagtacggaaccaccatggctggcttgagggctgttgggtaccagtttgattacgatgactaccacagctttgttcatgggaggttgtcttatgacaaaatcaagcctgatcctgtgcttaggaacatcctcctcagcttacccattcgcaaacttgtgttcacaaacggtgacagaacacatgcttcaagggccctcaagaggcttggcattgaggattgtttcgaaggagtcgtgtgctttgagacactgaacccgacatctcctcctcctcctgtcccagctcaggaacttgaaatctttgatctaatgaagcatctggctcatccacagcccgcggtgcagctaccaaaatcacctatcctatgcaaaccgtcaagggaggccatgctgcaggctctcaaggtcgcctccattaatccacagacaactatattgttcgatgacagcttcaggaacattgaagctgcaaagcaaattggaatgtgtactgtcctggttggaacatctgagcggaaaaagggtgctgaccatgccttggaaagcctccacaacatgaaggaagcactgccggagctgtgggaggaagctgagaaggatgaagatgtgaggaattcgagcaaagccggaatcgagacatctgtgatcgcgtaatcttttttgttccttggttacaaatgtagccccttctgttttccttggaggacaacacgaggtggtggtgtatgaaaaaagaggagacctcctcaaggggtgggggggactgactgatactacgaccactgatgttacaccccgtaaactattactatccaataagaatgttttcttcttcaactatctaggatggtcattttgttggtgtttagttaaagcagctatccaatatttttttggatccaaatgtgtatgtcctcgctacttggttcttcatgcttatgaatgtggagtgatgatgtcctgttgcc

SEQ ID NO: 6740 - protein, 282 aa, Zea mays subsp. mays
  peptide (1)..(282): Ceres Seq. ID no. 12373587
MELDGKYSKDQSLKCECLLFDLDDTLYPFNSGIAADIKKNIQDYMVHKLGVDEAISLDLCVLLYKQYGTTMAGLRAVGYQFDYDDYHSFVHGRLSYDKIKPDPVLRNILLSLPIRKLVFTNGDRTHASRALKRLGIEDCFEGVVCFETLNPTSPPPPVPAQELEIFDLMKHLAHPQPAVQLPKSPILCKPSREAMLQALKVASINPQTTILFDDSFRNIEAAKQIGMCTVLVGTSERKKGADHALESLHNMKEALPELWEEAEKDEDVRNSSKAGIETSVIA

SEQ ID NO: 6741 - protein, 238 aa, Zea mays subsp. mays
  peptide (1)..(238): Ceres Seq. ID no. 12373588
MVHKLGVDEAISLDLCVLLYKQYGTTMAGLRAVGYQFDYDDYHSFVHGRLSYDKIKPDPVLRNILLSLPIRKLVFTNGDRTHASRALKRLGIEDCFEGVVCFETLNPTSPPPPVPAQELEIFDLMKHLAHPQPAVQLPKSPILCKPSREAMLQALKVASINPQTTILFDDSFRNIEAAKQIGMCTVLVGTSERKKGADHALESLHNMKEALPELWEEAEKDEDVRNSSKAGIETSVIA

SEQ ID NO: 6742 - protein, 212 aa, Zea mays subsp. mays
  peptide (1)..(212): Ceres Seq. ID no. 12373589
MAGLRAVGYQFDYDDYHSFVHGRLSYDKIKPDPVLRNILLSLPIRKLVFTNGDRTHASRALKRLGIEDCFEGVVCFETLNPTSPPPPVPAQELEIFDLMKHLAHPQPAVQLPKSPILCKPSREAMLQALKVASINPQTTILFDDSFRNIEAAKQIGMCTVLVGTSERKKGADHALESLHNMKEALPELWEEAEKDEDVRNSSKAGIETSVIA

SEQ ID NO: 6743 - DNA, 1301 bp, Zea mays subsp. mays
  misc_feature (1)..(1301): Ceres Seq. ID no. 12350982
  misc_feature (1)..(1301): Ortholog of  Ceres SEQ ID NO 15225907 as cited in SEQ ID NO 0
ttgatggagtaccaaatttgccatacgtcgctccattttcctcctctgttcccaatgcttgtcgtattgtgcgttctttcatcgaggagttggtcagctacttgtcactcagcggtggcgtaaacgtctatgatgtggtgaaaagctacttagacaagttcttgattgagacgttgaatgatggttttctgaagctgatacatggtggatccctggaatttccacaggtggtgcagatcgcaggaaatatcgccgttctcgagcggtcctgcgacatgttcctttggcacgccgctcgactttgtggtgtccctaggtgcctcctcgagaagccccattctggattgagtgccagagctgtgctcaaagcctcccagaatgcagcatacaacggatcggttactttggtgaattccaagatcgacgagttcatgctgcagctgactagcatcaactggaccccggacgaagctccagagcacgccaacgactacatgaacgaggtgatcatctaccttcacgaggtggtctcttccgggcagcaggccgtgccaagggacgccctgttcaaggttgtatctggcgcgctgagccacatctcggactctatgacgacggtccttctcagtgaccgggtgaaaaggttcaacgcgaacgccgttgctagcatcgacgtcgatctgagggcgctggaggggttcgctgacgacacgtaccgcgtggccgggtttctggacctgagaaagggaaccagtttcagagagtgtctagccgaagtaaggcagctaacaaaccttctgctgagcaaccagcctgagagcttcgcgaaccctgcaacccgggagcagagctacggagccttagaccacaagaaggtggcgataatttgcgacaagttcaaggatgcccccgacagcctgtttgggagcctctcaggccggggcacggtgcagagcgcccggaagaagtccctggatgtgctgaagagaaggctaaaggattttagctagctggtgaactagatcatttagacaagctagtagcctagtacccctgttttagtgccagtcgtatccatttaaaatttcttttccgtctttctttattccctctttaatcgacttcccgtcccgtttcatgcgccgaagagaaggctgaaggattttagctggggttagctggtcgagctagatcgttaaataagctagtgctctgtttagggaagaagacaagtggttcggtgtgtaaagccatttcaaatttctttccatccttatttttactcccttaatctgcttcct

SEQ ID NO: 6744 - protein, 335 aa, Zea mays subsp. mays
  peptide (1)..(335): Ceres Seq. ID no. 12350983
DGVPNLPYVAPFSSSVPNACRIVRSFIEELVSYLSLSGGVNVYDVVKSYLDKFLIETLNDGFLKLIHGGSLEFPQVVQIAGNIAVLERSCDMFLWHAARLCGVPRCLLEKPHSGLSARAVLKASQNAAYNGSVTLVNSKIDEFMLQLTSINWTPDEAPEHANDYMNEVIIYLHEVVSSGQQAVPRDALFKVVSGALSHISDSMTTVLLSDRVKRFNANAVASIDVDLRALEGFADDTYRVAGFLDLRKGTSFRECLAEVRQLTNLLLSNQPESFANPATREQSYGALDHKKVAIICDKFKDAPDSLFGSLSGRGTVQSARKKSLDVLKRRLKDFS

SEQ ID NO: 6745 - protein, 244 aa, Zea mays subsp. mays
  peptide (1)..(244): Ceres Seq. ID no. 12350984
MFLWHAARLCGVPRCLLEKPHSGLSARAVLKASQNAAYNGSVTLVNSKIDEFMLQLTSINWTPDEAPEHANDYMNEVIIYLHEVVSSGQQAVPRDALFKVVSGALSHISDSMTTVLLSDRVKRFNANAVASIDVDLRALEGFADDTYRVAGFLDLRKGTSFRECLAEVRQLTNLLLSNQPESFANPATREQSYGALDHKKVAIICDKFKDAPDSLFGSLSGRGTVQSARKKSLDVLKRRLKDFS

SEQ ID NO: 6746 - protein, 192 aa, Zea mays subsp. mays
  peptide (1)..(192): Ceres Seq. ID no. 12350985
MLQLTSINWTPDEAPEHANDYMNEVIIYLHEVVSSGQQAVPRDALFKVVSGALSHISDSMTTVLLSDRVKRFNANAVASIDVDLRALEGFADDTYRVAGFLDLRKGTSFRECLAEVRQLTNLLLSNQPESFANPATREQSYGALDHKKVAIICDKFKDAPDSLFGSLSGRGTVQSARKKSLDVLKRRLKDFS

SEQ ID NO: 6747 - DNA, 939 bp, Zea mays subsp. mays
  misc_feature (1)..(939): Ceres Seq. ID no. 12408448
  misc_feature (1)..(939): Ortholog of  Ceres SEQ ID NO 12623585 as cited in SEQ ID NO 60992
  misc_feature (1)..(939): Ortholog of  Ceres SEQ ID NO 12625545 as cited in SEQ ID NO 63154
agttccatcttccgctcactcccttcatcgcgctcggcacacaggcgacggcggcggagctcatgctagggctctcagcgaaggcatcagctgcttcccctcccgcctctcgccaatcgcctcccgtcctccgcacaccggccggtgatcctgcgtcttttcattcgtaaatcatactccaggtatctgcatcgcaggggaaatggcaagcaaagcaggtggtgatggcaaagaagccataaacgagcaagtagttgccaacacttatgccaacatgcgtaccgaaatgaaccagctctataccaagatcacagagctggagatggaggtcagtgagcactccctcgtgattggtgcgatcgagccgctggacccctcaaggcgctgttacaggatgattggtggggtcctggttgaaaggaccatcaaggaagtcctgcctgctgtgaagcgcaacaaggagggccttgaagaagtgattgctcgcatgcatgaggcactggagaggaagaagaaagagatcaccgagtttgagcttaagtacaagatcaggatccggaaggctgacaatgacgcagaggacgaaggcggcaagaaggaaggcactgcacagggagtccttgttgggcctgctggacagtaaaacttaattagatggattttgtgtaaaagatgaggaccgatgtgaactgaagtagtttctttgttacctcttcgggtgctgcagcaatccaagtttctgtttgttattgatgacacatcgcaaatctcccaggactagaatctctgttcgtgattccttttactatattctcaaaataattgtggattagtcatctgcatgacttcatttcaactgatgctgaaatattgtggtgcttggtggctggtaaattcctgtaattgagctgtttcaatggcataccagcttgttgttcc

SEQ ID NO: 6748 - protein, 146 aa, Zea mays subsp. mays
  peptide (1)..(146): Ceres Seq. ID no. 12408449
MASKAGGDGKEAINEQVVANTYANMRTEMNQLYTKITELEMEVSEHSLVIGAIEPLDPSRRCYRMIGGVLVERTIKEVLPAVKRNKEGLEEVIARMHEALERKKKEITEFELKYKIRIRKADNDAEDEGGKKEGTAQGVLVGPAGQ

SEQ ID NO: 6749 - protein, 122 aa, Zea mays subsp. mays
  peptide (1)..(122): Ceres Seq. ID no. 12408450
MRTEMNQLYTKITELEMEVSEHSLVIGAIEPLDPSRRCYRMIGGVLVERTIKEVLPAVKRNKEGLEEVIARMHEALERKKKEITEFELKYKIRIRKADNDAEDEGGKKEGTAQGVLVGPAGQ

SEQ ID NO: 6750 - protein, 118 aa, Zea mays subsp. mays
  peptide (1)..(118): Ceres Seq. ID no. 12408451
MNQLYTKITELEMEVSEHSLVIGAIEPLDPSRRCYRMIGGVLVERTIKEVLPAVKRNKEGLEEVIARMHEALERKKKEITEFELKYKIRIRKADNDAEDEGGKKEGTAQGVLVGPAGQ

SEQ ID NO: 6751 - DNA, 1864 bp, Zea mays subsp. mays
  misc_feature (1)..(1864): Ceres Seq. ID no. 12407713
  misc_feature (1)..(1864): Ortholog of  Ceres SEQ ID NO 15169603 as cited in SEQ ID NO 65772
  misc_feature (1)..(1864): Ortholog of  Ceres SEQ ID NO 14308003 as cited in SEQ ID NO 65919
  misc_feature (1)..(1864): Ortholog of  Ceres SEQ ID NO 14303087 as cited in SEQ ID NO 66569
atcgtcattgcttgctccatgtggagtcactttattactgcattacactagctagctagctagccacagccagcttcatcttcacgtcgattcgatccatcggtgctgtgtgtaccgtacgccagcttgctgatccatcgccggccgacgatggaggtgagcacgtgggtgatgctggtggcggccgccgccgcggtacatggcgtggttctggcggctgtcgcgggggctcagcgggccgcgggtgtggccggtgctcggcagcctgccggggctggtgcagcacgccgaggacatgcacgagtggatcgtgggcaacctgcgccgcacgggaggcacctaccagacctgcatcttcgcggtgcccggggtggctcgccgcgggcgggctggtcacggtcacgtgcgaccctcgcaacctggagcacgtcctcaaggcgcgcttcgacaactaccccaagggccccttctggcacgccgtcttccgggacctgctcggcgacggcatcttcaactccgacggcgacacgtgggtggcgcagcgcaagacggccgcgctcgagttcaccacgcgcacgctacgcacggccatgtcccgctgggtgtcgcgctccatccacctcaggctgctgcccatcctggacgaggcggccaccgagaagacgcacgtcgacctccaggacctcctcctccgcctcaccttcgacaacatctgcggcctcgcgttcggcaaggaccccgagacgctcgcgccgggcctgccggagaacgcattcgccacggcgttcgaccgcgccacggaggcgacgctcaaccggttcatattccccgagtgcctgtggcggtgcaagaagtggctgggcctcggcatggagagcacgctggccccgcagcgtcgcgcacgtggaccagtacctcgccgccgtcatcaaggcgcgcaagcttgagctcgccggcaacggcaagtgcgacgcgccggcgcacgacgacctgctgtctcggttcatgcgcaagggctcctattcggacgagtcgctgcagcacgtggcgctcaacttcatcctcgccggccgcgacacctcctccgtggcgctctcctggttcttctggctcgtgtccacgcacccggacgtggagcgccagatcgtactcgagctgtgcgccgcgctcgccgcgtcccgcggctcccacgacccggcattgtggctggcgtcgccactcacgttcgaggagctggaccgcctggtctacctcaaggcggcgctctcggagaccctgcgcctgtacccgtccgttcccgaggactccaagcacgtcgtggccgacgactacctccccgacggcacgttcgtccccggcggggtcgtcggtgacctactccatctactcggccgggcgcatgaagacggtgtggggggaggactgcctcgagttccgccccgagcggtggttgtccgccgacggcacccggttcgagccgcacgactcgtaccggttcgtggcgttcaacgccgggccgaggatctgcctcggtaaggacctcgcgtacctgcagatgaagaacatcgccggcagcgtgctcctgcgccaccgcctggccgtcgcgcggggccaccgcgtggagcagaagatgtcgctgacgctgttcatgaagcacgggctccggatggaggtgcacccgcgcgacctggccccggtcatcgatgagctccgtggcgcgggcgcggcaaggccggccatggcgccatgctgcgcgtagaagatcccccctccgtgctgcgggggagacgctgggaattcaatgtgtagataagcgtacaagtacaagacaggagtaaagtaaaaattaaatgggtttggtgag

SEQ ID NO: 6752 - protein, 519 aa, Zea mays subsp. mays
  peptide (1)..(519): Ceres Seq. ID no. 12407714
MAWFWRLSRGLSGPRVWPVLGSLPGLVQHAEDMHEWIVGNLRRTGGTYQTCIFAVPGVARRGRAGHGHVRPSQPGARPQGALRQLPQGPLLARRLPGPARRRHLQLRRRHVGGAAQDGRARVHHAHATHGHVPLGVALHPPQAAAHPGRGGHREDARRPPGPPPPPHLRQHLRPRVRQGPRDARAGPAGERIRHGVRPRHGGDAQPVHIPRVPVAVQEVAGPRHGEHAGPAASRTWTSTSPPSSRRASLSSPATASATRRRTTTCCLGSCARAPIRTSRCSTWRSTSSSPAATPPPWRSPGSSGSCPRTRTWSARSYSSCAPRSPRPAAPTTRHCGWRRHSRSRSWTAWSTSRRRSRRPCACTRPFPRTPSTSWPTTTSPTARSSPAGSSVTYSIYSAGRMKTVWGEDCLEFRPERWLSADGTRFEPHDSYRFVAFNAGPRICLGKDLAYLQMKNIAGSVLLRHRLAVARGHRVEQKMSLTLFMKHGLRMEVHPRDLAPVIDELRGAGAARPAMAPCCA

SEQ ID NO: 6753 - protein, 487 aa, Zea mays subsp. mays
  peptide (1)..(487): Ceres Seq. ID no. 12407715
MHEWIVGNLRRTGGTYQTCIFAVPGVARRGRAGHGHVRPSQPGARPQGALRQLPQGPLLARRLPGPARRRHLQLRRRHVGGAAQDGRARVHHAHATHGHVPLGVALHPPQAAAHPGRGGHREDARRPPGPPPPPHLRQHLRPRVRQGPRDARAGPAGERIRHGVRPRHGGDAQPVHIPRVPVAVQEVAGPRHGEHAGPAASRTWTSTSPPSSRRASLSSPATASATRRRTTTCCLGSCARAPIRTSRCSTWRSTSSSPAATPPPWRSPGSSGSCPRTRTWSARSYSSCAPRSPRPAAPTTRHCGWRRHSRSRSWTAWSTSRRRSRRPCACTRPFPRTPSTSWPTTTSPTARSSPAGSSVTYSIYSAGRMKTVWGEDCLEFRPERWLSADGTRFEPHDSYRFVAFNAGPRICLGKDLAYLQMKNIAGSVLLRHRLAVARGHRVEQKMSLTLFMKHGLRMEVHPRDLAPVIDELRGAGAARPAMAPCCA

SEQ ID NO: 6754 - protein, 461 aa, Zea mays subsp. mays
  peptide (1)..(461): Ceres Seq. ID no. 12407716
MEVSTWVMLVAAAAAVHGVVLAAVAGAQRAAGVAGARQPAGAGAARRGHARVDRGQPAPHGRHLPDLHLRGARGGSPRAGWSRSRATLATWSTSSRRASTTTPRAPSGTPSSGTCSATASSTPTATRGWRSARRPRSSSPRARYARPCPAGCRAPSTSGCCPSWTRRPPRRRTSTSRTSSSASPSTTSAASRSARTPRRSRRACRRTHSPRRSTAPRRRRSTGSYSPSACGGARSGWASAWRARWPRSVAHVDQYLAAVIKARKLELAGNGKCDAPAHDDLLSRFMRKGSYSDESLQHVALNFILAGRDTSSVALSWFFWLVSTHPDVERQIVLELCAALAASRGSHDPALWLASPLTFEELDRLVYLKAALSETLRLYPSVPEDSKHVVADDYLPDGTFVPGGVVGDLLHLLGRAHEDGVGGGLPRVPPRAVVVRRRHPVRAARLVPVRGVQRRAEDLPR

SEQ ID NO: 6755 - DNA, 1234 bp, Zea mays subsp. mays
  misc_feature (1)..(1234): Ceres Seq. ID no. 12340896
  misc_feature (1)..(1234): Ortholog of  Ceres SEQ ID NO 14303051 as cited in SEQ ID NO 66608
accgcttccggttccggatccgaatctcgccctcccctctctttcttgcctccaggtccggccgtccgggcggcgccgggaggagagaatggcctccacggcgtcgccgccggtgttcgagagggtggccgggatccgagccattgccgagtccggccgcttcaaggcatggttgctggaccagtttggcgttcttcatgacgggaagaagccgtaccccggcgccattctggcattggagaagctagcggagaatggggcaaagatggtgataatcagcaattcctctaggcggtcatctgtgacaatgaagaagctcaagagcctggggttcgacacgtcctgtttcctcgcgaccatcaccagtggggagctcacacatcagcaccttcagaagagagacgacccatggtttgctgctcttggaaggaagtgtatccatatcacttgggacgatcgaggggcaatttctctcgagggccttggtttgcaagttgtgaacaatgttgatgatgcagagttcatattagcccacggtactgaagctcttggctcaccttctggtgttcctcttcccaaaagtcttgaggagcttgagcaggttctaatgcttggcatagaaaagcgacttccaatggtggtagctaatccagattatgtcactgtcgaagctcgagatctccgtgtcatgcctggcactctggcagctaaatatgagagtcttggtggtgaagtgaaatggatggggaagcctgataaggtgatctatacatcagcgatgtccctagcgggcgttgatgcccgtgaatgtatcatggtgggtgattcgctgcaccacgacatcaaaggagccaatgcgtcagggatggcatccgcgttcgtcactggaggggtccatgcggacgaacttggactcggtgaatttggagaaactgctggggaggatgctgtcagttcgctgtgcagcaagcacggatcgtacccttcttatgttctgccttcattcgcgtggtagagatgcggcctagattttttttttttgttttaggtgcacgggaaagtgattttaggcagatattgttgttatggaaataagtgccacgcaatgatcaagccgctggaggtgtcattcttcttaataaataataagtgacacgcaatgctcaagccgctggaggcagatttgtatttgcatttgtagtgtgtgtgtgtctatatatgctgcctgtggtgt

SEQ ID NO: 6756 - protein, 337 aa, Zea mays subsp. mays
  peptide (1)..(337): Ceres Seq. ID no. 12340897
PLPVPDPNLALPSLSCLQVRPSGRRREERMASTASPPVFERVAGIRAIAESGRFKAWLLDQFGVLHDGKKPYPGAILALEKLAENGAKMVIISNSSRRSSVTMKKLKSLGFDTSCFLATITSGELTHQHLQKRDDPWFAALGRKCIHITWDDRGAISLEGLGLQVVNNVDDAEFILAHGTEALGSPSGVPLPKSLEELEQVLMLGIEKRLPMVVANPDYVTVEARDLRVMPGTLAAKYESLGGEVKWMGKPDKVIYTSAMSLAGVDARECIMVGDSLHHDIKGANASGMASAFVTGGVHADELGLGEFGETAGEDAVSSLCSKHGSYPSYVLPSFAW

SEQ ID NO: 6757 - protein, 308 aa, Zea mays subsp. mays
  peptide (1)..(308): Ceres Seq. ID no. 12340898
MASTASPPVFERVAGIRAIAESGRFKAWLLDQFGVLHDGKKPYPGAILALEKLAENGAKMVIISNSSRRSSVTMKKLKSLGFDTSCFLATITSGELTHQHLQKRDDPWFAALGRKCIHITWDDRGAISLEGLGLQVVNNVDDAEFILAHGTEALGSPSGVPLPKSLEELEQVLMLGIEKRLPMVVANPDYVTVEARDLRVMPGTLAAKYESLGGEVKWMGKPDKVIYTSAMSLAGVDARECIMVGDSLHHDIKGANASGMASAFVTGGVHADELGLGEFGETAGEDAVSSLCSKHGSYPSYVLPSFAW

SEQ ID NO: 6758 - protein, 249 aa, Zea mays subsp. mays
  peptide (1)..(249): Ceres Seq. ID no. 12340899
MVIISNSSRRSSVTMKKLKSLGFDTSCFLATITSGELTHQHLQKRDDPWFAALGRKCIHITWDDRGAISLEGLGLQVVNNVDDAEFILAHGTEALGSPSGVPLPKSLEELEQVLMLGIEKRLPMVVANPDYVTVEARDLRVMPGTLAAKYESLGGEVKWMGKPDKVIYTSAMSLAGVDARECIMVGDSLHHDIKGANASGMASAFVTGGVHADELGLGEFGETAGEDAVSSLCSKHGSYPSYVLPSFAW

SEQ ID NO: 6759 - DNA, 380 bp, Zea mays subsp. mays
  misc_feature (1)..(380): Ceres Seq. ID no. 12387203
  misc_feature (1)..(380): Ortholog of  Ceres SEQ ID NO 15171249 as cited in SEQ ID NO 52276
gagcttgcgaccccaccgacacacacagcagggaagcgaggggaaggagaggcaaggcggcgcggccagcggcccaggatatctgcgcgtgcgatcccgaggaggcgtcggcgaggtgggatgatatcgcagttcttcgttctgtcgcagcgcggcgaccacatcgtcttccgcgactatcgcggcgaggtgcccaagggaagcgcggagatcttcttccggaaggtcaagttctggaacgacgacgaggcagaggaggcgcccccggtcttcaatgtcgatggggttaactatattcatgtcaaagtcgctggactattttttgtggtaaccacaatggttaatgtctccccatcccttctcttggagcttcttcaaag

SEQ ID NO: 6760 - protein, 126 aa, Zea mays subsp. mays
  peptide (1)..(126): Ceres Seq. ID no. 12387204
ELATPPTHTAGKRGEGEARRRGQRPRISARAIPRRRRRGGMISQFFVLSQRGDHIVFRDYRGEVPKGSAEIFFRKVKFWNDDEAEEAPPVFNVDGVNYIHVKVAGLFFVVTTMVNVSPSLLLELLQ

SEQ ID NO: 6761 - protein, 95 aa, Zea mays subsp. mays
  peptide (1)..(95): Ceres Seq. ID no. 12387205
ACDPTDTHSREARGRRGKAARPAAQDICACDPEEASARWDDIAVLRSVAARRPHRLPRLSRRGAQGKRGDLLPEGQVLERRRGRGGAPGLQCRWG

SEQ ID NO: 6762 - protein, 86 aa, Zea mays subsp. mays
  peptide (1)..(86): Ceres Seq. ID no. 12387206
MISQFFVLSQRGDHIVFRDYRGEVPKGSAEIFFRKVKFWNDDEAEEAPPVFNVDGVNYIHVKVAGLFFVVTTMVNVSPSLLLELLQ

SEQ ID NO: 6763 - DNA, 1591 bp, Zea mays subsp. mays
  misc_feature (1)..(1591): Ceres Seq. ID no. 12595094
  misc_feature (1)..(1591): Ortholog of  Ceres SEQ ID NO 14308851 as cited in SEQ ID NO 55618
tcattcggcctatcacaaccacttactctcgtgcgctctccgtgggagcgaggactcgcggccggcggcagcggcaggttctcctagatctccggcatcatcagtaacaaatggctgacggtgaggacattcagccccttgtttgtgacaatggaactggcatggtcaaggctggttttgctggtgacgatgcgccaagggctgttttcccaagcattgtcggacgcccccgtcacactggtgtgatggttggcatggggcagaaggatgcgtatgttggtgacgaggcccagtccaagaggggtatcctgactttgaagtaccccatcgaacatggtattgttagcaattgggatgacatggagaagatctggcaccacaccttctataatgaactccgtgtggcgcctgaagagcaccctgtgctgctgacggaagccccactcaaccccaaagctaacagggagaagatgacccaaatcatgtttgagaccttcaatgttcctgccatgtatgtcgccatccaggctgtgctttccctgtacgccagtgggcgtacaactggtattgtgttggactctggtgatggtgtcagccacaccgtgccaatctacgaaggttatgcccttcctcatgccatcctgcgtcttgaccttgctgggcgtgacctgactgacagcctgatgaagatcctcaccgagagaggttactccttcaccaccacggccgaacgggaaatcgtacgggacatcaaggaaaagcttgcatacgtggctcttgactatgatcaggagctggagaacgccaagagcagctcatctgtggagaagagctacgagctgcctgatggccaggtgatcaccattggggcggagaggttccgatgccccgaggtcctcttccagccttccttcattggtatggaagctcctggcatccatgagaccacctacaactccatcatgaaatgcgacgtggatatcaggaaggacttgtatggtaacattgttctcagtggtggcacaaccatgttccctggcatcgctgaccgtatgagcaaggagatcaccgcccttgccccgagcagcatgaaaatcaaggtggtggctccacccgagaggaaatacagtgtctggataggagggtccatccttgcctccctgagcaccttccaacagatgtggatctcaaaggctgagtacgatgagtcaggaccagcgattgttcaccggaagtgcttctaagctcaagggcccccttcgtccccattctatgtattcctttccttgagtgcttttcttataagctactatgtttgagattgccggcctttgagcaggcaatgttgttggatctgtatcttgtggatcactacaatgcatgcgttgctccatcttcttttcatgccaagtttgctgtcatacttgctagtggggaaaacaacaatgacaacagtggtgagaacagcaaccacaaaaaaagagaggatggaaattattgaagttcctaggatcgtattgtaactgtacttgtgcgagtaacattattggttctctttgtatatccatctctgagacatgcaattcttttt

SEQ ID NO: 6764 - protein, 377 aa, Zea mays subsp. mays
  peptide (1)..(377): Ceres Seq. ID no. 12595095
MADGEDIQPLVCDNGTGMVKAGFAGDDAPRAVFPSIVGRPRHTGVMVGMGQKDAYVGDEAQSKRGILTLKYPIEHGIVSNWDDMEKIWHHTFYNELRVAPEEHPVLLTEAPLNPKANREKMTQIMFETFNVPAMYVAIQAVLSLYASGRTTGIVLDSGDGVSHTVPIYEGYALPHAILRLDLAGRDLTDSLMKILTERGYSFTTTAEREIVRDIKEKLAYVALDYDQELENAKSSSSVEKSYELPDGQVITIGAERFRCPEVLFQPSFIGMEAPGIHETTYNSIMKCDVDIRKDLYGNIVLSGGTTMFPGIADRMSKEITALAPSSMKIKVVAPPERKYSVWIGGSILASLSTFQQMWISKAEYDESGPAIVHRKCF

SEQ ID NO: 6765 - protein, 360 aa, Zea mays subsp. mays
  peptide (1)..(360): Ceres Seq. ID no. 12595096
MVKAGFAGDDAPRAVFPSIVGRPRHTGVMVGMGQKDAYVGDEAQSKRGILTLKYPIEHGIVSNWDDMEKIWHHTFYNELRVAPEEHPVLLTEAPLNPKANREKMTQIMFETFNVPAMYVAIQAVLSLYASGRTTGIVLDSGDGVSHTVPIYEGYALPHAILRLDLAGRDLTDSLMKILTERGYSFTTTAEREIVRDIKEKLAYVALDYDQELENAKSSSSVEKSYELPDGQVITIGAERFRCPEVLFQPSFIGMEAPGIHETTYNSIMKCDVDIRKDLYGNIVLSGGTTMFPGIADRMSKEITALAPSSMKIKVVAPPERKYSVWIGGSILASLSTFQQMWISKAEYDESGPAIVHRKCF

SEQ ID NO: 6766 - protein, 332 aa, Zea mays subsp. mays
  peptide (1)..(332): Ceres Seq. ID no. 12595097
MVGMGQKDAYVGDEAQSKRGILTLKYPIEHGIVSNWDDMEKIWHHTFYNELRVAPEEHPVLLTEAPLNPKANREKMTQIMFETFNVPAMYVAIQAVLSLYASGRTTGIVLDSGDGVSHTVPIYEGYALPHAILRLDLAGRDLTDSLMKILTERGYSFTTTAEREIVRDIKEKLAYVALDYDQELENAKSSSSVEKSYELPDGQVITIGAERFRCPEVLFQPSFIGMEAPGIHETTYNSIMKCDVDIRKDLYGNIVLSGGTTMFPGIADRMSKEITALAPSSMKIKVVAPPERKYSVWIGGSILASLSTFQQMWISKAEYDESGPAIVHRKCF

SEQ ID NO: 6767 - DNA, 725 bp, Zea mays subsp. mays
  misc_feature (1)..(725): Ceres Seq. ID no. 12403489
  misc_feature (1)..(725): Ortholog of  Ceres SEQ ID NO 12623748 as cited in SEQ ID NO 61143
aaaccaacatctgggcaaggaacagataaggactgcaaaccttgtcagggcttcggggacagccaaagaagacggacggacccagtgaggcgagcacgggcgctcaccggcgatggcgacgagggcatgggtggccgcggcggtggccttgaaccctcaactgctgcctctccgctcctgctcgcccacgcagtcggtctccccagcgcagcgctcgccgtcgatggggctccggctgcgcagcggccggccgtgcctggggaagttcgtgtgccgccgcgccaagaacgcgggatacgaggactacaagttcccggaccccatcccggagttcgccgagcaggagacgagcaagttcagggagcacatggcgtggcggctggagcagaagaaagaggactacttcggggaccatgtcgaggagatcgttgacgtctgcaccgagatcttggggacattcctggagaacgattaccgtggaccagggacgctcctggttcacccgttcctggacatgaagggcgagatcaaggagagggggctccccggcgcacctcaggcggcacgggcggcgatagcatgggccgaaaagaacgtggataaggactggaaggcctggactggggaatactagcactagttatgttgtttgacgttcccagcagctagctattgtgacacaaaattttgtccgcttcaaatgttcctctgtctgtcgtcatgcc

SEQ ID NO: 6768 - protein, 173 aa, Zea mays subsp. mays
  peptide (1)..(173): Ceres Seq. ID no. 12403490
MATRAWVAAAVALNPQLLPLRSCSPTQSVSPAQRSPSMGLRLRSGRPCLGKFVCRRAKNAGYEDYKFPDPIPEFAEQETSKFREHMAWRLEQKKEDYFGDHVEEIVDVCTEILGTFLENDYRGPGTLLVHPFLDMKGEIKERGLPGAPQAARAAIAWAEKNVDKDWKAWTGEY

SEQ ID NO: 6769 - protein, 143 aa, Zea mays subsp. mays
  peptide (1)..(143): Ceres Seq. ID no. 12403491
KPTSGQGTDKDCKPCQGFGDSQRRRTDPVRRARALTGDGDEGMGGRGGGLEPSTAASPLLLAHAVGLPSAALAVDGAPAAQRPAVPGEVRVPPRQERGIRGLQVPGPHPGVRRAGDEQVQGAHGVAAGAEERGLLRGPCRGDR

SEQ ID NO: 6770 - protein, 136 aa, Zea mays subsp. mays
  peptide (1)..(136): Ceres Seq. ID no. 12403492
MGLRLRSGRPCLGKFVCRRAKNAGYEDYKFPDPIPEFAEQETSKFREHMAWRLEQKKEDYFGDHVEEIVDVCTEILGTFLENDYRGPGTLLVHPFLDMKGEIKERGLPGAPQAARAAIAWAEKNVDKDWKAWTGEY

SEQ ID NO: 6771 - DNA, 1033 bp, Zea mays subsp. mays
  misc_feature (1)..(1033): Ceres Seq. ID no. 12401239
  misc_feature (1)..(1033): Ortholog of  Ceres SEQ ID NO 15224558 as cited in SEQ ID NO 58612
gaatgaaggtctgaaaaaaatcacagaactcactcgaacgacggtgccgccgcttgcctcgcctgaccatggccgctgtgccgtcgaggttcctcctcgtcactggcccgccgggcgtggggaagacgacgctggtcatgcgggtgtttgaaaccctcagaggctcccacccgaacctcaacattcgcggattctatacccgagaggtgagagagggcggagaaaggataggattcgaggttgtcacgctagacggtagaactggaccactttcctcatgcaaggtttccagcccggagtctgttagatggcctaccgtcgggaaatacaaagtagacgtagcatccttggaatcattagcagtacctgagctgcaggttaaggaagaaacagatctcttcatcattgacgaagtgggtaaaatggagctgttcagttcagcatttttccctgcggtaatgagagttattgaatccaatataccagtgttggccaccataccgattcctaggcagggccgggacattccaggagttgcgaggttgcggaatcatcctggagcagctgttttcaccttagacactggtaacagagatacgatgagagatactatctgcagtcagttaaggagtttgttgcagaagaggtgatctgctagcctcccttcgtctctgcggccgctgctttgtctgacataacacacatacgataaagagtagaagttttctctcagcatgatctcatattctgcaacagaacatgcggtcgagtcttctggtgcagtacctgaaatacctgttttaaagcttaccgagcagtgaatggcaggcagattactatgttgctgtgctcagatggttagctctggatgaacaataagcatgtcgtccagtttgttctgagttacgtatgtgtggctattcagtcatgtatttgcattcggtgggggcaaggttttattgccacaataactctcgcttgtatggatgcggttagcatgtagtgactctacaacaggtatcacatgatttgc

SEQ ID NO: 6772 - protein, 193 aa, Zea mays subsp. mays
  peptide (1)..(193): Ceres Seq. ID no. 12401240
MAAVPSRFLLVTGPPGVGKTTLVMRVFETLRGSHPNLNIRGFYTREVREGGERIGFEVVTLDGRTGPLSSCKVSSPESVRWPTVGKYKVDVASLESLAVPELQVKEETDLFIIDEVGKMELFSSAFFPAVMRVIESNIPVLATIPIPRQGRDIPGVARLRNHPGAAVFTLDTGNRDTMRDTICSQLRSLLQKR

SEQ ID NO: 6773 - protein, 170 aa, Zea mays subsp. mays
  peptide (1)..(170): Ceres Seq. ID no. 12401241
MRVFETLRGSHPNLNIRGFYTREVREGGERIGFEVVTLDGRTGPLSSCKVSSPESVRWPTVGKYKVDVASLESLAVPELQVKEETDLFIIDEVGKMELFSSAFFPAVMRVIESNIPVLATIPIPRQGRDIPGVARLRNHPGAAVFTLDTGNRDTMRDTICSQLRSLLQKR

SEQ ID NO: 6774 - DNA, 997 bp, Zea mays subsp. mays
  misc_feature (1)..(997): Ceres Seq. ID no. 12404376
  misc_feature (1)..(997): Ortholog of  Ceres SEQ ID NO 13594918 as cited in SEQ ID NO 55747
  misc_feature (1)..(997): Ortholog of  Ceres SEQ ID NO 12587066 as cited in SEQ ID NO 63204
gcacgagaccattacctagaacatcctaatcgaaaaattatttataagccatttgcattgcgctccagcttgggagcaaaggcaaagcagccaacaacaatcagaggcaacgaagctcgcgaatcgagagcgccgggaacaacaacaagaagaagatgatgataatggagcaggaggaggaggcgtgctcgacttgttgctcctctccgctgcggcagtgcaggatttgccatgacgaggaggacgagcggcgctccgccatggagtcgccctgcgcctgctccggttccctcaagtatgctcacaggggatgcgtgcagagatggtgcgacgagaagggcagcaccgtctgcgagatttgccttcagaacttcgagacgggctacaccgttcctcccaagaaaacccaaccagctgatgtcgcggtgaccatcagagacagcgtggcggtacccaggcagcagaacgagcccgaggacgaggaggagcaggtggccgcggcgctgataggagccagcgatccggagtacgccgagtgcgcccgcgccgccggcaggagcgcgtcctggtcctgctgccgctccgtggccgtcacgttcacgattgtcctgctgctgaggcacctggtcaccgtggtgacgctcggagcggccaaccagcagcagttcgccttcagcctcctcacagtgtacttgctgcgggcgagcgggatcttgcttccgttctacgttgtcatgaggctcatctgcgtgatccatcagggacagaggcagtaccggctgcatctgcttcaggagcagaggagacacgcgttgaggcggttggcctggctgcacggccagggacagcaccagcaaccgcatgccattctggttcgttgaggaacaaggcattcgtctagtgctcatacgctcgttcatccaaccatccatcacgtacaagactgtaaatttgtaaaagggacaaaataaagaagaaacggagaaagaaaggtggc

SEQ ID NO: 6775 - protein, 241 aa, Zea mays subsp. mays
  peptide (1)..(241): Ceres Seq. ID no. 12404377
MMIMEQEEEACSTCCSSPLRQCRICHDEEDERRSAMESPCACSGSLKYAHRGCVQRWCDEKGSTVCEICLQNFETGYTVPPKKTQPADVAVTIRDSVAVPRQQNEPEDEEEQVAAALIGASDPEYAECARAAGRSASWSCCRSVAVTFTIVLLLRHLVTVVTLGAANQQQFAFSLLTVYLLRASGILLPFYVVMRLICVIHQGQRQYRLHLLQEQRRHALRRLAWLHGQGQHQQPHAILVR

SEQ ID NO: 6776 - protein, 240 aa, Zea mays subsp. mays
  peptide (1)..(240): Ceres Seq. ID no. 12404378
MIMEQEEEACSTCCSSPLRQCRICHDEEDERRSAMESPCACSGSLKYAHRGCVQRWCDEKGSTVCEICLQNFETGYTVPPKKTQPADVAVTIRDSVAVPRQQNEPEDEEEQVAAALIGASDPEYAECARAAGRSASWSCCRSVAVTFTIVLLLRHLVTVVTLGAANQQQFAFSLLTVYLLRASGILLPFYVVMRLICVIHQGQRQYRLHLLQEQRRHALRRLAWLHGQGQHQQPHAILVR

SEQ ID NO: 6777 - protein, 238 aa, Zea mays subsp. mays
  peptide (1)..(238): Ceres Seq. ID no. 12404379
MEQEEEACSTCCSSPLRQCRICHDEEDERRSAMESPCACSGSLKYAHRGCVQRWCDEKGSTVCEICLQNFETGYTVPPKKTQPADVAVTIRDSVAVPRQQNEPEDEEEQVAAALIGASDPEYAECARAAGRSASWSCCRSVAVTFTIVLLLRHLVTVVTLGAANQQQFAFSLLTVYLLRASGILLPFYVVMRLICVIHQGQRQYRLHLLQEQRRHALRRLAWLHGQGQHQQPHAILVR

SEQ ID NO: 6778 - DNA, 974 bp, Zea mays subsp. mays
  misc_feature (1)..(974): Ceres Seq. ID no. 12402349
  misc_feature (1)..(974): Ortholog of  Ceres SEQ ID NO 14314327 as cited in SEQ ID NO 57354
acggatatcttcgccaaccgctgcgtcgcgagctcgccgccatggcattggctctccccctcgcccgcctcgtccccgcctgccagtgccaggcttggccccacctgcgctttcggaagcgccacgtctccttcgccgctcacgccagttctcgcgccgccttcgctgcctgcgcggcggcccctgccctccaggtccaggcgccggaggcggaggcggaggcggagacggtcgagcaagtgggcccgaagacacgcctcgtcgcgcagaacatcccgtgggactgcacggccgacgaaatgcgcgcgctcttcgagagccacggctccgtcgtcggcgtcgagctttcaatgtacagcgccaataaaaacagaggattggcgtttgtaaccatggggttcagaagaggaggctcttgcagctctcacccatctcaattcaactattttaaatgataggaaaataaaggtggacttcgcaaggcctagaaagaagcaacctaagcaacctgctgtggtatcggatgccacggaaaagtatgttgtgtttgtcgggaatttgacatggagggtaagaaatcgtcaccttcgggaattatttgcctctgccccaggtgtggtatcagctgaagttatcttccataccaccactccgagacgatctgctggctacgcgtttgtttctttttcttcgaaagagagcgcaggggccgccatatctgctttcaacggaaagatattgatgggacggcccattaacgtgatgttcaaagatgaaaatggtgaaaagaatgaatcttcttctgtcccaaagaaggccgaggtggaaccatctgatggccagagtgataagctaagcatgaactgttaacgaaacaaataggtcatatctgtcattacacaaatatatgtatattctgacccatggtatttccttttcagaaatagttatgtcccttgttttattgatttgtc

SEQ ID NO: 6779 - protein, 150 aa, Zea mays subsp. mays
  peptide (1)..(150): Ceres Seq. ID no. 12402350
GYLRQPLRRELAAMALALPLARLVPACQCQAWPHLRFRKRHVSFAAHASSRAAFAACAAAPALQVQAPEAEAEAETVEQVGPKTRLVAQNIPWDCTADEMRALFESHGSVVGVELSMYSANKNRGLAFVTMGFRRGGSCSSHPSQFNYFK

SEQ ID NO: 6780 - protein, 137 aa, Zea mays subsp. mays
  peptide (1)..(137): Ceres Seq. ID no. 12402351
MALALPLARLVPACQCQAWPHLRFRKRHVSFAAHASSRAAFAACAAAPALQVQAPEAEAEAETVEQVGPKTRLVAQNIPWDCTADEMRALFESHGSVVGVELSMYSANKNRGLAFVTMGFRRGGSCSSHPSQFNYFK

SEQ ID NO: 6781 - protein, 129 aa, Zea mays subsp. mays
  peptide (1)..(129): Ceres Seq. ID no. 12402352
TDIFANRCVASSPPWHWLSPSPASSPPASARLGPTCAFGSATSPSPLTPVLAPPSLPARRPLPSRSRRRRRRRRRRRSSKWARRHASSRRTSRGTARPTKCARSSRATAPSSASSFQCTAPIKTEDWRL

SEQ ID NO: 6782 - DNA, 1075 bp, Zea mays subsp. mays
  misc_feature (1)..(1075): Ceres Seq. ID no. 12353875
  misc_feature (1)..(1075): Ortholog of  Ceres SEQ ID NO 13647648 as cited in SEQ ID NO 20346
  misc_feature (1)..(1075): Ortholog of  Ceres SEQ ID NO 15179852 as cited in SEQ ID NO 66623
attgccaacgcaacagttccgatcctccacaccagcacccgccgccgccgcctcttcccttgcgcacctgctgctgtgcggatcggtgaggcggaggagtaggatggcgagcgcggccggaggcggagcggcgggggaaggggagtggcttaaggtatcccagctcaggcccatggtggaagcgcaggaccccaacgccaaggcagtggacaacctgacgctgcgtcggttcctgcgcgcgcgcgaccacgacgtggacaaggcctccgccatgttcctcaagttcctcaagtggcggagggaggcggcgcccggcggctccgtgccggaggagcaggtgaggagggagctgtcgcaggacaagctgtgcatgggcggcgtcgacagggccggccgccccatcctcgtcgccttcgcggccaggcacttctccgccggccgtgacatggcagagttcaagagttttgttgtctacttcttcgacaagatctgtgccagaatccccagagggcaggagaaattcctctgcatcgttgatctcaagggctgggggtactcaaactgtgacgtccgggcatacattgccgctatagagatcttgcagaactactacccggagcggctcggcaaggcgctgatgatccacgtgccctacatcttcatgaaggcgtggaagatgatctaccccttcatcgacaccaacaccagggacaagttcgtgttcgtggaggacaagagcctgcaggagacgctgcggcgggagatcgacgaggggcagctcccggagttcctcggcggcaagatggacgtgatcccactcaaggactatggcgtgcagcagcagcctcaggccgtgtaatagccatgccatgcgtagcatacacgagttgtggctaggagcatagcatggcaataactgtgtagctgctgtgaaagtgaaaatgaaacgttgcgctgtttagccgggtcaattgaccagcccaactgcagatctctgggctaccactatgaacagcaagaactgtttcccttatccttttcagccaaactaatcaaaccagaaaatgtttcttgt

SEQ ID NO: 6783 - protein, 285 aa, Zea mays subsp. mays
  peptide (1)..(285): Ceres Seq. ID no. 12353876
LPTQQFRSSTPAPAAAASSLAHLLLCGSVRRRSRMASAAGGGAAGEGEWLKVSQLRPMVEAQDPNAKAVDNLTLRRFLRARDHDVDKASAMFLKFLKWRREAAPGGSVPEEQVRRELSQDKLCMGGVDRAGRPILVAFAARHFSAGRDMAEFKSFVVYFFDKICARIPRGQEKFLCIVDLKGWGYSNCDVRAYIAAIEILQNYYPERLGKALMIHVPYIFMKAWKMIYPFIDTNTRDKFVFVEDKSLQETLRREIDEGQLPEFLGGKMDVIPLKDYGVQQQPQAV

SEQ ID NO: 6784 - protein, 251 aa, Zea mays subsp. mays
  peptide (1)..(251): Ceres Seq. ID no. 12353877
MASAAGGGAAGEGEWLKVSQLRPMVEAQDPNAKAVDNLTLRRFLRARDHDVDKASAMFLKFLKWRREAAPGGSVPEEQVRRELSQDKLCMGGVDRAGRPILVAFAARHFSAGRDMAEFKSFVVYFFDKICARIPRGQEKFLCIVDLKGWGYSNCDVRAYIAAIEILQNYYPERLGKALMIHVPYIFMKAWKMIYPFIDTNTRDKFVFVEDKSLQETLRREIDEGQLPEFLGGKMDVIPLKDYGVQQQPQAV

SEQ ID NO: 6785 - protein, 228 aa, Zea mays subsp. mays
  peptide (1)..(228): Ceres Seq. ID no. 12353878
MVEAQDPNAKAVDNLTLRRFLRARDHDVDKASAMFLKFLKWRREAAPGGSVPEEQVRRELSQDKLCMGGVDRAGRPILVAFAARHFSAGRDMAEFKSFVVYFFDKICARIPRGQEKFLCIVDLKGWGYSNCDVRAYIAAIEILQNYYPERLGKALMIHVPYIFMKAWKMIYPFIDTNTRDKFVFVEDKSLQETLRREIDEGQLPEFLGGKMDVIPLKDYGVQQQPQAV

SEQ ID NO: 6786 - DNA, 478 bp, Zea mays subsp. mays
  misc_feature (1)..(478): Ceres Seq. ID no. 13564651
  misc_feature (1)..(478): Ortholog of  Ceres SEQ ID NO 12784228 as cited in SEQ ID NO 66111
tatccctggtgctttgttctttgatgttgatggaatatccgacagaacatctagtttaccacacatgctgccatctgaaaaggcattttcagctgctgtatctgctcttggcatctacaacaaagacgggatagtagtttatgatggaaaggggctgttcagtgctgctcgtgtttggtggatgttccgtgtatttggacatgataaagtttgggtgttggatggaggtttgccccaatggcgcgcttctgggtatgatgttgaatcaagtccctctagtgatgccatcctaaaggccagtgcagctggtgaagcaattgagaaagtttaccagggtcaattggttggtccaaccacatttgaagcaaagttgcagcctcatcttctttggagtcttgatcaggtgaaagagaacatcaacacccagacacatcaacttatagatgctcgatcaaaacctagatttgatggtgcagtt

SEQ ID NO: 6787 - protein, 159 aa, Zea mays subsp. mays
  peptide (1)..(159): Ceres Seq. ID no. 13564652
IPGALFFDVDGISDRTSSLPHMLPSEKAFSAAVSALGIYNKDGIVVYDGKGLFSAARVWWMFRVFGHDKVWVLDGGLPQWRASGYDVESSPSSDAILKASAAGEAIEKVYQGQLVGPTTFEAKLQPHLLWSLDQVKENINTQTHQLIDARSKPRFDGAV

SEQ ID NO: 6788 - protein, 138 aa, Zea mays subsp. mays
  peptide (1)..(138): Ceres Seq. ID no. 13564653
MLPSEKAFSAAVSALGIYNKDGIVVYDGKGLFSAARVWWMFRVFGHDKVWVLDGGLPQWRASGYDVESSPSSDAILKASAAGEAIEKVYQGQLVGPTTFEAKLQPHLLWSLDQVKENINTQTHQLIDARSKPRFDGAV

SEQ ID NO: 6789 - protein, 99 aa, Zea mays subsp. mays
  peptide (1)..(99): Ceres Seq. ID no. 13564654
MFRVFGHDKVWVLDGGLPQWRASGYDVESSPSSDAILKASAAGEAIEKVYQGQLVGPTTFEAKLQPHLLWSLDQVKENINTQTHQLIDARSKPRFDGAV

SEQ ID NO: 6790 - DNA, 825 bp, Zea mays subsp. mays
  misc_feature (1)..(825): Ceres Seq. ID no. 12351160
  misc_feature (1)..(825): Ortholog of  Ceres SEQ ID NO 14303280 as cited in SEQ ID NO 1250
cacacatgacacaacgacaccaactgtcctcaatccagcagccctcgagtctcgtccccgcacatcagcagagagacgccactaccaccaccgcaagcgacgacggggagatgtttctgcgacggatcctgaccggcggaggtggcctggcggcgctgagggcggcgcgcgccgtgaaggagacgacggggatcgtcggccttgaggtggcgcccaacgcgcgggaggttctcatcgggctctacacgcgtacgctcaaggagatcgaggccgtccccaaagacgagggctaccgcaaggccgttgagtccttcaccaatcaccgcctccagatctgccaggaggaggacgactggaagcgcatcgaggaccgaatcggatgcgggcaagtcgaggagctcatcgaggaggccgaggacgagctcaagctcatcgccaaaatgattgaatgggatccgtggggtgtccctgatgactacgaatgtgaggtgattgaagacgacaccccaattcctaagcatgttcctcagcaccggcccgttgctcttcctgaggagttcttcaagacactagatgccgtcaaatcagatcccgccctccaaggcgatgctcctcctcaagtgaaggcgtaaagatgagtcttcccggttatgtcttatgtcatttcacactttgctgcgctgggtagggactagtttcttgtgccatttgccagcaatgtgcttgttccgagcagaataaatttctggcgagtaccatcgaagagtgactttgaacgaagtgattcgacacagtaaatttgttgttgtccatgaatacttgctc

SEQ ID NO: 6791 - protein, 209 aa, Zea mays subsp. mays
  peptide (1)..(209): Ceres Seq. ID no. 12351161
HMTQRHQLSSIQQPSSLVPAHQQRDATTTTASDDGEMFLRRILTGGGGLAALRAARAVKETTGIVGLEVAPNAREVLIGLYTRTLKEIEAVPKDEGYRKAVESFTNHRLQICQEEDDWKRIEDRIGCGQVEELIEEAEDELKLIAKMIEWDPWGVPDDYECEVIEDDTPIPKHVPQHRPVALPEEFFKTLDAVKSDPALQGDAPPQVKA

SEQ ID NO: 6792 - protein, 208 aa, Zea mays subsp. mays
  peptide (1)..(208): Ceres Seq. ID no. 12351162
MTQRHQLSSIQQPSSLVPAHQQRDATTTTASDDGEMFLRRILTGGGGLAALRAARAVKETTGIVGLEVAPNAREVLIGLYTRTLKEIEAVPKDEGYRKAVESFTNHRLQICQEEDDWKRIEDRIGCGQVEELIEEAEDELKLIAKMIEWDPWGVPDDYECEVIEDDTPIPKHVPQHRPVALPEEFFKTLDAVKSDPALQGDAPPQVKA

SEQ ID NO: 6793 - protein, 173 aa, Zea mays subsp. mays
  peptide (1)..(173): Ceres Seq. ID no. 12351163
MFLRRILTGGGGLAALRAARAVKETTGIVGLEVAPNAREVLIGLYTRTLKEIEAVPKDEGYRKAVESFTNHRLQICQEEDDWKRIEDRIGCGQVEELIEEAEDELKLIAKMIEWDPWGVPDDYECEVIEDDTPIPKHVPQHRPVALPEEFFKTLDAVKSDPALQGDAPPQVKA

SEQ ID NO: 6794 - DNA, 1034 bp, Zea mays subsp. mays
  misc_feature (1)..(1034): Ceres Seq. ID no. 12402506
  misc_feature (1)..(1034): Ortholog of  Ceres SEQ ID NO 12609185 as cited in SEQ ID NO 55761
  misc_feature (1)..(1034): Ortholog of  Ceres SEQ ID NO 12615291 as cited in SEQ ID NO 62444
atataatagggtagacgcccaactcgaacctgagtacctgagaaatggcggccgtctcctccacctcaaccgcctcctcctacttctccccgcagccgcagctgccgatctccaccgccgaccctgccgccagcaaaagtaggttgatgcggcagccacggcggagcagcagcttcgtgatggtggaggcgtcctctgccagcggcagcgacggcggggtggccaggacgaagagcctcacggaggacgacctggaggagctcaagggctgcctcgacctcggcttcggattcgcgtacagcgagatacccgagctctgcgggacgctgcccgcgctcgaactctgctactccatgacccggaggttcctcgacgagcagaaggcgccggggcaggaggaggaattggagcctgcgtcgccgccgctccccaattggaggatctctggcccgggtgacgatccagaagaagtgaaggcgaggttgaagtattgggctcaagctgttgcatgcactgtcaagctctgcagctaaactaaaggtcggatagaggctgaagaatctggttatatggttttgggatacagggagcggaaggggggggtgcttctgctctctggcatggaagcgacatgagtgatctcatctgcttctacaaaaaacttgggaagggggaggaaccatgatacggaacagggacagacctcgattcagaatttgagatccatggtctgagcttctacgagagggttcggaagccttgccattcctcagggtgggtggtctgcatagtgcagcgtttccaaatgcatgacctgctggttctttttgctgtttccttgtaatgatcaataggtgctctaattgtcgcactcttgtaataatgtactgaatcgaattttgagttttggccttttgggtactgatccaagggttgattagttccaacattggtttattttgtgctactctgatattgccatgtgcattatgctgttctacacgttcgtagaagttaatagcgcgtttggtttc

SEQ ID NO: 6795 - protein, 162 aa, Zea mays subsp. mays
  peptide (1)..(162): Ceres Seq. ID no. 12402507
MAAVSSTSTASSYFSPQPQLPISTADPAASKSRLMRQPRRSSSFVMVEASSASGSDGGVARTKSLTEDDLEELKGCLDLGFGFAYSEIPELCGTLPALELCYSMTRRFLDEQKAPGQEEELEPASPPLPNWRISGPGDDPEEVKARLKYWAQAVACTVKLCS

SEQ ID NO: 6796 - protein, 128 aa, Zea mays subsp. mays
  peptide (1)..(128): Ceres Seq. ID no. 12402508
MRQPRRSSSFVMVEASSASGSDGGVARTKSLTEDDLEELKGCLDLGFGFAYSEIPELCGTLPALELCYSMTRRFLDEQKAPGQEEELEPASPPLPNWRISGPGDDPEEVKARLKYWAQAVACTVKLCS

SEQ ID NO: 6797 - protein, 117 aa, Zea mays subsp. mays
  peptide (1)..(117): Ceres Seq. ID no. 12402509
MVEASSASGSDGGVARTKSLTEDDLEELKGCLDLGFGFAYSEIPELCGTLPALELCYSMTRRFLDEQKAPGQEEELEPASPPLPNWRISGPGDDPEEVKARLKYWAQAVACTVKLCS

SEQ ID NO: 6798 - DNA, 1252 bp, Zea mays subsp. mays
  misc_feature (1)..(1252): Ceres Seq. ID no. 15180749
  misc_feature (1)..(1252): Ortholog of  Ceres SEQ ID NO 15175965 as cited in SEQ ID NO 20627
acaacacaaccaagagccaacagagcaacgcccaggcacacacgacacgaaccaggcaaccagctgccgagggaggaaccctagcggaacactgtgcaggtgacggcggcgcgctaccggtgacgggggatacggcggcatcgtccccctcggcccctcctccatccccggcgcggcggcgccagcagccggcctgcaggttttgcaggtttcacacttcttatcatggatgataagaacaaagtcaagaaggaaatagatggcccccttggacccccacctcgcaaggggggacttaaattcgcaccaaaagtacctcagaagaaacctgccaaggttgtcccaaagaaggaaccggttgaagagagaaaggaggatgctttggataaggagttattgatgaaacttaagatgtcgcaaaacaagtatccctcaagaattaagtccgacgaaaagccaagaagtggtacacaggttgcatttggacaaggaaactcttattatgcaagaaattttcccatgcccaaaaaggattcttcagcaggtggagcttcgaagttaccaaaagaatatgcagaaccatgggactatagccatgattatcctgttactctcccactaaggaagccctactctggaaatcctgaaattctggatgaggaagaatttggagaatcttctgccagcaggacccaagatgatgaattatctgcagcagagcagcttggattaatggatatgtcgtcggaatcacagttcctcttcttccagttgccatcctctcttcctttaccgaggcagccacaatcaggtgctgaccctaacgaagtccgcgatgagaaacgtgaggacatgaggccatcatcgcacaatggctcgaaactcaaagaggttcctgaaggctatatggggaaaatgctcgtatataagagtggtaaagtgaagatgaagataggagacactctctttgatgtttcatttggctcgaattgcatgttttcccaggaggttgcagcaatcaacatcagagaaaaacattgctgtacggtgggagagatcagcaagcgtgctatcatcaccccagatattaactacatgttgggttctgttgacaagatggaagaatagtccattggtttctttcgcgcaaaccatatagaccatattatgccattacaagatagttttgctttcttatagagaacgacctgtgataccctctcagacttcttcaagaaaagatgcctcaaac

SEQ ID NO: 6799 - protein, 300 aa, Zea mays subsp. mays
  peptide (1)..(300): Ceres Seq. ID no. 15180750
MDDKNKVKKEIDGPLGPPPRKGGLKFAPKVPQKKPAKVVPKKEPVEERKEDALDKELLMKLKMSQNKYPSRIKSDEKPRSGTQVAFGQGNSYYARNFPMPKKDSSAGGASKLPKEYAEPWDYSHDYPVTLPLRKPYSGNPEILDEEEFGESSASRTQDDELSAAEQLGLMDMSSESQFLFFQLPSSLPLPRQPQSGADPNEVRDEKREDMRPSSHNGSKLKEVPEGYMGKMLVYKSGKVKMKIGDTLFDVSFGSNCMFSQEVAAINIREKHCCTVGEISKRAIITPDINYMLGSVDKMEE

SEQ ID NO: 6800 - protein, 242 aa, Zea mays subsp. mays
  peptide (1)..(242): Ceres Seq. ID no. 15180751
MKLKMSQNKYPSRIKSDEKPRSGTQVAFGQGNSYYARNFPMPKKDSSAGGASKLPKEYAEPWDYSHDYPVTLPLRKPYSGNPEILDEEEFGESSASRTQDDELSAAEQLGLMDMSSESQFLFFQLPSSLPLPRQPQSGADPNEVRDEKREDMRPSSHNGSKLKEVPEGYMGKMLVYKSGKVKMKIGDTLFDVSFGSNCMFSQEVAAINIREKHCCTVGEISKRAIITPDINYMLGSVDKMEE

SEQ ID NO: 6801 - protein, 238 aa, Zea mays subsp. mays
  peptide (1)..(238): Ceres Seq. ID no. 15180752
MSQNKYPSRIKSDEKPRSGTQVAFGQGNSYYARNFPMPKKDSSAGGASKLPKEYAEPWDYSHDYPVTLPLRKPYSGNPEILDEEEFGESSASRTQDDELSAAEQLGLMDMSSESQFLFFQLPSSLPLPRQPQSGADPNEVRDEKREDMRPSSHNGSKLKEVPEGYMGKMLVYKSGKVKMKIGDTLFDVSFGSNCMFSQEVAAINIREKHCCTVGEISKRAIITPDINYMLGSVDKMEE

SEQ ID NO: 6802 - DNA, 1636 bp, Zea mays subsp. mays
  misc_feature (1)..(1636): Ceres Seq. ID no. 12409017
  misc_feature (1)..(1636): Ortholog of  Ceres SEQ ID NO 14314449 as cited in SEQ ID NO 52409
  misc_feature (1)..(1636): Ortholog of  Ceres SEQ ID NO 15177818 as cited in SEQ ID NO 59762
ccccaaaccctaccgccgatccggccccagatcgccatggccgcgcccaacagcaatgacgccgccagcgccagcggcaccggcccggctggcgaggaggacatctccatcgaggcgttggcgcggcgcgtgcaagagcacatgaccctcaactcgaaccccgccgctcgccgccacaagttctgggagacacagcccgtcggccagttccgcgacgccgccgacgcatcgctaccgaacggccccatcgagccgcccacgccactctccgaggtgcgcgccgacccctacccactgcccgccgccttcgagtggctcacctgcgacctcgatgacgacgcgctcctcgccgacctctactcgttgctcgcccacaactacgtcgaggatgacgagaacatgttccgcttcaactactccccggccttcctccgctgggcgctcaagccgccgtccttcttccgggcctggcacatcggcgttcgcgccaaggagtccaagaagctcgtcgccttcatctcgggcgtccccgcccgcatccgcgctcgcgacgacgtcgtccgcatggccgagatcaactttctctgcgtccacaagaagctccgatccaagcgcctggcacccgtgctcatccgggaggtcacccgccgcgtccaccaggagaacatctggcaggctgcatacaccgcggggatcgtcctcccaacccccatcaccacctgccgctactggcaccgatccctcaaccccaagaagcttatcgatgttggattctctcgccttggtccgcgcatgactatgagccgcacggtccggctatacaagctgcctgatgcgccgctcacccctgggtttcgcaggatggagctgcgggatgtcgctgcagtcacacggctgctgagggcataccttgcgaggtttgtggtggcaccggattttgatgaggtagatgtagagcactggttgctgccccaagaggatgtggtggacagctaccttgtggagagccctgagacgcatgaggtcacggatttctgcagcttttacacactgccctcatcagtgttgaacaatgctaactatgcgacgctcaaagcggcatactcatattacaacgtttcaaccaaaactccattgcagcagctgatgaatgatgctcttattgttgccaaacggaagaattatgatgtgttcaatgctctcgatgtcatggagaatgagtcattcctcaaggagctcaagtttggtcctggagatgggcagctccactattacctctacaattaccgtattcgcaatggcatcaagccctctgagcttggtcttgtgctgttatagggcagtctaatcaggacagtcctgagtttacaccttccaggtctcactgtgcaatcccagtggtttcctcattttgtctattgtggtagtggtttctttgatatgattgccatgcccattgatgggagtccaagatgatttgcaaacaaggagactggaattagaaatcctttccttaatttaaggttattattcccattagtgacattttgtgtgcgtggtccacaacttgtatgctggcattgattttactgagaaattttgatacaacttgtgttatcgaagttgtttgtgtgct

SEQ ID NO: 6803 - protein, 445 aa, Zea mays subsp. mays
  peptide (1)..(445): Ceres Seq. ID no. 12409018
PQTLPPIRPQIAMAAPNSNDAASASGTGPAGEEDISIEALARRVQEHMTLNSNPAARRHKFWETQPVGQFRDAADASLPNGPIEPPTPLSEVRADPYPLPAAFEWLTCDLDDDALLADLYSLLAHNYVEDDENMFRFNYSPAFLRWALKPPSFFRAWHIGVRAKESKKLVAFISGVPARIRARDDVVRMAEINFLCVHKKLRSKRLAPVLIREVTRRVHQENIWQAAYTAGIVLPTPITTCRYWHRSLNPKKLIDVGFSRLGPRMTMSRTVRLYKLPDAPLTPGFRRMELRDVAAVTRLLRAYLARFVVAPDFDEVDVEHWLLPQEDVVDSYLVESPETHEVTDFCSFYTLPSSVLNNANYATLKAAYSYYNVSTKTPLQQLMNDALIVAKRKNYDVFNALDVMENESFLKELKFGPGDGQLHYYLYNYRIRNGIKPSELGLVLL

SEQ ID NO: 6804 - protein, 433 aa, Zea mays subsp. mays
  peptide (1)..(433): Ceres Seq. ID no. 12409019
MAAPNSNDAASASGTGPAGEEDISIEALARRVQEHMTLNSNPAARRHKFWETQPVGQFRDAADASLPNGPIEPPTPLSEVRADPYPLPAAFEWLTCDLDDDALLADLYSLLAHNYVEDDENMFRFNYSPAFLRWALKPPSFFRAWHIGVRAKESKKLVAFISGVPARIRARDDVVRMAEINFLCVHKKLRSKRLAPVLIREVTRRVHQENIWQAAYTAGIVLPTPITTCRYWHRSLNPKKLIDVGFSRLGPRMTMSRTVRLYKLPDAPLTPGFRRMELRDVAAVTRLLRAYLARFVVAPDFDEVDVEHWLLPQEDVVDSYLVESPETHEVTDFCSFYTLPSSVLNNANYATLKAAYSYYNVSTKTPLQQLMNDALIVAKRKNYDVFNALDVMENESFLKELKFGPGDGQLHYYLYNYRIRNGIKPSELGLVLL

SEQ ID NO: 6805 - protein, 398 aa, Zea mays subsp. mays
  peptide (1)..(398): Ceres Seq. ID no. 12409020
MTLNSNPAARRHKFWETQPVGQFRDAADASLPNGPIEPPTPLSEVRADPYPLPAAFEWLTCDLDDDALLADLYSLLAHNYVEDDENMFRFNYSPAFLRWALKPPSFFRAWHIGVRAKESKKLVAFISGVPARIRARDDVVRMAEINFLCVHKKLRSKRLAPVLIREVTRRVHQENIWQAAYTAGIVLPTPITTCRYWHRSLNPKKLIDVGFSRLGPRMTMSRTVRLYKLPDAPLTPGFRRMELRDVAAVTRLLRAYLARFVVAPDFDEVDVEHWLLPQEDVVDSYLVESPETHEVTDFCSFYTLPSSVLNNANYATLKAAYSYYNVSTKTPLQQLMNDALIVAKRKNYDVFNALDVMENESFLKELKFGPGDGQLHYYLYNYRIRNGIKPSELGLVLL

SEQ ID NO: 6806 - DNA, 1052 bp, Zea mays subsp. mays
  misc_feature (1)..(1052): Ceres Seq. ID no. 12363055
  misc_feature (1)..(1052): Ortholog of  Ceres SEQ ID NO 12609339 as cited in SEQ ID NO 51780
gcacgagaccattacctagaacatcctaatcgaaaaaagtaccatctccaaagtgtccccagcggctaatgggtagatcatgtccataccgacgtttgcggcatttggccgttgtcaacgtctccaaagtgtcaaagtcgttccctacgtcatttcgtcaaaatcgagcactgtcgtgttcttatccggtcccgaacaaacaaccccgcttctgccggccgttttgcaggaggcgttgcggccatggcggcttcgaagcccatcttgtatagcgcgtggatcagctcctgctccttccgagtccggatcgccctcaacctcaaaggtgtggattatgagtacagggctgtgacaaggaacgatctagattacgaaaagatcaatccaatcaagtatgttccagcattggttgatggggattttgttgtttctgactccctggcaatcatattgtatcttgaagataaatatcctcaacaccctcttttgcctcaagatctcaaaaagaaagctataaatctgcagattgcaaatatagtttgttcaagcattcaacctcttcaatgttatgctgtaattggtctgcttgatggcaccttaggctctaaccagagccttcagattgttcggaattacaccgacaagggatttaaagcaatcgaaaaacttctggaaggttgtgacagtaaatatgctactggagacgaagtccaactgatgtgtttcttgcgccccagatgtatgcaggcgtgacgcgcttcggaattgatatgtcaaagtaccctcttctggagaggttctacaaagcctatatggagatcccagcatttcaagtcgcggttcctgaaaaacagccggatgcgcctgcgtccccatactgaaacggaggcagcaaccatattgatattcaaattgatttggttatcttggaatcatgttgtatgtagcatgacatagaaggccacgatgtatgcctatttgtttcgtacacattctggtttgtccgaagaatttcacagtaaataaggcccgatgatttgtgtagtagtgtt

SEQ ID NO: 6807 - protein, 169 aa, Zea mays subsp. mays
  peptide (1)..(169): Ceres Seq. ID no. 12363056
MAASKPILYSAWISSCSFRVRIALNLKGVDYEYRAVTRNDLDYEKINPIKYVPALVDGDFVVSDSLAIILYLEDKYPQHPLLPQDLKKKAINLQIANIVCSSIQPLQCYAVIGLLDGTLGSNQSLQIVRNYTDKGFKAIEKLLEGCDSKYATGDEVQLMCFLRPRCMQA

SEQ ID NO: 6808 - protein, 90 aa, Zea mays subsp. mays
  peptide (1)..(90): Ceres Seq. ID no. 12363057
MSIPTFAAFGRCQRLQSVKVVPYVISSKSSTVVFLSGPEQTTPLLPAVLQEALRPWRLRSPSCIARGSAPAPSESGSPSTSKVWIMSTGL

SEQ ID NO: 6809 - DNA, 872 bp, Zea mays subsp. mays
  misc_feature (1)..(872): Ceres Seq. ID no. 12372380
  misc_feature (1)..(872): Ortholog of  Ceres SEQ ID NO 13595084 as cited in SEQ ID NO 56095
  misc_feature (1)..(872): Ortholog of  Ceres SEQ ID NO 13594252 as cited in SEQ ID NO 57528
  misc_feature (1)..(872): Ortholog of  Ceres SEQ ID NO 13594430 as cited in SEQ ID NO 60181
aaaccgtccacgcctcgtcccaaccctagccccgtcgatctcgcatggccaccggcccgcgatctctccacgccctcctcggcggcggcgcagtcgccgacttgctgctgtgtaggcggaggaacgcctcggcggcggccgtggtgggcgccaccgcggtctggttcgtcttcgagcgcgcgggctacagcttcccttccgtcctgtccaacgccctgctcctcctcgtcgccatcctcttcttctgggccaagtccgcgttgctgcttaacaggcctcttccacctcttcctaaccttgaggtttcagatgcagttgttgaaaaggctgcagattatgctcttgtatggatcaataggctgctggctgtcggtcatgacatcgccatcaagagaaataggaaagtttttataaaggtgatattgattttgtggctggtttcatttgttggaatgctcttcaactttcttacactcatttacattggtgtaatgctttctctgttggttccaccactctatgagaagtatcaggatcaggttgatgaaaaggttggcgtagcgcacagtataatatcgaggcacataaataccattgttaccagggctgggcaatcagccaaggagaagaagactgaataaaagaattgttttgatgtattgtggaacatctctggttgtcaggtggagttgatagtgggcttttcatctttggactctccatatgaacctccacttacattagttctcgatatgctgatctgaggttttgatgtgcgctgttgatttcaggaaatgagacggtttgtgtattttttctttttgaacatgaggtttactatgggcgcatatcttactcgaaatgatattttg

SEQ ID NO: 6810 - protein, 198 aa, Zea mays subsp. mays
  peptide (1)..(198): Ceres Seq. ID no. 12372381
MATGPRSLHALLGGGAVADLLLCRRRNASAAAVVGATAVWFVFERAGYSFPSVLSNALLLLVAILFFWAKSALLLNRPLPPLPNLEVSDAVVEKAADYALVWINRLLAVGHDIAIKRNRKVFIKVILILWLVSFVGMLFNFLTLIYIGVMLSLLVPPLYEKYQDQVDEKVGVAHSIISRHINTIVTRAGQSAKEKKTE

SEQ ID NO: 6811 - protein, 137 aa, Zea mays subsp. mays
  peptide (1)..(137): Ceres Seq. ID no. 12372382
KPSTPRPNPSPVDLAWPPARDLSTPSSAAAQSPTCCCVGGGTPRRRPWWAPPRSGSSSSARATASLPSCPTPCSSSSPSSSSGPSPRCCLTGLFHLFLTLRFQMQLLKRLQIMLLYGSIGCWLSVMTSPSREIGKFL

SEQ ID NO: 6812 - DNA, 1127 bp, Zea mays subsp. mays
  misc_feature (1)..(1127): Ceres Seq. ID no. 12391329
  misc_feature (1)..(1127): Ortholog of  Ceres SEQ ID NO 14311755 as cited in SEQ ID NO 57271
  misc_feature (1)..(1127): Ortholog of  Ceres SEQ ID NO 15171156 as cited in SEQ ID NO 58259
  misc_feature (1)..(1127): Ortholog of  Ceres SEQ ID NO 14302212 as cited in SEQ ID NO 66507
  misc_feature (1)..(1127): Ortholog of  Ceres SEQ ID NO 13653980 as cited in SEQ ID NO 69253
gcacgagaccattacctagaacatcctaatcgaaaaaataaacaaaaaagattgactaaactgcaccaatgtaaagctggttcactcgtgtaactgatgcaatgcagtatgcaaagctcctgcctttggccttgatccacatgcttggaaatgttttcaccaatatgagtttgggtaaggtgtctgtctccttcacccacaccatcaaggccatggagcccttcttctcggtcctcctctctatcctattcctaggagagacaccttctctaccagtgttgggttcacttgtccctattgttggcggagttgtattggcgtcgatgactgaagtttcattcaactggattggattctggagtgccatgacttcgaatcttatgaatcaatcgcggaacgtttacagcaagaaaattctcgctgataaagaggacagtttggatgacataaatctcttctcaataataactgtcatggcattcttgttatctgctccactgatgctatgtgtagaaggaatcaagtttagcccatcatatctacagaatgctggagttaatgtaaaagaattatttataagagcggcacttgctgggacatctttctatttttaccaacaggtttcgtacagtttattggctagagtatctcccgtgacccattcggttgccaactctcttaaacgtgtggtggtcattgtgtcatccgttctcttctttagaactttaatttcacctataaatgccttaggaaccggtgttgctcttgctggagtgttcctgtactcgcagttcaaaaagtcaaaaccaaaggctacggctgcatgaagagactatagaatgatggaggatttggaactatcagtcgacgtggtgaagcagactggccttcacggtagcaaacacatatagtttccccatgttgcatcttaaaaaaaatgtgttctcttgtcaggttctttggatgtgagaagcttgtacgtaagtttcatccacaaggtgtggtggaacacgtgaacaacggagatatagcattcttagatttcaagagaatacaaattttggaatatacttccatgtcattgaaactgacagaatgctctcactattatatatattctttacgcc

SEQ ID NO: 6813 - protein, 241 aa, Zea mays subsp. mays
  peptide (1)..(241): Ceres Seq. ID no. 12391330
MQYAKLLPLALIHMLGNVFTNMSLGKVSVSFTHTIKAMEPFFSVLLSILFLGETPSLPVLGSLVPIVGGVVLASMTEVSFNWIGFWSAMTSNLMNQSRNVYSKKILADKEDSLDDINLFSIITVMAFLLSAPLMLCVEGIKFSPSYLQNAGVNVKELFIRAALAGTSFYFYQQVSYSLLARVSPVTHSVANSLKRVVVIVSSVLFFRTLISPINALGTGVALAGVFLYSQFKKSKPKATAA

SEQ ID NO: 6814 - protein, 228 aa, Zea mays subsp. mays
  peptide (1)..(228): Ceres Seq. ID no. 12391331
MLGNVFTNMSLGKVSVSFTHTIKAMEPFFSVLLSILFLGETPSLPVLGSLVPIVGGVVLASMTEVSFNWIGFWSAMTSNLMNQSRNVYSKKILADKEDSLDDINLFSIITVMAFLLSAPLMLCVEGIKFSPSYLQNAGVNVKELFIRAALAGTSFYFYQQVSYSLLARVSPVTHSVANSLKRVVVIVSSVLFFRTLISPINALGTGVALAGVFLYSQFKKSKPKATAA

SEQ ID NO: 6815 - protein, 220 aa, Zea mays subsp. mays
  peptide (1)..(220): Ceres Seq. ID no. 12391332
MSLGKVSVSFTHTIKAMEPFFSVLLSILFLGETPSLPVLGSLVPIVGGVVLASMTEVSFNWIGFWSAMTSNLMNQSRNVYSKKILADKEDSLDDINLFSIITVMAFLLSAPLMLCVEGIKFSPSYLQNAGVNVKELFIRAALAGTSFYFYQQVSYSLLARVSPVTHSVANSLKRVVVIVSSVLFFRTLISPINALGTGVALAGVFLYSQFKKSKPKATAA

SEQ ID NO: 6816 - DNA, 958 bp, Zea mays subsp. mays
  misc_feature (1)..(958): Ceres Seq. ID no. 12379360
  misc_feature (1)..(958): Ortholog of  Ceres SEQ ID NO 14304536 as cited in SEQ ID NO 53436
gtatctctctcctccctggctctcgtcccccccaccgagtcgtcgccccctcgctttcaccccacgcggaagcaagaattcgtcgtcaaattcccagcttgcgcgtgtttctgtggatttcttcccgcttccctgctcctgcctcctatgggcctttgatccggggcttcgtggatcttgggaagaggaggtgtggtgggcgcctcggcggcgatctggcggggaggatatggccagcgggaaggagccgatcgaggtcaggtttcgtctcttcgacggcacggatatcgggcctacgaagtacgatccctccaccacggtctcctcgctcaaggagttcatcctcgctcggtggccgcaagataaggatatagctccaaaaactgttaatgacttgaagcttatcaatggtggaaggatattggagaataaccggacacttgcagagtcccgtgttccagtaggagagatcccaggtggtgtaattacaatgcatgtggtagtgcgacctccacaagctgacaaaaacaagaagcagcttgccaattcccccaagcagaacagatgtggatgcaccattctctgataaggcgtctgcttggtgctgtacaatctgtgtgtacacataagattttgtatgtgctttgctgtgttcacacaagcatggattcgttttgatatccaattcttgaagccatacaaattccagaagtaagatcccacggaatacgaagatttctggatcgttttgttctagagtgtaggattggatgcttcctgctgtataaattgtgttgtcaaaactgaaaaaaaaatctctttcttttctgctatattgacttattatcgattctttctagctcggttgcttttgattcgtgtaacagaaatattgtactcatgtatatgtaacttgcaaaaggagtaatgtatggtgttatggtaattggtaaagggg

SEQ ID NO: 6817 - protein, 194 aa, Zea mays subsp. mays
  peptide (1)..(194): Ceres Seq. ID no. 12379361
YLSPPWLSSPPPSRRPLAFTPRGSKNSSSNSQLARVSVDFFPLPCSCLLWAFDPGLRGSWEEEVWWAPRRRSGGEDMASGKEPIEVRFRLFDGTDIGPTKYDPSTTVSSLKEFILARWPQDKDIAPKTVNDLKLINGGRILENNRTLAESRVPVGEIPGGVITMHVVVRPPQADKNKKQLANSPKQNRCGCTIL

SEQ ID NO: 6818 - protein, 123 aa, Zea mays subsp. mays
  peptide (1)..(123): Ceres Seq. ID no. 12379362
ISLLPGSRPPHRVVAPSLSPHAEARIRRQIPSLRVFLWISSRFPAPASYGPLIRGFVDLGKRRCGGRLGGDLAGRIWPAGRSRSRSGFVSSTARISGLRSTIPPPRSPRSRSSSSLGGRKIRI

SEQ ID NO: 6819 - protein, 118 aa, Zea mays subsp. mays
  peptide (1)..(118): Ceres Seq. ID no. 12379363
MASGKEPIEVRFRLFDGTDIGPTKYDPSTTVSSLKEFILARWPQDKDIAPKTVNDLKLINGGRILENNRTLAESRVPVGEIPGGVITMHVVVRPPQADKNKKQLANSPKQNRCGCTIL

SEQ ID NO: 6820 - DNA, 1099 bp, Zea mays subsp. mays
  misc_feature (1)..(1099): Ceres Seq. ID no. 12381037
  misc_feature (1)..(1099): Ortholog of  Ceres SEQ ID NO 12472913 as cited in SEQ ID NO 115
  misc_feature (1)..(1099): Ortholog of  Ceres SEQ ID NO 15225086 as cited in SEQ ID NO 69009
acccagacctagccactccccagcaggcaagcaacctcgccaaaaccctacgccgctcaactatgctcatccggcgaccgctccaaaccctcaccctccccctcctccgccgccacttctccgccgccaccgtcgaggcctttgtgtctcccgaccaagccaccgacccgctctccccgccgtacgactacctcccgggccacccgagccagacgctaagcacaatgaggtgatcctcgccgtcccgcgcgcctcttcggggcgccacgtagccgccaaggagcgcaaggccgggcgggtccccgccatcgtgttcgagcaggagaacggacaggagggcggcaacaagcgcctcatctccgttcgggccaatcagatccgcaagctcgtcgaccacctcggccggtccttcttcctctccaggctgttcagtctccaggtctggtcagaacatgccgggcagggcgaactcatcgaaagcgtccgcgtcctacccagaaaggtacacctgcatgcaggcactgatgaaccgctgaatatcacatttatgagagcaccttcttctgcacttctcaaaatagatgttcctctgatgttcattggagaggatgcctcacctggtctcaggaaaggagcttacttcaacaccataaaacgaacagccaagtatctgtgccctgctgacatagtaccaccatacattaaagtggatctaagtgagttggatgtaggacagaaattgctgatgcgtgatctgaaagttcatcctgcgttgaagctgcttcattcgccagatcagcccatctgtaactttaccggatcaaggtctccagaatagaagaagggaaaataacttgcttctttgtatgagctgttttgagcacaataaggttttgtttcgtacttgagtgattcaggtgttacttgtcctactgttaggatgaattgtagccagagacacctatttttacctcaggaagggatcttttgagcaggtagatgctactacagctagacgcacttgcaaagtttcctaaatatggtcatctagtgttaacagaaacttatggtgctgtgagcaatattgaaaattgtttgc

SEQ ID NO: 6821 - protein, 278 aa, Zea mays subsp. mays
  peptide (1)..(278): Ceres Seq. ID no. 12381038
PRPSHSPAGKQPRQNPTPLNYAHPATAPNPHPPPPPPPLLRRHRRGLCVSRPSHRPALPAVRLPPGPPEPDAKHNEVILAVPRASSGRHVAAKERKAGRVPAIVFEQENGQEGGNKRLISVRANQIRKLVDHLGRSFFLSRLFSLQVWSEHAGQGELIESVRVLPRKVHLHAGTDEPLNITFMRAPSSALLKIDVPLMFIGEDASPGLRKGAYFNTIKRTAKYLCPADIVPPYIKVDLSELDVGQKLLMRDLKVHPALKLLHSPDQPICNFTGSRSPE

SEQ ID NO: 6822 - DNA, 1130 bp, Zea mays subsp. mays
  misc_feature (1)..(1130): Ceres Seq. ID no. 12386565
  misc_feature (1)..(1130): Ortholog of  Ceres SEQ ID NO 14312951 as cited in SEQ ID NO 58487
  misc_feature (1)..(1130): Ortholog of  Ceres SEQ ID NO 13597120 as cited in SEQ ID NO 64165
cccgaaagccaaagaggaaaaaggaattgcgcctcccgctacgctattaccgccggcggccgctgccatggacgttggcgcgaaggaggaggagatgggtcaagtgtggtggggccaccgcgcgtggtccctcctctccgctgttcgtgcacgggcgccgctagtgcagtgcatcaccaacctcgtctcaatggacatcgccgccaacgtgctcctcgccgcgggcgcctccccggctatggtccactccctccgcgaggtgcccgactttaccccgcgctgcgacgccgtgtatgtcaacgtcggcacgctctcggaggactggctcccctccatgcgcgccgccgcctccgccggccgcccctgggtgctcgaccccgtcgccgccgccgcctccgggttccggatgaaagcctgcctcgagcttctgtcgctctgcccagcagtcgtcagggggaacgcctctgaaattctcgcgctcgcttcccgctcaaccgccgcctcttccaatttcaagggtgtggacagttcacattgctctgttgatgctattgaagctgcaaaagcgttggcactgtccagcagtgctgttgtcgcggtatctggagctgttgatttcgtcactgatgggaagcaggttatcagcgtgagcaacggtgtgcccatgatgcagaagatcaccgcaacagggtgcgctgtgactgctcttattgctgcatttgttgccatggaaccttctgatgccatagttgcagcggcatgcgctcttgccatctttggtctggtgggagagattgggatggagtcagccaaggggcctgcctctcttaggatgcacctcatcgacgctctctactgcctcaatgaagaaacagtcacttctcgggttaggatttccttgcgaccatgatgcgcggacgcatgccatggctactgttttttcaggtaaatatggagtttcgaataataggaaggctgagttcattttctgaaatgtcttgataaccatgaaaatcatagacactcctttaaccttcacgactgtacgaaatacctagatgtgatgcccaagttgtgcctgaattgtcagctgtacatatttaatacagtaaaatggggaaccttgtttc

SEQ ID NO: 6823 - protein, 302 aa, Zea mays subsp. mays
  peptide (1)..(302): Ceres Seq. ID no. 12386566
PKAKEEKGIAPPATLLPPAAAAMDVGAKEEEMGQVWWGHRAWSLLSAVRARAPLVQCITNLVSMDIAANVLLAAGASPAMVHSLREVPDFTPRCDAVYVNVGTLSEDWLPSMRAAASAGRPWVLDPVAAAASGFRMKACLELLSLCPAVVRGNASEILALASRSTAASSNFKGVDSSHCSVDAIEAAKALALSSSAVVAVSGAVDFVTDGKQVISVSNGVPMMQKITATGCAVTALIAAFVAMEPSDAIVAAACALAIFGLVGEIGMESAKGPASLRMHLIDALYCLNEETVTSRVRISLRP

SEQ ID NO: 6824 - protein, 280 aa, Zea mays subsp. mays
  peptide (1)..(280): Ceres Seq. ID no. 12386567
MDVGAKEEEMGQVWWGHRAWSLLSAVRARAPLVQCITNLVSMDIAANVLLAAGASPAMVHSLREVPDFTPRCDAVYVNVGTLSEDWLPSMRAAASAGRPWVLDPVAAAASGFRMKACLELLSLCPAVVRGNASEILALASRSTAASSNFKGVDSSHCSVDAIEAAKALALSSSAVVAVSGAVDFVTDGKQVISVSNGVPMMQKITATGCAVTALIAAFVAMEPSDAIVAAACALAIFGLVGEIGMESAKGPASLRMHLIDALYCLNEETVTSRVRISLRP

SEQ ID NO: 6825 - protein, 271 aa, Zea mays subsp. mays
  peptide (1)..(271): Ceres Seq. ID no. 12386568
MGQVWWGHRAWSLLSAVRARAPLVQCITNLVSMDIAANVLLAAGASPAMVHSLREVPDFTPRCDAVYVNVGTLSEDWLPSMRAAASAGRPWVLDPVAAAASGFRMKACLELLSLCPAVVRGNASEILALASRSTAASSNFKGVDSSHCSVDAIEAAKALALSSSAVVAVSGAVDFVTDGKQVISVSNGVPMMQKITATGCAVTALIAAFVAMEPSDAIVAAACALAIFGLVGEIGMESAKGPASLRMHLIDALYCLNEETVTSRVRISLRP

SEQ ID NO: 6826 - DNA, 853 bp, Zea mays subsp. mays
  misc_feature (1)..(853): Ceres Seq. ID no. 12402503
  misc_feature (1)..(853): Ortholog of  Ceres SEQ ID NO 15173911 as cited in SEQ ID NO 62346
ctatatatccacacggacggagcccgcgtcattgtgcggtgccctccggagcgcacggcggcggcctcctgccgaccttcgcggtagcaagctagcagctagctagccgcagttagcgtctctttcgtccgtcctcctgcgccggccgtcatgaccttcccgctggtttgctactgcaacgcggtgccgcgccccgtggccgcgctgttcaagaccatccacgccgcggcgctggtggtcgtgctggtcctctgcttcctgggcctctacgagttcccctacgaccccgaggaccacgcgccggtgatcaacgggcgggcccgcggcgggcgggacgcccctgggccggaggcggtgaagcggcacctcccgctcgtcgagttcctggagctgatggtggtggctccgtcgtcgccgtcgggggcggaggcggctccgacgtgccgggtgtgcctggagaggctggaggcggcggacggggtgcggcggctgggcaactgcgcccacgcgttccacgcgcgctgcatcgaccgctggatcgacctgggcgaggtgacgtgcccgctgtgccgctcccacctgctgccgcgccggcgcgccggcctgcttgccatggcacggcttggcgacggctagtagtcgcccgtccgtccgtccgtacctggttgtttccttgccacgtgacgtgcgtgcccgtgcccgtgtccgtatatatgcttggctttcaggcggcgctggtgccggatgggggcggaccaaccgcgaactgatcgcgattagcaggacgatggactaaccaccaacctgatgttattaatgaatgggcgcaagttaaattaaccggaggaggttg

SEQ ID NO: 6827 - protein, 161 aa, Zea mays subsp. mays
  peptide (1)..(161): Ceres Seq. ID no. 12402504
MTFPLVCYCNAVPRPVAALFKTIHAAALVVVLVLCFLGLYEFPYDPEDHAPVINGRARGGRDAPGPEAVKRHLPLVEFLELMVVAPSSPSGAEAAPTCRVCLERLEAADGVRRLGNCAHAFHARCIDRWIDLGEVTCPLCRSHLLPRRRAGLLAMARLGDG

SEQ ID NO: 6828 - protein, 80 aa, Zea mays subsp. mays
  peptide (1)..(80): Ceres Seq. ID no. 12402505
MVVAPSSPSGAEAAPTCRVCLERLEAADGVRRLGNCAHAFHARCIDRWIDLGEVTCPLCRSHLLPRRRAGLLAMARLGDG

SEQ ID NO: 6829 - DNA, 1619 bp, Zea mays subsp. mays
  misc_feature (1)..(1619): Ceres Seq. ID no. 12350003
  misc_feature (1)..(1619): Ortholog of  Ceres SEQ ID NO 13648081 as cited in SEQ ID NO 165
  misc_feature (1)..(1619): Ortholog of  Ceres SEQ ID NO 15224803 as cited in SEQ ID NO 56572
  misc_feature (1)..(1619): Ortholog of  Ceres SEQ ID NO 14308598 as cited in SEQ ID NO 60416
  misc_feature (1)..(1619): Ortholog of  Ceres SEQ ID NO 13502952 as cited in SEQ ID NO 62271
  misc_feature (1)..(1619): Ortholog of  Ceres SEQ ID NO 13502973 as cited in SEQ ID NO 68052
  misc_feature (1)..(1619): Ortholog of  Ceres SEQ ID NO 13596000 as cited in SEQ ID NO 68188
  misc_feature (1)..(1619): Ortholog of  Ceres SEQ ID NO 15179420 as cited in SEQ ID NO 0
agggacaaagaaaggaaagggacgcccgtctcgtcacgtcctccacccccgccgccatggctgccctgggcctgctcctcctcgccgtcgtcggtgccaccaacgccgcggcgccgggcggtagaatgtccatcatctcctacaacgaggagcacgccgcgcgcgggctggagcggacggagccggaggcccggacgctgtacgagctctggctcgccgagcacggccgcgcctacaacgcgctcggcgagcgcgaccgccgcttccgcgtgttctgggacaacctacgcttcgtcgacgcgcacaacgagcgcgccgcggagcacggcttccgcctcggcatgaaccagttcgccgacctcaccaacgacgagttccgcgccgcgtacctcggcgccaggatccccgccgcccggagaaggggaaccgccgtgggggagaggtaccgccacggcggtggcgccgaggagctgccggagagcgtcgactggagggagaagggcgccgttgcgcccgtcaagaaccaggggcagtgcggaagttgctgggctttctctgcagtaagctcagtagaaagcgttaaccaaattgttactggtgagatggtgaccttgtccgagcaggagcttgtagagtgctcgactgatggagggaacagcggctgcaatggtgggcttatggatgccgcatttgattttatcataaagaacgggggcattgatactgaaggagactacccttacaaagctgtggatgggaagtgtgacatcaacagggaaaatgccaaggttgtgagcatcgatggctttgaagatgtgcctgaaaacgacgagaaatcattgcagaaggcagttgctcaccagcccgtcagcgttgccattgaggctggtggccgggagttccagctgtacaaagcgggtgtctttagtggaacttgcaccacaaatcttgaccacggtgtcgtcgctgtcggctacggcaccgaaaatgggaaggactactggattgtccgcaactcttggggtgcaaagtggggcgaggatggttacatccgtatggagaggaacgtcaatgccaccactgggaagtgcgggattgctatgatggcatcctaccctaccaagaagggcgcaaaccctcccaagccgtctccaacccctccaacgccgccgcctcccccggttgcccctgacaatgtctgcgatgagaacttctcttgcgcagcgggcagcacctgctgctgtgcgtttggtttcaggaacgtctgcttggtctggggttgctgtccgatggaaggtgccacctgctgcaaggaccacgccagctgctgcccgccgggttaccctgtgtgcaacgtcagagccggaacttgctcagtgagcaagaacagcccgctgagcgtgaaggccttgaagcgcaccctcgccaagctgaacagcgcatgagctcgtccagacatcatggatctggagaggaatgggaccgccccggagcttttcagactctgcgtcctgatacaagctttcatagataacattatattgtatatctaagtattacttggcgtcccataaatccgttgtaaatatcaagctataatttctactatcttcgttctc

SEQ ID NO: 6830 - protein, 480 aa, Zea mays subsp. mays
  peptide (1)..(480): Ceres Seq. ID no. 12350004
GQRKERDARLVTSSTPAAMAALGLLLLAVVGATNAAAPGGRMSIISYNEEHAARGLERTEPEARTLYELWLAEHGRAYNALGERDRRFRVFWDNLRFVDAHNERAAEHGFRLGMNQFADLTNDEFRAAYLGARIPAARRRGTAVGERYRHGGGAEELPESVDWREKGAVAPVKNQGQCGSCWAFSAVSSVESVNQIVTGEMVTLSEQELVECSTDGGNSGCNGGLMDAAFDFIIKNGGIDTEGDYPYKAVDGKCDINRENAKVVSIDGFEDVPENDEKSLQKAVAHQPVSVAIEAGGREFQLYKAGVFSGTCTTNLDHGVVAVGYGTENGKDYWIVRNSWGAKWGEDGYIRMERNVNATTGKCGIAMMASYPTKKGANPPKPSPTPPTPPPPPVAPDNVCDENFSCAAGSTCCCAFGFRNVCLVWGCCPMEGATCCKDHASCCPPGYPVCNVRAGTCSVSKNSPLSVKALKRTLAKLNSA

SEQ ID NO: 6831 - protein, 462 aa, Zea mays subsp. mays
  peptide (1)..(462): Ceres Seq. ID no. 12350005
MAALGLLLLAVVGATNAAAPGGRMSIISYNEEHAARGLERTEPEARTLYELWLAEHGRAYNALGERDRRFRVFWDNLRFVDAHNERAAEHGFRLGMNQFADLTNDEFRAAYLGARIPAARRRGTAVGERYRHGGGAEELPESVDWREKGAVAPVKNQGQCGSCWAFSAVSSVESVNQIVTGEMVTLSEQELVECSTDGGNSGCNGGLMDAAFDFIIKNGGIDTEGDYPYKAVDGKCDINRENAKVVSIDGFEDVPENDEKSLQKAVAHQPVSVAIEAGGREFQLYKAGVFSGTCTTNLDHGVVAVGYGTENGKDYWIVRNSWGAKWGEDGYIRMERNVNATTGKCGIAMMASYPTKKGANPPKPSPTPPTPPPPPVAPDNVCDENFSCAAGSTCCCAFGFRNVCLVWGCCPMEGATCCKDHASCCPPGYPVCNVRAGTCSVSKNSPLSVKALKRTLAKLNSA

SEQ ID NO: 6832 - protein, 439 aa, Zea mays subsp. mays
  peptide (1)..(439): Ceres Seq. ID no. 12350006
MSIISYNEEHAARGLERTEPEARTLYELWLAEHGRAYNALGERDRRFRVFWDNLRFVDAHNERAAEHGFRLGMNQFADLTNDEFRAAYLGARIPAARRRGTAVGERYRHGGGAEELPESVDWREKGAVAPVKNQGQCGSCWAFSAVSSVESVNQIVTGEMVTLSEQELVECSTDGGNSGCNGGLMDAAFDFIIKNGGIDTEGDYPYKAVDGKCDINRENAKVVSIDGFEDVPENDEKSLQKAVAHQPVSVAIEAGGREFQLYKAGVFSGTCTTNLDHGVVAVGYGTENGKDYWIVRNSWGAKWGEDGYIRMERNVNATTGKCGIAMMASYPTKKGANPPKPSPTPPTPPPPPVAPDNVCDENFSCAAGSTCCCAFGFRNVCLVWGCCPMEGATCCKDHASCCPPGYPVCNVRAGTCSVSKNSPLSVKALKRTLAKLNSA

SEQ ID NO: 6833 - DNA, 1904 bp, Zea mays subsp. mays
  misc_feature (1)..(1904): Ceres Seq. ID no. 12406864
  misc_feature (1)..(1904): Ortholog of  Ceres SEQ ID NO 13598368 as cited in SEQ ID NO 62140
agtctagctagaatacactcgcgttcaaaacaaacacacagcgtcgtgctgcgtgatctctgaccgcgtcgacaactaccgcagcaccaagcagctgatggcggccaccgtatcttcctgcctgagcctcgtccccaccgtgcaccaccgggccggcgggttccccagcagtgtggcactgacgaacacgcttcagcgccgtcgtcgttctcgccgctatcttgtcgtcgcctcggcgacgagagccgaacaggaggccgcccctgtgacgatcgaggacgtggacctcagctctcatcaggcccgcggccgacgacgggggagctcgccgcgcggtggcgggaggtccacggcagcaacaactgggagggtctgctggaccccatcgacggcgtgctcctccaggagctcatccgctacggcgagttcgcccaggccacctacgacagcttcgactacgaccgcttctccccctactgcggcagctgcaagtacccggcgaagaccttcttccacgacgtcggcctcggcggcatcggctacgaggtcacccgctacctctacgccacctgcaacgacctcaagttccccaacttcggcatcaagacggccgccaacgccaagatgtggagcgagtccggcacgttcatcgggtacgtggccgtgtccaccgacgaggagacggcgcggctcggccgccgggacatcgccgtggcgtggcgcggcaccatcacccgcctcgagtgggtggccgatctgacggccaaccagatccccctgcgcgagacgggcgtcccctgcccggaccccgacgtgaaggtggagcgagggttcgcggcgctgtacacggacaagggcgccggctgccgcttctgccggtactcggcgcgggagcaggtgctggccgaggtgcgcaagctggtggatctgtaccacgggcggggcgagcaggtgagcgtgacggtcacgggccacagcctgggcagcgcgctggcgatgctgtgcgccttcgacatcgcggagacgcgcgcgaacgtgtcgccgggcgacagggtggcgccggtgtgcgtgttctccttcgccggcccgcgcgtcgggaacgtcgccttccggaggcggttcgagcgggagctgggcgtgcgggcgctgcgcgtcgtgaacgtgcacgacagcgtgcccaaggtgcccggcgtgttcttcaacgagtcggcgttcccggagctcgtcctgcgggcggcggacaggctgggcctcggcggcgtgtacacgcacctgggcgtgctgctgcagctggaccacaaggtgtcgccgttcctcaaggagaccctggacctctcgtgctaccacgacctggaggcgcacctgcacctgctggacggcttccgcggctccggcgcggggttcgagccccgcgggagggaccccgcgctggtgaacaagtccaccgacttcctccgggaggaccacatggtgccgcccgtgtggtaccaggcggagaacaagggcatggtgaggacggaggacggccggtgggtgctgccgccgcggcagagggtgctcgacgaccacccggaggacactgaccatcacctccagcggctcggtctcaccgcgtgaagctcagcaatactctgatagtagcgttaattagtgcgtgtggcgttcgcgtacgtgcgcggggcagtcggttactctgttgccgcgcgcggcagctcagtggcgcgttcatggcgtgcatgatgcgggtgacgtgcgggatgggcacgtcgctgcctgagaagctcgcgccgttggcgttcgtgtggctgcagaaaggtcgtcttggattgtaattctctctacttatttttgtaaattgacccagaaaagctgctgcttgcagcgccaaaaaaaaaacgattttc

SEQ ID NO: 6834 - protein, 330 aa, Zea mays subsp. mays
  peptide (1)..(330): Ceres Seq. ID no. 12406865
MWSESGTFIGYVAVSTDEETARLGRRDIAVAWRGTITRLEWVADLTANQIPLRETGVPCPDPDVKVERGFAALYTDKGAGCRFCRYSAREQVLAEVRKLVDLYHGRGEQVSVTVTGHSLGSALAMLCAFDIAETRANVSPGDRVAPVCVFSFAGPRVGNVAFRRRFERELGVRALRVVNVHDSVPKVPGVFFNESAFPELVLRAADRLGLGGVYTHLGVLLQLDHKVSPFLKETLDLSCYHDLEAHLHLLDGFRGSGAGFEPRGRDPALVNKSTDFLREDHMVPPVWYQAENKGMVRTEDGRWVLPPRQRVLDDHPEDTDHHLQRLGLTA

SEQ ID NO: 6835 - protein, 220 aa, Zea mays subsp. mays
  peptide (1)..(220): Ceres Seq. ID no. 12406866
MAATVSSCLSLVPTVHHRAGGFPSSVALTNTLQRRRRSRRYLVVASATRAEQEAAPVTIEDVDLSSHQARGRRRGSSPRGGGRSTAATTGRVCWTPSTACSSRSSSATASSPRPPTTASTTTASPPTAAAASTRRRPSSTTSASAASATRSPATSTPPATTSSSPTSASRRPPTPRCGASPARSSGTWPCPPTRRRRGSAAGTSPWRGAAPSPASSGWPI

SEQ ID NO: 6836 - protein, 206 aa, Zea mays subsp. mays
  peptide (1)..(206): Ceres Seq. ID no. 12406867
MLCAFDIAETRANVSPGDRVAPVCVFSFAGPRVGNVAFRRRFERELGVRALRVVNVHDSVPKVPGVFFNESAFPELVLRAADRLGLGGVYTHLGVLLQLDHKVSPFLKETLDLSCYHDLEAHLHLLDGFRGSGAGFEPRGRDPALVNKSTDFLREDHMVPPVWYQAENKGMVRTEDGRWVLPPRQRVLDDHPEDTDHHLQRLGLTA

SEQ ID NO: 6837 - DNA, 1192 bp, Zea mays subsp. mays
  misc_feature (1)..(1192): Ceres Seq. ID no. 12386906
  misc_feature (1)..(1192): Ortholog of  Ceres SEQ ID NO 13595411 as cited in SEQ ID NO 56528
  misc_feature (1)..(1192): Ortholog of  Ceres SEQ ID NO 12598859 as cited in SEQ ID NO 62872
  misc_feature (1)..(1192): Ortholog of  Ceres SEQ ID NO 12617350 as cited in SEQ ID NO 63777
  misc_feature (1)..(1192): Ortholog of  Ceres SEQ ID NO 13598749 as cited in SEQ ID NO 64341
  misc_feature (1)..(1192): Ortholog of  Ceres SEQ ID NO 15176153 as cited in SEQ ID NO 0
  misc_feature (1)..(1192): Ortholog of  Ceres SEQ ID NO 15179157 as cited in SEQ ID NO 0
gcacgagaccattacctagaacatcctaatcgaaaaacactcgaacacttccaaagttctagcccctctcgtgagtcctgtccaaataatggcccacgcgcagcagtgtcctcctgcttctgacggcgctcgccgcagccacgcctgtgccgtcagcggcgaccaggaagctcatgttcctcgtccagccacagccgaacctcctcacgtaccacaacggcgccgtgctgagcggcgacatccccgtctccatcctctggtatggccgcttcacgccggcgcagaaggctgtggtctccgacttcctcctcgccctctccggcgccgcgccgccgcaggggtcgccgtccgttgcccagtggtggagcagcgtcaaccagctctacctctccaaggcggcggcggcggccgtcagcaagaacggcgcgcacggcggcggcgccaagagcgcgcgggtggtgctgtccgggcacggcctccgacgagggctgctcgctggggaagagcctgaagctgtcgcagcttccggcgctggcggccgcggcacgccccgcgaccgcggccgcgaggggcggcgtcgcgctggtgctcacggcgcgggacgtggccgtggagggcttctgcacgagccggtgcgggcaccacgggtcgtacggcggcggcgggcgcgcggcgtacgcgtgggtgggcgacgccgccgaccagtgcccgggccagtgcgcgtggccgttccaccagccggcgtacggcccgcaggcgccgccgctggtgccgcccagcggggacgcgggcacggacggcgtggtgatcaacgtggccagcatggtcgccggcgcggtcaccaacccgttcggcgacggcttctaccagggcgaccgcggctcgccgctggaggccgccacggcgtgcgcgggcgtgtacggcagcggcgcgtaccccgggtacgccgggcagctgctcgtggaccgggccacgggcgccagctacaacgcgcacggtgcgcgcgggaggaagtacctgctcccggcgctgttcgaccccgacacgtcggcgtgctccacgctggtgtagtgtagccgatctcacaggctaataaatgttggtatatgtaaatactgaacagtacacagtatgtatcatcgttcgtgacgggcagggcagtgctaaataaacgacctgtgcttgaagctgc

SEQ ID NO: 6838 - protein, 300 aa, Zea mays subsp. mays
  peptide (1)..(300): Ceres Seq. ID no. 12386907
MFLVQPQPNLLTYHNGAVLSGDIPVSILWYGRFTPAQKAVVSDFLLALSGAAPPQGSPSVAQWWSSVNQLYLSKAAAAAVSKNGAHGGGAKSARVVLSGHGLRRGLLAGEEPEAVAASGAGGRGTPRDRGREGRRRAGAHGAGRGRGGLLHEPVRAPRVVRRRRARGVRVGGRRRRPVPGPVRVAVPPAGVRPAGAAAGAAQRGRGHGRRGDQRGQHGRRRGHQPVRRRLLPGRPRLAAGGRHGVRGRVRQRRVPRVRRAAARGPGHGRQLQRARCAREEVPAPGAVRPRHVGVLHAGVV

SEQ ID NO: 6839 - protein, 269 aa, Zea mays subsp. mays
  peptide (1)..(269): Ceres Seq. ID no. 12386908
MAASRRRRRLWSPTSSSPSPAPRRRRGRRPLPSGGAASTSSTSPRRRRRPSARTARTAAAPRARGWCCPGTASDEGCSLGKSLKLSQLPALAAAARPATAAARGGVALVLTARDVAVEGFCTSRCGHHGSYGGGGRAAYAWVGDAADQCPGQCAWPFHQPAYGPQAPPLVPPSGDAGTDGVVINVASMVAGAVTNPFGDGFYQGDRGSPLEAATACAGVYGSGAYPGYAGQLLVDRATGASYNAHGARGRKYLLPALFDPDTSACSTLV

SEQ ID NO: 6840 - DNA, 1752 bp, Zea mays subsp. mays
  misc_feature (1)..(1752): Ceres Seq. ID no. 12356447
  misc_feature (1)..(1752): Ortholog of  Ceres SEQ ID NO 14316158 as cited in SEQ ID NO 52413
  misc_feature (1)..(1752): Ortholog of  Ceres SEQ ID NO 12587035 as cited in SEQ ID NO 63605
aggatcggagaacatccgccgcgactccatgctccaggagatcaagtctgcctaccagattcttgcccacaagtaccatcctgatatgaataagagtcccgaagcagaagaaaagttcaaggagatcagtgctgcatatgagccaagcttggatctgaccgctgtactttgtgtcgccgcttgaatctacggttctcttcttccttgttcatcccgtggatctgtcccgtggtggtccaagcattcgatttctgctattataacatccaacgttggcggtgaagagcaaggggacagataagcccaaaggcagcaaggggaacgtcgacaaggaccccaacaagcctgactcccaacattttttgtccgccggtgctgtagcggaagcccaaaggcagcaaggggaacgtcgacaaggaccccaacaaggctgactcccaacattttttgtccgccggtgctgtagcggcggcgctgggtgagctcccccatgctgggctctgggatgctcccaggcgccggggttcggcgagacggggactgatctggtgctgggctctgggatgctcccaggcgccgctgccttgcagttcctcggtcgattcaagggaatattatcagtggaagagactggtgaatcaaaggccgtcaacgctagatggaggcaaagtgcctgctgcattgggccaccatgtttttggtgcgggctgttcctcacggaaccaacatatctacatatatttttcatcttctcatcaagggagtatatgggtcgggagcaaggttctacatgacctactagggtatgtaaaaattatggaagtagggccacgagatggtctacagaatgagaaggacatcgtgccaacacctgtaaaggttgagcttatacgaagattggccacatccggattacctgttgtggaggcaacgagttttgtatctccaaaacgggtacctcaggcaggactgaggctgtttcatcctcctctgctgcggggtgggctaggtcgtcaccatggcgtcactcgtggcgtcttgtgcagtagggacgacagcagggagctgtcaagatgggttacctcaagatggacgaggagttcctcaagaggggcgagagcgggggcacgtgctgcgtcatagcccttctccgaaagggtagactagtcgtctccaatattggagactgtcatgtggtgctcagccgagcagggaaggcaaaggtgctcacctctgaccatcgggcctcccaggaggatgagaagcaaagaattgagaatttgggtggatttgtggtgaattaccatgggacatggagagtccagggctccctggcagtgtctaggggcaatggggatggacacctaaagcagtgggttgtggctgaccgagagactagaacgctcctcatcgaccaccagtgcgagttcttgatacttgcttctgatggcctatggggtaagattgataatcaggatgcagttgaccaaaactctaggcattagcactaacagagaccggtggaaggcaggactttgctgcctaaagtttccatgagtcagcgctatttttgggtgtttaacattcattctttgtcatagaaccatttgttatattattagatgtaattagatctatttgattcattcttcggaaatatttattgagataatgcggggtgatctctcgcttcatgatccattgactgtaaaaggcgatttgcctatgttaatacaatgatatattctattc

SEQ ID NO: 6841 - protein, 143 aa, Zea mays subsp. mays
  peptide (1)..(143): Ceres Seq. ID no. 12356448
MGYLKMDEEFLKRGESGGTCCVIALLRKGRLVVSNIGDCHVVLSRAGKAKVLTSDHRASQEDEKQRIENLGGFVVNYHGTWRVQGSLAVSRGNGDGHLKQWVVADRETRTLLIDHQCEFLILASDGLWGKIDNQDAVDQNSRH

SEQ ID NO: 6842 - protein, 138 aa, Zea mays subsp. mays
  peptide (1)..(138): Ceres Seq. ID no. 12356449
MDEEFLKRGESGGTCCVIALLRKGRLVVSNIGDCHVVLSRAGKAKVLTSDHRASQEDEKQRIENLGGFVVNYHGTWRVQGSLAVSRGNGDGHLKQWVVADRETRTLLIDHQCEFLILASDGLWGKIDNQDAVDQNSRH

SEQ ID NO: 6843 - protein, 108 aa, Zea mays subsp. mays
  peptide (1)..(108): Ceres Seq. ID no. 12356450
MEVGPRDGLQNEKDIVPTPVKVELIRRLATSGLPVVEATSFVSPKRVPQAGLRLFHPPLLRGGLGRHHGVTRGVLCSRDDSRELSRWVTSRWTRSSSRGARAGARAAS

SEQ ID NO: 6844 - DNA, 2067 bp, Zea mays subsp. mays
  misc_feature (1)..(2067): Ceres Seq. ID no. 12409009
  misc_feature (1)..(2067): Ortholog of  Ceres SEQ ID NO 14315146 as cited in SEQ ID NO 52929
  misc_feature (1)..(2067): Ortholog of  Ceres SEQ ID NO 14302263 as cited in SEQ ID NO 64701
  misc_feature (1)..(2067): Ortholog of  Ceres SEQ ID NO 13584538 as cited in SEQ ID NO 64739
  misc_feature (1)..(2067): Ortholog of  Ceres SEQ ID NO 15169643 as cited in SEQ ID NO 64826
  misc_feature (1)..(2067): Ortholog of  Ceres SEQ ID NO 15169647 as cited in SEQ ID NO 64930
ccatccagtcctggagcctgcgcggctgcgccttgcatcgcatctccgtcgtcgtcctcgcccacggaatccgtccaattccccacgccgcccgtcgtccttttctataaaattcactccgccaccaaatctcgaatccccatcgcgctgcttttccaccgaccccgacgccgacgccgacgccaccgccgctccctccccagtccccactccccttcccgggccgcggagcagagatccggggcgccgcgcgatggcgaacatcgacatggcgaagatcctggcggacctggaccgcggcgccagcggcggcgacgcgcgggtgcccaagaccaagctcgtatgcacgctcggcccggcctcccgcaccgtgcccatgctcgagaagctgctccgcgccggcatgaacgtcgcgcgcttcaacttctcccacggcacccacgagtaccaccaggagacgctcgacaacctccgccaggccatgcacaacaccggcatcctctgcgccgtcatgctcgacaccaagggtcctgagatccgtacagggtttttgaaggatggtaaaccgattaagctaaccaagggtcaagaaatcactgtcaccactgattatgatatcaagggtgacgaaaatacgattgctatgagttacaagaaactgcctgttgacgtgaagcctggaaatgtcatactctgcgcagatggtactatctctctggccgttctatcttgtgatcctgatgctggaactgtgaggtgtagatgcgagaacactgcaatgcttggtgagagaaagaactgcaatctgccaggaattgttgtggatcttcctacattgactgagaaagataaagaagacattttgggctggggtgttccaaatgatattgacatgattgctctatcctttgtccgtaaaggatcagatttggtgactgtgagacaggttcttgggcagcatgccaagcgcattaagttgatgtcaaaggttgaaaaccaagagggtgttgtaaactttgatgagatcttgagggagactgatgcttttatggttgctagaggtgatcttggaatggagattcctgttgagaagattttccttgcgcagaagatgatgatctacaagtgcaacattgctggcaaacctgttgttaccgctacccagatgctcgagtcgatgatcaaatcccctaggcccacccgcgcagaggccactgacgttgcaaatgctgttcttgatggaactgactgtgtcatgctcagtggtgagagtgctgctggagcctaccccgaggtggctgtgaagatcatggctcgtatctgcatcgaggcagagtcttccctggaccacgaggcagttttcaaggccatgatcaggtccgcgcctcttccaatgagccctctggagtctcttgcgtcatctgctgtgcgaactgccaacaaggccaaggccgcactgatcgtcgtcttgactcgcggtggcaccacggccaaactggtcgccaagtacccccagggttcccatcctctctgttgtggtacccgtgctaacgacggattctttcgactggaccatcagctccgagggcccagctaggcacagcctgatctatagaggcctcattcccctcctcgctgagggctccgcgaaggctacggattcagagtcaaccgaggtgatcctggaggctgcgctcaagtcggccgtgcagaagcaactttgcaagcctggtgatgccattgtggctctccatcgtatcggcgtcgcctccgtcatcaagatctgcatcgtgaagtgatcaccgtgacttgactcctaagtcccaggggggtggttctcaccgctgggacctatgaaacaacttttctgcctcctttttaactgcatttttcggagacagataattactgtatgttgtaagcccgcttctgttgtttgcagctgcaagatgtctttttttttgtttacatagtttttgagctggtaaatgaggagggagaggactccattgatgttagtggtaataagatttgtatctacggagttcagttaaaaggcttttctac

SEQ ID NO: 6845 - protein, 531 aa, Zea mays subsp. mays
  peptide (1)..(531): Ceres Seq. ID no. 12409010
HPVLEPARLRLASHLRRRPRPRNPSNSPRRPSSFSIKFTPPPNLESPSRCFSTDPDADADATAAPSPVPTPLPGPRSRDPGRRAMANIDMAKILADLDRGASGGDARVPKTKLVCTLGPASRTVPMLEKLLRAGMNVARFNFSHGTHEYHQETLDNLRQAMHNTGILCAVMLDTKGPEIRTGFLKDGKPIKLTKGQEITVTTDYDIKGDENTIAMSYKKLPVDVKPGNVILCADGTISLAVLSCDPDAGTVRCRCENTAMLGERKNCNLPGIVVDLPTLTEKDKEDILGWGVPNDIDMIALSFVRKGSDLVTVRQVLGQHAKRIKLMSKVENQEGVVNFDEILRETDAFMVARGDLGMEIPVEKIFLAQKMMIYKCNIAGKPVVTATQMLESMIKSPRPTRAEATDVANAVLDGTDCVMLSGESAAGAYPEVAVKIMARICIEAESSLDHEAVFKAMIRSAPLPMSPLESLASSAVRTANKAKAALIVVLTRGGTTAKLVAKYPQGSHPLCCGTRANDGFFRLDHQLRGPS

SEQ ID NO: 6846 - protein, 447 aa, Zea mays subsp. mays
  peptide (1)..(447): Ceres Seq. ID no. 12409011
MANIDMAKILADLDRGASGGDARVPKTKLVCTLGPASRTVPMLEKLLRAGMNVARFNFSHGTHEYHQETLDNLRQAMHNTGILCAVMLDTKGPEIRTGFLKDGKPIKLTKGQEITVTTDYDIKGDENTIAMSYKKLPVDVKPGNVILCADGTISLAVLSCDPDAGTVRCRCENTAMLGERKNCNLPGIVVDLPTLTEKDKEDILGWGVPNDIDMIALSFVRKGSDLVTVRQVLGQHAKRIKLMSKVENQEGVVNFDEILRETDAFMVARGDLGMEIPVEKIFLAQKMMIYKCNIAGKPVVTATQMLESMIKSPRPTRAEATDVANAVLDGTDCVMLSGESAAGAYPEVAVKIMARICIEAESSLDHEAVFKAMIRSAPLPMSPLESLASSAVRTANKAKAALIVVLTRGGTTAKLVAKYPQGSHPLCCGTRANDGFFRLDHQLRGPS

SEQ ID NO: 6847 - protein, 442 aa, Zea mays subsp. mays
  peptide (1)..(442): Ceres Seq. ID no. 12409012
MAKILADLDRGASGGDARVPKTKLVCTLGPASRTVPMLEKLLRAGMNVARFNFSHGTHEYHQETLDNLRQAMHNTGILCAVMLDTKGPEIRTGFLKDGKPIKLTKGQEITVTTDYDIKGDENTIAMSYKKLPVDVKPGNVILCADGTISLAVLSCDPDAGTVRCRCENTAMLGERKNCNLPGIVVDLPTLTEKDKEDILGWGVPNDIDMIALSFVRKGSDLVTVRQVLGQHAKRIKLMSKVENQEGVVNFDEILRETDAFMVARGDLGMEIPVEKIFLAQKMMIYKCNIAGKPVVTATQMLESMIKSPRPTRAEATDVANAVLDGTDCVMLSGESAAGAYPEVAVKIMARICIEAESSLDHEAVFKAMIRSAPLPMSPLESLASSAVRTANKAKAALIVVLTRGGTTAKLVAKYPQGSHPLCCGTRANDGFFRLDHQLRGPS

SEQ ID NO: 6848 - DNA, 1386 bp, Zea mays subsp. mays
  misc_feature (1)..(1386): Ceres Seq. ID no. 13492826
  misc_feature (1)..(1386): Ortholog of  Ceres SEQ ID NO 14312320 as cited in SEQ ID NO 59385
actgagcaactcaaaaaggccaaaacccttccccaggggccgtctcgctagtcgctactcactgtaccgcaccgccgccgccgtctcgcacacggggcacaggacgcgcgcgatccccttgagtccggattgccatggccaccacggcgttcgccgccgccaggttcttccccgcccacctcgactcctccccacgcatcgcgccccaccgcgtcgggcccaccgcgaatctctccttctcaccgctttccgccaactcctcgtccctgcgccgcctccattccccctgcccatccggccccgggggtaggctgcccccgccgccgcgatcgtacggcggcgccggcggatctggcgacgccgcgaactccggtggcggcgaaggccgccgcggaggcatcctcgggctcctcctcgccgggtgggccgcccgcgtcgctgcggacccgcagttccctttcaaggtgctcatggaggagctcgtcggcgtcaccgcttgcgtgcttggcgacatggcctcccgccctaacttcggcctcaacgagttggacttcgtcttctccacgctcgtcgtcggatccatcctcaacttcgtcctcatgtacctcctcgcccccaccgccggcgtcgccgccgccgcgtcgtccgccgcgtccgcgctccccagccacatgttcgagcccggcgcgtactccctcggctcccgcgtcgccacgatcatgtccaagggcgccaccttcgcggtggtcgggttcgcggccgggctcaccggaaccgcgatctccaacgggctgatcgcgatgcggaagcgcatggacccggcgttcgagacgcccaacaagccgccgcccacgctgctcaacgcggccacctgggcgctccacatgggtgtcagcagcaacctgcggtaccagacgctgaatgggatcgagtacctgctcggcaaggtcgcaccggcgccggtgttcaaggtgtccgttgttgctctccgctgcatgaacaacgtgctgggtgggatgtccttcgtgctgcttgccaggctgaccggggcgcagaaatcagacaagccagcgacggtcgcggaagagaaggagaggttgatagctgtgggcaatgccgcagcagatgccatcaacgaggcgaggcatggagagggtaagtaggtggtagaggagagagacgagtaagttgatggtgcatcatctcagactcgtttgctggttcttggacatagaccaagaaactcacctagtcacctgtagagttggttggaataaggagtggagtgaggttcagaacttcttttttaaaaaactctgtttgtggtttatcggtgttgatgatgacatgcttagtgatggtagaataaagtttttttttcctccc

SEQ ID NO: 6849 - protein, 342 aa, Zea mays subsp. mays
  peptide (1)..(342): Ceres Seq. ID no. 13492827
MATTAFAAARFFPAHLDSSPRIAPHRVGPTANLSFSPLSANSSSLRRLHSPCPSGPGGRLPPPPRSYGGAGGSGDAANSGGGEGRRGGILGLLLAGWAARVAADPQFPFKVLMEELVGVTACVLGDMASRPNFGLNELDFVFSTLVVGSILNFVLMYLLAPTAGVAAAASSAASALPSHMFEPGAYSLGSRVATIMSKGATFAVVGFAAGLTGTAISNGLIAMRKRMDPAFETPNKPPPTLLNAATWALHMGVSSNLRYQTLNGIEYLLGKVAPAPVFKVSVVALRCMNNVLGGMSFVLLARLTGAQKSDKPATVAEEKERLIAVGNAAADAINEARHGEGK

SEQ ID NO: 6850 - protein, 230 aa, Zea mays subsp. mays
  peptide (1)..(230): Ceres Seq. ID no. 13492828
MEELVGVTACVLGDMASRPNFGLNELDFVFSTLVVGSILNFVLMYLLAPTAGVAAAASSAASALPSHMFEPGAYSLGSRVATIMSKGATFAVVGFAAGLTGTAISNGLIAMRKRMDPAFETPNKPPPTLLNAATWALHMGVSSNLRYQTLNGIEYLLGKVAPAPVFKVSVVALRCMNNVLGGMSFVLLARLTGAQKSDKPATVAEEKERLIAVGNAAADAINEARHGEGK

SEQ ID NO: 6851 - protein, 216 aa, Zea mays subsp. mays
  peptide (1)..(216): Ceres Seq. ID no. 13492829
MASRPNFGLNELDFVFSTLVVGSILNFVLMYLLAPTAGVAAAASSAASALPSHMFEPGAYSLGSRVATIMSKGATFAVVGFAAGLTGTAISNGLIAMRKRMDPAFETPNKPPPTLLNAATWALHMGVSSNLRYQTLNGIEYLLGKVAPAPVFKVSVVALRCMNNVLGGMSFVLLARLTGAQKSDKPATVAEEKERLIAVGNAAADAINEARHGEGK

SEQ ID NO: 6852 - DNA, 1216 bp, Zea mays subsp. mays
  misc_feature (1)..(1216): Ceres Seq. ID no. 12350011
  misc_feature (1)..(1216): Ortholog of  Ceres SEQ ID NO 13598511 as cited in SEQ ID NO 64088
  misc_feature (1)..(1216): Ortholog of  Ceres SEQ ID NO 14316032 as cited in SEQ ID NO 68725
  misc_feature (1)..(1216): Ortholog of  Ceres SEQ ID NO 15179110 as cited in SEQ ID NO 0
cccctggcattgcttgccacccctgcaactgcaactgcaacacagagaaagatagcgctatccagaggatcagctccggtcatccagtgaagctcaggctactctacctcgctctcggccatggcgtcaggggaagcagcagagccactgcagtacacggtgagcgagagcttcttctgcacgcacgcgctacatttccctgtcatatcgcctggcgtcttactctctgcagaccaccgcgctgcgggtgtccatccactgcgagggctgcaagaagaaggtcaagaaggtgctccacagcatcgaaggcgtgtacaaggtgacggtggacgcggcgcagcacaaggtgacggtcaccggcagcgtggaagccgacgcgctcgtccggcgcctgcacaaggccggcaagcaggcggcgctctggcccagctcgccggcacccgtcgaggccaagatgaagcccgaggaggtcgcgcctgccgcgttgcctgcggcagccgccaacaaggacgctagggcccaggagaagaagccggccaaggacaagaaggccgactacgccgaggccgcggcgaaaccgagcaaggacaagacggtcgacataggcgaggccgcggcgaagcccagcaaggacgagaaggccgacaaaggcgaggccgcggcgaaacccagccaggacgagaaggctggcaaaggcgagccggccccggagacgaagaagggctcccctgcgccggggaagcaggacgccgcggaggaggctggcgcggacaagcccggcggcggcggcggcggcaagaagggcaagaagaacaagaatcccaacaaaccgctggactgcggcggcgaggccccggccgagaagcaggcgtcgccggggcccgagagcccgcacgtgcacggcggcgccttcccgtactacgcggcgcacccggtgctgagctgctacaacgtggcgcacccgagctcgagcgtgtcgtactacgcgcccgccgccgtggtgccgtacggcgggttcccgcccatggtgccggcggagttcatgtacggcccgccgggcatgcaggagtctagcatgctcacgaggacaacgccaactcgtgcagcctcatgtgatgtctgtcacgcacgcgccgccgctatacctacctacattgtcaaattaggcggtcaaagctcttgcttgttgaccagagattagttctttgaattgctc

SEQ ID NO: 6853 - protein, 248 aa, Zea mays subsp. mays
  peptide (1)..(248): Ceres Seq. ID no. 12350012
MKPEEVAPAALPAAAANKDARAQEKKPAKDKKADYAEAAAKPSKDKTVDIGEAAAKPSKDEKADKGEAAAKPSQDEKAGKGEPAPETKKGSPAPGKQDAAEEAGADKPGGGGGGKKGKKNKNPNKPLDCGGEAPAEKQASPGPESPHVHGGAFPYYAAHPVLSCYNVAHPSSSVSYYAPAAVVPYGGFPPMVPAEFMYGPPGMQESSMLTRTTPTRAASCDVCHARAAAIPTYIVKLGGQSSCLLTRD

SEQ ID NO: 6854 - protein, 131 aa, Zea mays subsp. mays
  peptide (1)..(131): Ceres Seq. ID no. 12350013
MASGEAAEPLQYTVSESFFCTHALHFPVISPGVLLSADHRAAGVHPLRGLQEEGQEGAPQHRRRVQGDGGRGAAQGDGHRQRGSRRARPAPAQGRQAGGALAQLAGTRRGQDEARGGRACRVACGSRQQGR

SEQ ID NO: 6855 - DNA, 1561 bp, Zea mays subsp. mays
  misc_feature (1)..(1561): Ceres Seq. ID no. 12344531
  misc_feature (1)..(1561): Ortholog of  Ceres SEQ ID NO 15175496 as cited in SEQ ID NO 56127
  misc_feature (1)..(1561): Ortholog of  Ceres SEQ ID NO 15175700 as cited in SEQ ID NO 58584
  misc_feature (1)..(1561): Ortholog of  Ceres SEQ ID NO 13596474 as cited in SEQ ID NO 62169
  misc_feature (1)..(1561): Ortholog of  Ceres SEQ ID NO 13598714 as cited in SEQ ID NO 62656
  misc_feature (1)..(1561): Ortholog of  Ceres SEQ ID NO 13596969 as cited in SEQ ID NO 63375
  misc_feature (1)..(1561): Ortholog of  Ceres SEQ ID NO 13597519 as cited in SEQ ID NO 64759
  misc_feature (1)..(1561): Ortholog of  Ceres SEQ ID NO 13597870 as cited in SEQ ID NO 64982
  misc_feature (1)..(1561): Ortholog of  Ceres SEQ ID NO 13656123 as cited in SEQ ID NO 65212
  misc_feature (1)..(1561): Ortholog of  Ceres SEQ ID NO 13595926 as cited in SEQ ID NO 67778
  misc_feature (1)..(1561): Ortholog of  Ceres SEQ ID NO 12567001 as cited in SEQ ID NO 0
acaacaagcagaagcagaagcagaagctagcagctagtagacgagcgacgagtagctagctagctagctatctagagagctcatcatatcgctgctcgctctcatccaccattatagagaagagcagatcgagctgcagctggcagaggccgagttgttgctagctagctcctgcttgctaaatttgcatcgtatccgatccattccatgaagaagtcgtcgatgatggcgcccatgacgatcatggcgagagttgccgctgtgctcgtcctctcgtcggctgccatggcttccgccgcaggagcagctgggctggacatgaatttctacggcagcacgtgcccgcgcgtggaggccatcgtcaaggaggagatggtggcgatcctcaaggcggcgccgacgctggccggcccgctgctccgcctccatttccacgactgcttcgtcaggggctgcgacgcctccgtgctcctggactcgactcccaccagcacggcggagaaggacgccaccccgaacctcaccctccggggcttcggctccgtgcagcgcgtcaaggaccggctggaggaggcgtgcccgggcaccgtctcctgctccgacgtcctggcgctcatggcgcgcgacgccgtcgtgctggccaacggcccctcctggcccgtcgcgctgggccgccgcgacggccgcgtctccctcgccaacgagaccaaccagctgcccccgcccaccgccaacttcacccgcctcgtcagcatgttcgccgccaagggcctctccgtcagggacctcgtcgtgctctccggcggccacaccctcggcaccgcgcactgcaacctcttcagcgaccgcctctacaacttcaccggcgccaacagcctcgccgacgtcgacccggcgctcgacgccgcctacctcgcccgcctcaggtccaggtgccggagcctcgccgacaacaccacgctcaacgagatggaccccggcagcttcctcagcttcgactccagctactacagcctggtggccaggcgccgggggctcttccactccgacgccgcgctgctcaccgacccggccaccagggcgtacgtccagcgccaggccacggggctcttcaccgccgagttcttccgcgacttcgccgactccatggtcaagatgtccaccatcgacgtgctcaccggccagcagcagggcgagatcagaaagaaatgcaacctcgtcaactgacaaataatacgtacattaattgctgctggttttgacgatgcctttcacttacgttcatccacttaattcatgcatccatgttggttgggttcattcaattattatattcgttgcttacctttacttttgcttggttaatcttaattaaatcgtgtgagttttcttttcttttcttgagtatatatatgtatgtacgtagagcgtgatgagtgtcttttcaagtttattgtttttttttactttttcctctcgtgcatatggttcaaatccatgatgatgatgtaatgcatgtaattaataatgacaatcaagtcaataaacacacatgcaattt

SEQ ID NO: 6856 - protein, 339 aa, Zea mays subsp. mays
  peptide (1)..(339): Ceres Seq. ID no. 12344532
MKKSSMMAPMTIMARVAAVLVLSSAAMASAAGAAGLDMNFYGSTCPRVEAIVKEEMVAILKAAPTLAGPLLRLHFHDCFVRGCDASVLLDSTPTSTAEKDATPNLTLRGFGSVQRVKDRLEEACPGTVSCSDVLALMARDAVVLANGPSWPVALGRRDGRVSLANETNQLPPPTANFTRLVSMFAAKGLSVRDLVVLSGGHTLGTAHCNLFSDRLYNFTGANSLADVDPALDAAYLARLRSRCRSLADNTTLNEMDPGSFLSFDSSYYSLVARRRGLFHSDAALLTDPATRAYVQRQATGLFTAEFFRDFADSMVKMSTIDVLTGQQQGEIRKKCNLVN

SEQ ID NO: 6857 - protein, 334 aa, Zea mays subsp. mays
  peptide (1)..(334): Ceres Seq. ID no. 12344533
MMAPMTIMARVAAVLVLSSAAMASAAGAAGLDMNFYGSTCPRVEAIVKEEMVAILKAAPTLAGPLLRLHFHDCFVRGCDASVLLDSTPTSTAEKDATPNLTLRGFGSVQRVKDRLEEACPGTVSCSDVLALMARDAVVLANGPSWPVALGRRDGRVSLANETNQLPPPTANFTRLVSMFAAKGLSVRDLVVLSGGHTLGTAHCNLFSDRLYNFTGANSLADVDPALDAAYLARLRSRCRSLADNTTLNEMDPGSFLSFDSSYYSLVARRRGLFHSDAALLTDPATRAYVQRQATGLFTAEFFRDFADSMVKMSTIDVLTGQQQGEIRKKCNLVN

SEQ ID NO: 6858 - protein, 333 aa, Zea mays subsp. mays
  peptide (1)..(333): Ceres Seq. ID no. 12344534
MAPMTIMARVAAVLVLSSAAMASAAGAAGLDMNFYGSTCPRVEAIVKEEMVAILKAAPTLAGPLLRLHFHDCFVRGCDASVLLDSTPTSTAEKDATPNLTLRGFGSVQRVKDRLEEACPGTVSCSDVLALMARDAVVLANGPSWPVALGRRDGRVSLANETNQLPPPTANFTRLVSMFAAKGLSVRDLVVLSGGHTLGTAHCNLFSDRLYNFTGANSLADVDPALDAAYLARLRSRCRSLADNTTLNEMDPGSFLSFDSSYYSLVARRRGLFHSDAALLTDPATRAYVQRQATGLFTAEFFRDFADSMVKMSTIDVLTGQQQGEIRKKCNLVN

SEQ ID NO: 6859 - DNA, 1220 bp, Zea mays subsp. mays
  misc_feature (1)..(1220): Ceres Seq. ID no. 13492573
  misc_feature (1)..(1220): Ortholog of  Ceres SEQ ID NO 13595668 as cited in SEQ ID NO 56792
agccgctttacaactccccaccccatcccatccacacacacttcacccagcgcggcggccgccggccgccggcaatggaggccgtggcgcacagcggcgactacctttggcggttcgtggcggagacagagtggtacaacgaggttgtcctcagcgccgtggcgccaggcgactggtggcgcggcctgccgcacccggtgcagtcatggatgcgcaactgcgtcggcggttacctcctctatttcatctctggtttcctctggtgcttcgtcatctactactggaagcgccacgcctacatccccaaagatgccatccccacaaatgacgctatgaagaagcaaatagttgtagcatcgaaggctatgcctttttactgcgctcttccaactttatctgaatatatgattgagagcggatggactcagtgctacttcaatatcagcgaaattggtttttctatgtacctctgttatatggctatgtatctcatctttgtggagtttggaatttactggatgcacagggagttgcatgacataaaaccattatacaaatatctgcatgcaacccaccatatttacaacaaggagaataccttgtctccatttgctggacttgcatttcatccactggatggtattctgcaagcaataccacatgtgttcgcgctcttcctctttccaacgcacttcaggacacatattgcactcttgttcctagaggctgtgtggacaacaaacatccacgactgcattcatggcaagatatggccagtcatgggtgctggatatcacaccattcaccatacgacttaccgtcacaactatggccactacaccatctggatggactggatgtttggtacgctcaatgagccagaagatatcctcaagaaggcttgagtttctcggagctgtggtattcctatggtgctgctgctggaactgctcgatctgttcccagtgtttctaatccgttgagcctgttcagcactgtctgtttatgtaggcatcagtgtgttaattactttgctaggttcatatggctttgtgcttattctgtaatttagcgatgtttgtctcatgacgcaacggagttcaggacgaataaaactttgctagacacattctggattccagttgcttgtacaatgttggaactcaactgtcaatataggatgtaaaacggattccttctagtcttgtacctggtgagtt

SEQ ID NO: 6860 - protein, 300 aa, Zea mays subsp. mays
  peptide (1)..(300): Ceres Seq. ID no. 13492574
PLYNSPPHPIHTHFTQRGGRRPPAMEAVAHSGDYLWRFVAETEWYNEVVLSAVAPGDWWRGLPHPVQSWMRNCVGGYLLYFISGFLWCFVIYYWKRHAYIPKDAIPTNDAMKKQIVVASKAMPFYCALPTLSEYMIESGWTQCYFNISEIGFSMYLCYMAMYLIFVEFGIYWMHRELHDIKPLYKYLHATHHIYNKENTLSPFAGLAFHPLDGILQAIPHVFALFLFPTHFRTHIALLFLEAVWTTNIHDCIHGKIWPVMGAGYHTIHHTTYRHNYGHYTIWMDWMFGTLNEPEDILKKA

SEQ ID NO: 6861 - protein, 276 aa, Zea mays subsp. mays
  peptide (1)..(276): Ceres Seq. ID no. 13492575
MEAVAHSGDYLWRFVAETEWYNEVVLSAVAPGDWWRGLPHPVQSWMRNCVGGYLLYFISGFLWCFVIYYWKRHAYIPKDAIPTNDAMKKQIVVASKAMPFYCALPTLSEYMIESGWTQCYFNISEIGFSMYLCYMAMYLIFVEFGIYWMHRELHDIKPLYKYLHATHHIYNKENTLSPFAGLAFHPLDGILQAIPHVFALFLFPTHFRTHIALLFLEAVWTTNIHDCIHGKIWPVMGAGYHTIHHTTYRHNYGHYTIWMDWMFGTLNEPEDILKKA

SEQ ID NO: 6862 - protein, 231 aa, Zea mays subsp. mays
  peptide (1)..(231): Ceres Seq. ID no. 13492576
MRNCVGGYLLYFISGFLWCFVIYYWKRHAYIPKDAIPTNDAMKKQIVVASKAMPFYCALPTLSEYMIESGWTQCYFNISEIGFSMYLCYMAMYLIFVEFGIYWMHRELHDIKPLYKYLHATHHIYNKENTLSPFAGLAFHPLDGILQAIPHVFALFLFPTHFRTHIALLFLEAVWTTNIHDCIHGKIWPVMGAGYHTIHHTTYRHNYGHYTIWMDWMFGTLNEPEDILKKA

SEQ ID NO: 6863 - DNA, 1998 bp, Zea mays subsp. mays
  misc_feature (1)..(1998): Ceres Seq. ID no. 12356403
  misc_feature (1)..(1998): Ortholog of  Ceres SEQ ID NO 13585587 as cited in SEQ ID NO 65515
actacgcccaggacacgacagggcgctgcttgttgccgattgctagctggtaaagggtaggccggtgcgtctagctaccttggttggttgggtgccggaatttccatggaggtcgcggtcgtggaaagtcctcgtcctcctccgccgccgccgcaggccaaggaggagaagaggtccgacgccaccaagccagagatcgccgcatcgatggtaggaagcgctctcccaatagtcttcgaaagctttccgtcgacgcaaagagaagcggcggcggcgggcgtcaaacaggaggagcgcaggctggaggcggccagggcggagatgggcgaggtgagggaggagaacgagcgcctcaagtcgatgctgtcccgcatcgtcggccagtaccagtccctgcagacgcacttcctcgacgtcgtcaaggtgcgcgagctggcatcatcgtcagccaagcggcggcagagaacaagatccccgcggcgccggctctgctgcccggcaccgacgacggcgacgaaccctacgacgacctcgtctccctgagcctcggcacgagggcgaatagcagcggcggcggccctcgccgcaaggggcacgacgacaggtcggcgtcctcgtctggcaccgctgacgagatgcccaataccgccgacgacgaacgccgccaccagatctccctcggtctcggcttcgcgcgcgggcttccgccatcgggcacggcggcggccgcggacgacgacaaggccagccacgacgcgtccacggcgccggtcctgaacctgagctccgacagcagcggcagcgccggggacaccgacaccacgaagcctgccctggccgccgcgggcgccgcccgtaagagcccgagtgccggtgccggagacgggtcagctgacgacgaggtgcagcagcaggccaagaaggctagggtttccgtcagggtcaagtgtgacactcccacgatgcccgatggctgccaatggcggaagtacgggcagaagatctccaaggggaacccgtccccgcgcgcctactaccgctgcacggtggcgccgcactgcccggtgaggaagcaggtgcagcggtgcgcggaggacacgtcggtcctgatcaccacgtacgattgcgcgcacaaccacccgctcccgccggcggcgacggccatggcgtccacgacctccgcggcggtggccatgctcacctatggatccaccacctccgccgcctcggcctcgctcgtccacggccaccaataccactcgctggcggccgccgccgggcttctcggcccccaccaccatggtctccaccgccgcgtcctgccccaccatcacgctcgacctcacctcccccgccgcgccgcactccctcgtgcactcctccttgccctacgccgccgccgccgccgcagcagcagcggggttcgagtccaaggcggtccccgcggcgtggagcagcgggtacctggcgtacggcggcgcccacccgtcctacgacaccaagatctcgtcggcgttggggcacctgttcggtgggaagcctgggcgtgccatcgagaccggaacagcctgtacgcccagtcgtacctgcagagagctaatagcctgggcgacggccatggtgcggtggcgcccgccgtcacggacacgctcgcgaaggcgatcacgtcggatccgagcttccagtcggtgctggcagcggcgatcacgtccgtcatggggcgcggcggagccgctgctacccagaagtgatcaagatcgatggcgcatgcagcattcgctcatgcataagatcgacttgcaagggcagatcgccgtttttgaccccacacacataggcatgcatggatcggtggttcatgtgtaattaataattccatcacatggttaatttttctttgttcattggagtgttagtaattggccggcttgggaaatgggaatagtgatcataatatgtcaatgtaacagggataatcaatttgatcgatagatgtac

SEQ ID NO: 6864 - protein, 371 aa, Zea mays subsp. mays
  peptide (1)..(371): Ceres Seq. ID no. 12356404
MPNTADDERRHQISLGLGFARGLPPSGTAAAADDDKASHDASTAPVLNLSSDSSGSAGDTDTTKPALAAAGAARKSPSAGAGDGSADDEVQQQAKKARVSVRVKCDTPTMPDGCQWRKYGQKISKGNPSPRAYYRCTVAPHCPVRKQVQRCAEDTSVLITTYDCAHNHPLPPAATAMASTTSAAVAMLTYGSTTSAASASLVHGHQYHSLAAAAGLLGPHHHGLHRRVLPHHHARPHLPRRAALPRALLLALRRRRRRSSSGVRVQGGPRGVEQRVPGVRRRPPVLRHQDLVGVGAPVRWEAWACHRDRNSLYAQSYLQRANSLGDGHGAVAPAVTDTLAKAITSDPSFQSVLAAAITSVMGRGGAAATQK

SEQ ID NO: 6865 - protein, 262 aa, Zea mays subsp. mays
  peptide (1)..(262): Ceres Seq. ID no. 12356405
MPDGCQWRKYGQKISKGNPSPRAYYRCTVAPHCPVRKQVQRCAEDTSVLITTYDCAHNHPLPPAATAMASTTSAAVAMLTYGSTTSAASASLVHGHQYHSLAAAAGLLGPHHHGLHRRVLPHHHARPHLPRRAALPRALLLALRRRRRRSSSGVRVQGGPRGVEQRVPGVRRRPPVLRHQDLVGVGAPVRWEAWACHRDRNSLYAQSYLQRANSLGDGHGAVAPAVTDTLAKAITSDPSFQSVLAAAITSVMGRGGAAATQK

SEQ ID NO: 6866 - protein, 220 aa, Zea mays subsp. mays
  peptide (1)..(220): Ceres Seq. ID no. 12356406
MDPPPPPPRPRSSTATNTTRWRPPPGFSAPTTMVSTAASCPTITLDLTSPAAPHSLVHSSLPYAAAAAAAAAGFESKAVPAAWSSGYLAYGGAHPSYDTKISSALGHLFGGKPGRAIETGTACTPSRTCRELIAWATAMVRWRPPSRTRSRRRSRRIRASSRCWQRRSRPSWGAAEPLLPRSDQDRWRMQHSLMHKIDLQGQIAVFDPTHIGMHGSVVHV

SEQ ID NO: 6867 - DNA, 1407 bp, Zea mays subsp. mays
  misc_feature (1)..(1407): Ceres Seq. ID no. 12353910
  misc_feature (1)..(1407): Ortholog of  Ceres SEQ ID NO 15169655 as cited in SEQ ID NO 64922
  misc_feature (1)..(1407): Ortholog of  Ceres SEQ ID NO 13596004 as cited in SEQ ID NO 68212
aaaaaaaactgcgctccgaataccccagacccccgatcctcccaatggccaccgcattttcgctgcgcgctgcggccccggccaccgctccccgcgccgtctcccgatccacctccgcggcgagggtcgtgcccatggcatcggcactggcgggacgcggaaggctggtggcgcgtgcagcagttacagcaaaggcggatgtgccatcgagcacgtccgacggccatgaggtcttgctgtttgaagctcttcgtgaggccttgatggaagagatggaattagatccaacagtgtgtgtgtttggtgaagatgttggccattacggtggttcttacaaggtgacaaaaggtttggctgatacgtttggtgaccttcgagttctggacacccctattgcggagaactcgtttactggcatgggagttggagcgggaatgaaagggctgaggcccgtcgttgaaggcatgaacatgggattcctgctccttgcttacaaccagatctcaaataactgtggcatgcttcattacacttccggcggccagttcaaaatcccacttgtgatccgtggccccggtggtgtgggtcgtcagcttggagcagagcactcgcagcgcctggaatcgtatttccagtccatcccaggcctgcagatggtcgcctgctcgactccttacaacgctaagggcctgatgaaagctgccatcaggagcgagaaccctgtggtgctgtttgagcacgtccttctgtacaacctgaaggagaaaatcccggacgaggagtacgtgctctgcttggaggaggccgagatggtgcggcctggggagcacgtgactatactcacatactcgcgcatgaggtaccacgtgatgcaggcagcgaagacgctggtgaacaaagggtacgatcccgaggtcatcgacatcaggtcgttgaagccgtttgatctgcacactattggcaactccatcaagaagacccaccgcgtgctgatcgtggaggagtgcatgcgcacgggtgggatcggcgccagccttaggtcggccatcgtcgacaatttctgggactaccttgacgcccccatcatgtgcctgtcatctcaggatgtgcctacgccatatgctgcgactctggaggatgcaaccgttgtgcagcctgcccagatcgtggctgcggtggaacaactatgtgcatagattgtggcctgggacgtttgggagactgttgttgccatgaaaaagccttccgtttgttagttttgtgctgtaacaagcattctttggagacttaaggtgtaggcttatagtcgttttgttcttgttttaagaagtataatccagcttcgtagctgcacggactcgatcttcttgttcctaaatctgcgctatgcaatgccgaatttgatgc

SEQ ID NO: 6868 - protein, 397 aa, Zea mays subsp. mays
  peptide (1)..(397): Ceres Seq. ID no. 12353911
KKLRSEYPRPPILPMATAFSLRAAAPATAPRAVSRSTSAARVVPMASALAGRGRLVARAAVTAKADVPSSTSDGHEVLLFEALREALMEEMELDPTVCVFGEDVGHYGGSYKVTKGLADTFGDLRVLDTPIAENSFTGMGVGAGMKGLRPVVEGMNMGFLLLAYNQISNNCGMLHYTSGGQFKIPLVIRGPGGVGRQLGAEHSQRLESYFQSIPGLQMVACSTPYNAKGLMKAAIRSENPVVLFEHVLLYNLKEKIPDEEYVLCLEEAEMVRPGEHVTILTYSRMRYHVMQAAKTLVNKGYDPEVIDIRSLKPFDLHTIGNSIKKTHRVLIVEECMRTGGIGASLRSAIVDNFWDYLDAPIMCLSSQDVPTPYAATLEDATVVQPAQIVAAVEQLCA

SEQ ID NO: 6869 - protein, 383 aa, Zea mays subsp. mays
  peptide (1)..(383): Ceres Seq. ID no. 12353912
MATAFSLRAAAPATAPRAVSRSTSAARVVPMASALAGRGRLVARAAVTAKADVPSSTSDGHEVLLFEALREALMEEMELDPTVCVFGEDVGHYGGSYKVTKGLADTFGDLRVLDTPIAENSFTGMGVGAGMKGLRPVVEGMNMGFLLLAYNQISNNCGMLHYTSGGQFKIPLVIRGPGGVGRQLGAEHSQRLESYFQSIPGLQMVACSTPYNAKGLMKAAIRSENPVVLFEHVLLYNLKEKIPDEEYVLCLEEAEMVRPGEHVTILTYSRMRYHVMQAAKTLVNKGYDPEVIDIRSLKPFDLHTIGNSIKKTHRVLIVEECMRTGGIGASLRSAIVDNFWDYLDAPIMCLSSQDVPTPYAATLEDATVVQPAQIVAAVEQLCA

SEQ ID NO: 6870 - protein, 353 aa, Zea mays subsp. mays
  peptide (1)..(353): Ceres Seq. ID no. 12353913
MASALAGRGRLVARAAVTAKADVPSSTSDGHEVLLFEALREALMEEMELDPTVCVFGEDVGHYGGSYKVTKGLADTFGDLRVLDTPIAENSFTGMGVGAGMKGLRPVVEGMNMGFLLLAYNQISNNCGMLHYTSGGQFKIPLVIRGPGGVGRQLGAEHSQRLESYFQSIPGLQMVACSTPYNAKGLMKAAIRSENPVVLFEHVLLYNLKEKIPDEEYVLCLEEAEMVRPGEHVTILTYSRMRYHVMQAAKTLVNKGYDPEVIDIRSLKPFDLHTIGNSIKKTHRVLIVEECMRTGGIGASLRSAIVDNFWDYLDAPIMCLSSQDVPTPYAATLEDATVVQPAQIVAAVEQLCA

SEQ ID NO: 6871 - DNA, 1521 bp, Zea mays subsp. mays
  misc_feature (1)..(1521): Ceres Seq. ID no. 12409001
  misc_feature (1)..(1521): Ortholog of  Ceres SEQ ID NO 15177221 as cited in SEQ ID NO 53046
  misc_feature (1)..(1521): Ortholog of  Ceres SEQ ID NO 15170209 as cited in SEQ ID NO 58562
  misc_feature (1)..(1521): Ortholog of  Ceres SEQ ID NO 14315134 as cited in SEQ ID NO 59476
  misc_feature (1)..(1521): Ortholog of  Ceres SEQ ID NO 12616332 as cited in SEQ ID NO 63449
  misc_feature (1)..(1521): Ortholog of  Ceres SEQ ID NO 13597498 as cited in SEQ ID NO 64648
  misc_feature (1)..(1521): Ortholog of  Ceres SEQ ID NO 14308053 as cited in SEQ ID NO 67790
agaaatctccgtgcgtgtttggccgaaatccacgggagggtgctcgtctttgctgagctgctccggcctccggagcggagctctgcctacttaagttcaggcttgttccgccatccgaggacaagattcggagcgtcgccgaagggaggcgatgaaggggaaaggcggggcgatggaccgcaggtcctccgccaggtggagggtgttgctgctctgcgcattcagcttcggcctcggcatgctcttcaccgaccggttctggacagcaccggatagcagtaaccatatcatgtctcaaagccggaggcaagagcaagagctccaacttgtatcagaggattgcagcacaaagaggaagcatggggaagacaaggatataatgggagaggtaaccaagacccatgaagctatacaatcattggataagtccatctcaacgctgcagatggagcttgcagcaaagcggagcacacttgagctgctccgatctagtggttcaccagtaacctttgaaactagccaaccaaggaaaaaggcatttgttgtcattggagtcaatactgcattcagcagccgcaagcgccgtgattctgtccgggagacatggatgcctcaaggagaaaaactgcaacaattagaagaacaaaagggaatagtaatccgcttcactatcgggcacagtgctacatctgacagtatactggacaaagctatagattcagaggacgctcagcatcatgactttcttaggctggaccatgttgagggataccatgaactctcagctaagacaaaaatattcttctctactgctcttggcatctgggatgctgacttctacgtcaaggttgatgatgatgtgcatgtaaacttaggaatgcttgccactacccttgctcggcataaattgaaaccaagaacttatattggctgcatgaagtcaggcccagttctcgctgacaagaatgttaagtaccatgaacctgagtactggaaatttggggaggaaggaaataaatacttccgtcatgccacggggcagatatatgccatttcgaaagatctcgctacttatatttcaatcaaccagcctatcttgcacaaatatgcaaatgaagacgtgtcgcttggatcatggttcattggtttggaagttaatcacattgatgaaaggaacatgtgctgtggaactccaccagattgtgagtggaaagggcaagctggtaatgtctgtgtagcgtccttcgattggagctgcagtggcatatgcaagtctgttgagaggatcaaagatgtacatgctcgctgtggtgagggggattcagcagtttggagtgctcttttctagcgcataccttctttgcccgtaaatatgtagcatacttgctaagctctcgcggcggacaccataggcaactcaagtaaacttgacaaaaaccaaagatcgtggagtatgatctgaaactgcagaaacagtatgttgcttggaaatattctgcaacaacataattttgctccggc

SEQ ID NO: 6872 - protein, 398 aa, Zea mays subsp. mays
  peptide (1)..(398): Ceres Seq. ID no. 12409002
MKGKGGAMDRRSSARWRVLLLCAFSFGLGMLFTDRFWTAPDSSNHIMSQSRRQEQELQLVSEDCSTKRKHGEDKDIMGEVTKTHEAIQSLDKSISTLQMELAAKRSTLELLRSSGSPVTFETSQPRKKAFVVIGVNTAFSSRKRRDSVRETWMPQGEKLQQLEEQKGIVIRFTIGHSATSDSILDKAIDSEDAQHHDFLRLDHVEGYHELSAKTKIFFSTALGIWDADFYVKVDDDVHVNLGMLATTLARHKLKPRTYIGCMKSGPVLADKNVKYHEPEYWKFGEEGNKYFRHATGQIYAISKDLATYISINQPILHKYANEDVSLGSWFIGLEVNHIDERNMCCGTPPDCEWKGQAGNVCVASFDWSCSGICKSVERIKDVHARCGEGDSAVWSALF

SEQ ID NO: 6873 - protein, 391 aa, Zea mays subsp. mays
  peptide (1)..(391): Ceres Seq. ID no. 12409003
MDRRSSARWRVLLLCAFSFGLGMLFTDRFWTAPDSSNHIMSQSRRQEQELQLVSEDCSTKRKHGEDKDIMGEVTKTHEAIQSLDKSISTLQMELAAKRSTLELLRSSGSPVTFETSQPRKKAFVVIGVNTAFSSRKRRDSVRETWMPQGEKLQQLEEQKGIVIRFTIGHSATSDSILDKAIDSEDAQHHDFLRLDHVEGYHELSAKTKIFFSTALGIWDADFYVKVDDDVHVNLGMLATTLARHKLKPRTYIGCMKSGPVLADKNVKYHEPEYWKFGEEGNKYFRHATGQIYAISKDLATYISINQPILHKYANEDVSLGSWFIGLEVNHIDERNMCCGTPPDCEWKGQAGNVCVASFDWSCSGICKSVERIKDVHARCGEGDSAVWSALF

SEQ ID NO: 6874 - protein, 369 aa, Zea mays subsp. mays
  peptide (1)..(369): Ceres Seq. ID no. 12409004
MLFTDRFWTAPDSSNHIMSQSRRQEQELQLVSEDCSTKRKHGEDKDIMGEVTKTHEAIQSLDKSISTLQMELAAKRSTLELLRSSGSPVTFETSQPRKKAFVVIGVNTAFSSRKRRDSVRETWMPQGEKLQQLEEQKGIVIRFTIGHSATSDSILDKAIDSEDAQHHDFLRLDHVEGYHELSAKTKIFFSTALGIWDADFYVKVDDDVHVNLGMLATTLARHKLKPRTYIGCMKSGPVLADKNVKYHEPEYWKFGEEGNKYFRHATGQIYAISKDLATYISINQPILHKYANEDVSLGSWFIGLEVNHIDERNMCCGTPPDCEWKGQAGNVCVASFDWSCSGICKSVERIKDVHARCGEGDSAVWSALF

SEQ ID NO: 6875 - DNA, 1164 bp, Zea mays subsp. mays
  misc_feature (1)..(1164): Ceres Seq. ID no. 12365653
  misc_feature (1)..(1164): Ortholog of  Ceres SEQ ID NO 12608620 as cited in SEQ ID NO 60192
  misc_feature (1)..(1164): Ortholog of  Ceres SEQ ID NO 13662898 as cited in SEQ ID NO 66199
  misc_feature (1)..(1164): Ortholog of  Ceres SEQ ID NO 13654314 as cited in SEQ ID NO 67914
ctcgtaatctctcctgcgtccatcctctcctcgcggcgggggaagaatggccgacccgagcttcctcgtcgggatcgtagggaacgtaatctccatcctcgtcttcgcgtcgccgatagcgacgttccggcgcatcgtgaggagcaggagcacggaggacttcaggtggctgccgtacgtcaccaccctgctcagcaccagcctctggaccttctacggcctcctcaagcccggctgcctcctcgtcgtcaccgtcaacggcgccggcgccgcgctcgaggccgcctacgtcgcgctctacctcgtctacgcgccaagggagaccaaggcgaagatggccaaggtggtggtggccgtgaacgtcgccttccttgccgcggtcgtcgcggtggcgcctgctggcgctgcacggcggcgcccgcctgttcgcggtgggcctgctgtgcgccgcgctcacggtcgggatgtacgcggcaccgctcggcgcgatgcggacggtggtgaagacccggagcgtggagtacatgcccttctccctctccttcttcctcttcctcaacggcggcgtctggagcatctactccctgctcgtcaaggactacttcatcggggtccccaacgccatcggcctcgtcctgggcacggcgcagctgctgctgtacctggcgtaccggaaggcgccggcgagcaaggacgacgacgaggaggcggccgctgctgcgtcgggggacgacggcgacgacgaggaggaggaggaagggctgacgcacctgatggggcagcaggtggagatggcgcagcgcggccgcctgcgcctgcacaaggggcagagcctgcccaagccgccgccgggcgggccgctgtcgtcgccgcgccacgggttcgggagcatcatcaagtccctgtccgccacccccgtcgagctgcactccgtcctgtaccagcacgcccggttccagcccgtcaagaaggacgacgacgacgtggaggccaacgactgactgatatgatgcattaattgatgctgctattgttcgaccgacgtggtagcggtacagaggcgcccttttagtattcaggccagggtagcgttccaatggacagggtttgagtgtgttcttcacatatttgcaggttcgaaacccagatgaattaatatgtttg

SEQ ID NO: 6876 - protein, 323 aa, Zea mays subsp. mays
  peptide (1)..(323): Ceres Seq. ID no. 12365654
MADPSFLVGIVGNVISILVFASPIATFRRIVRSRSTEDFRWLPYVTTLLSTSLWTFYGLLKPGCLLVVTVNGAGAALEAAYVALYLVYAPRETKAKMAKVVVAVNVAFLAAVVAVAPAGAARRRPPVRGGPAVRRAHGRDVRGTARRDADGGEDPERGVHALLPLLLPLPQRRRLEHLLPARQGLLHRGPQRHRPRPGHGAAAAVPGVPEGAGEQGRRRGGGRCCVGGRRRRRGGGGRADAPDGAAGGDGAARPPAPAQGAEPAQAAAGRAAVVAAPRVREHHQVPVRHPRRAALRPVPARPVPARQEGRRRRGGQRLTDMMH

SEQ ID NO: 6877 - protein, 227 aa, Zea mays subsp. mays
  peptide (1)..(227): Ceres Seq. ID no. 12365655
MAKVVVAVNVAFLAAVVAVAPAGAARRRPPVRGGPAVRRAHGRDVRGTARRDADGGEDPERGVHALLPLLLPLPQRRRLEHLLPARQGLLHRGPQRHRPRPGHGAAAAVPGVPEGAGEQGRRRGGGRCCVGGRRRRRGGGGRADAPDGAAGGDGAARPPAPAQGAEPAQAAAGRAAVVAAPRVREHHQVPVRHPRRAALRPVPARPVPARQEGRRRRGGQRLTDMMH

SEQ ID NO: 6878 - protein, 178 aa, Zea mays subsp. mays
  peptide (1)..(178): Ceres Seq. ID no. 12365656
MYAAPLGAMRTVVKTRSVEYMPFSLSFFLFLNGGVWSIYSLLVKDYFIGVPNAIGLVLGTAQLLLYLAYRKAPASKDDDEEAAAAASGDDGDDEEEEEGLTHLMGQQVEMAQRGRLRLHKGQSLPKPPPGGPLSSPRHGFGSIIKSLSATPVELHSVLYQHARFQPVKKDDDDVEAND

SEQ ID NO: 6879 - DNA, 1951 bp, Zea mays subsp. mays
  misc_feature (1)..(1951): Ceres Seq. ID no. 12372631
  misc_feature (1)..(1951): Ortholog of  Ceres SEQ ID NO 13594380 as cited in SEQ ID NO 58039
  misc_feature (1)..(1951): Ortholog of  Ceres SEQ ID NO 13597407 as cited in SEQ ID NO 64106
  misc_feature (1)..(1951): Ortholog of  Ceres SEQ ID NO 15180690 as cited in SEQ ID NO 0
gcacgagaccattacctagaacatcctaatcgaaaaaacggatcaagcgaggtagacgactccgcgtctaattaaacctgtggtctgcggacgggcggtcgtcggttagagcattgcttccgtgtggtgcggttgatagctcggatcttctgctggcggagttcgtcttggaggagaagagagagagagagcgcgcgcgccgggatcggagccaggaagcatccagcagcgatggcgggcggcggggtggcggcgctgggcgtgaagacggaccgcgcggcgcagtacaaggggcgcatgacgctcgccgtcgccacgacctgcctcgtggccgccgtcgggggcgccatcttcggctacgacatcggcatctccggaggcgtgacatccatggacccattcctggagaaattcttcccggtagtgttccaccggaagaactccggcgggaagaacaactactgtaagtacgacaaccagggactagcggcgttcacatcgtcactctacctcgccggcctcgttgcctccctcgtcgcgtcccccgtgacgaggaactacggccgcaaagctagcattgtctgcggcggcgtgagcttcctcatcggcgcggccctcaacgtggccgccgtgaatctggctatgctcatcctcgggcgcatcatgctcggcgtcggcatcggttttggcaaccaggctgtgccgctgtacctgtcggagatggcgccggcgcacctccgcggcggcctgaacatgatgttccagctcgcgacgacgctgggcatcttcacggcgaacctgatcaactatggcacgcagaacatcaagccgtgggggtggcggctgtcgctgggcctcgcggcggtgccggcgctgctgatgacgttgggcgggctctttcttccggagactcccaacagcctcattgagcgcgggcgcgtggaggagggtcggcgcgtgctggagcgcatccggggcacggccgacgtggacgccgagttcacggacatggtggaggcgagcgagctggccaacaccgtcgagcacccgttccggaacatcctgcagccgcgcaaccggccgcagctggtgatggccgtgtgcatgccggcgttccagatcctgacgggcatcaactccatcctcttctacgcgccggtcctgttccagagcatgggtttcggcgggaacgcgtcccctctactcctccgtgctcaccggcgccgtgctcttctcctcgacgctcatctccatcggcatcgtcgaccgcctcggccgccggaagctcctcatcagcggcgggatccagatgatcgtctgccaggtgatcgtggcggtgatcctgggcgtgaagttcggggcggagaagcaactggcgcggagctactcggtcgcggtggtggtggtgatctgcctgttcgttctggcgttcgggtggtcgtggggcccgctgggatggacggtgccgagcgagatcttcccgctggagacgcggtcggcggggcagagcatcacggtggccgtgaacctgctcttcaccttcgccatcgcgcaggcgttcctgtcgctgctgtgcgccttcaagttcggcatcttcctctttttcgcggggtggatcaccgtcatgaccgtgttcgtctacgtcttcctgccggagaccaagggcgtgcccatcgaagagatggtgctgctatggcggaagcactggttctggaagaaggtcatgccggacatgccgctcgaggatggctggggcgcggctgagggtcatgcggcacctgccagcaacaatcacaagggatgactggagtgaagcatgcatggttgcctggttggtttcgtggacactttatataataactgaagaaaacaagacacacactaacatgtaggcggctgcttattcttattgtattttgtataaagcaggctgtgtgatatgcaggggtag

SEQ ID NO: 6880 - protein, 510 aa, Zea mays subsp. mays
  peptide (1)..(510): Ceres Seq. ID no. 12372632
MAGGGVAALGVKTDRAAQYKGRMTLAVATTCLVAAVGGAIFGYDIGISGGVTSMDPFLEKFFPVVFHRKNSGGKNNYCKYDNQGLAAFTSSLYLAGLVASLVASPVTRNYGRKASIVCGGVSFLIGAALNVAAVNLAMLILGRIMLGVGIGFGNQAVPLYLSEMAPAHLRGGLNMMFQLATTLGIFTANLINYGTQNIKPWGWRLSLGLAAVPALLMTLGGLFLPETPNSLIERGRVEEGRRVLERIRGTADVDAEFTDMVEASELANTVEHPFRNILQPRNRPQLVMAVCMPAFQILTGINSILFYAPVLFQSMGFGGNASPLLLRAHRRRALLLDAHLHRHRRPPRPPEAPHQRRDPDDRLPGDRGGDPGREVRGGEATGAELLGRGGGGDLPVRSGVRVVVGPAGMDGAERDLPAGDAVGGAEHHGGREPALHLRHRAGVPVAAVRLQVRHLPLFRGVDHRHDRVRLRLPAGDQGRAHRRDGAAMAEALVLEEGHAGHAARGWLGRG

SEQ ID NO: 6881 - protein, 488 aa, Zea mays subsp. mays
  peptide (1)..(488): Ceres Seq. ID no. 12372633
MTLAVATTCLVAAVGGAIFGYDIGISGGVTSMDPFLEKFFPVVFHRKNSGGKNNYCKYDNQGLAAFTSSLYLAGLVASLVASPVTRNYGRKASIVCGGVSFLIGAALNVAAVNLAMLILGRIMLGVGIGFGNQAVPLYLSEMAPAHLRGGLNMMFQLATTLGIFTANLINYGTQNIKPWGWRLSLGLAAVPALLMTLGGLFLPETPNSLIERGRVEEGRRVLERIRGTADVDAEFTDMVEASELANTVEHPFRNILQPRNRPQLVMAVCMPAFQILTGINSILFYAPVLFQSMGFGGNASPLLLRAHRRRALLLDAHLHRHRRPPRPPEAPHQRRDPDDRLPGDRGGDPGREVRGGEATGAELLGRGGGGDLPVRSGVRVVVGPAGMDGAERDLPAGDAVGGAEHHGGREPALHLRHRAGVPVAAVRLQVRHLPLFRGVDHRHDRVRLRLPAGDQGRAHRRDGAAMAEALVLEEGHAGHAARGWLGRG

SEQ ID NO: 6882 - protein, 457 aa, Zea mays subsp. mays
  peptide (1)..(457): Ceres Seq. ID no. 12372634
MDPFLEKFFPVVFHRKNSGGKNNYCKYDNQGLAAFTSSLYLAGLVASLVASPVTRNYGRKASIVCGGVSFLIGAALNVAAVNLAMLILGRIMLGVGIGFGNQAVPLYLSEMAPAHLRGGLNMMFQLATTLGIFTANLINYGTQNIKPWGWRLSLGLAAVPALLMTLGGLFLPETPNSLIERGRVEEGRRVLERIRGTADVDAEFTDMVEASELANTVEHPFRNILQPRNRPQLVMAVCMPAFQILTGINSILFYAPVLFQSMGFGGNASPLLLRAHRRRALLLDAHLHRHRRPPRPPEAPHQRRDPDDRLPGDRGGDPGREVRGGEATGAELLGRGGGGDLPVRSGVRVVVGPAGMDGAERDLPAGDAVGGAEHHGGREPALHLRHRAGVPVAAVRLQVRHLPLFRGVDHRHDRVRLRLPAGDQGRAHRRDGAAMAEALVLEEGHAGHAARGWLGRG

SEQ ID NO: 6883 - DNA, 1435 bp, Zea mays subsp. mays
  misc_feature (1)..(1435): Ceres Seq. ID no. 12359747
  misc_feature (1)..(1435): Ortholog of  Ceres SEQ ID NO 15176835 as cited in SEQ ID NO 1046
  misc_feature (1)..(1435): Ortholog of  Ceres SEQ ID NO 14315403 as cited in SEQ ID NO 59259
ctttctatccctccactccctcttatctgctgcgccatcctccccggcctccaccatggccacagccgccgcggccaccgcctcctcctccctcctcgcgccggcggccagcagcacggcgccggcctcgtcaaacgcgctgctgttcccctcctccgtgccgtcgctgcgtgcgtacccgcggctcctcctcgcgttccgccgccccgccgcggccgccgtcgccgacccgcagggggccgtgctcgaagaggaggcggaggtcgaccagcagggccagtacgacgacgacgacgggtatgagggcgggcgcggccccgcgttcacggcccccacgcgcccgcgcaccggcaaggccgcgctactgcttaagcgcgaccgcacgaggtcgaagaggttcctcgagatacagaagctgcgggagagcaagaaggactacgacgtgcccaccgccatctcgttgatgaagcagatgtccagtgccaagtttgttgagtcagcggaggcgcacttccgcatgaacctcgaccccaagtacaatgaccagcagctccgggccacggtgaatttgcccaagggaacaggccagtcggtgaagattgcggttctcacacaaggtgagaagatagatgaagctagagctgcaggagctgatatcgtaggtggagaagatttgattgaacaaataaaaggaggatttatggagtttgacaaattgattgcatcacctgatatgatgcctaaggttgcgggcttaggtaagattctaggaccaagaggactgatgcctaaccccaaagctggcactgtttcttcaaatattactcaggctatagaagagttcaagaaagggaaggttgaatacagagttgataaatcaggaattgtccatattccctttggcaaggttgactttccagaggaagatctcattgcaaacttcatgtctgttgttcgttctgttgagaggaacaagccatctggtgctaaggggatatactggaaaacggcgtacttgtgctcatccatgggaccttctatcaagctaaacataaaagaaatgcttgactatggtttggaatcatctgactagatgtgaccacaggcaccagttaagtcagctggcatcgttatcaccttcacagattaactatttgccccttgcgacaaatgagcagaaacatggttggtgtatggcaagcaggtgcttaggtacagttttctcagtttttatggcacatcatcagagcagctaaagtcacccagattgacaaagagatggtttgttggtcatgtatttatgagaaaattatgcacggtttcatagatgtctgtctctgagacgtttgttgtaatgtttcatattttgtcaatagtcatccttgagcttaagccaacaatttgttttcacctgtcattaatttaattacctttc

SEQ ID NO: 6884 - protein, 363 aa, Zea mays subsp. mays
  peptide (1)..(363): Ceres Seq. ID no. 12359748
FLSLHSLLSAAPSSPASTMATAAAATASSSLLAPAASSTAPASSNALLFPSSVPSLRAYPRLLLAFRRPAAAAVADPQGAVLEEEAEVDQQGQYDDDDGYEGGRGPAFTAPTRPRTGKAALLLKRDRTRSKRFLEIQKLRESKKDYDVPTAISLMKQMSSAKFVESAEAHFRMNLDPKYNDQQLRATVNLPKGTGQSVKIAVLTQGEKIDEARAAGADIVGGEDLIEQIKGGFMEFDKLIASPDMMPKVAGLGKILGPRGLMPNPKAGTVSSNITQAIEEFKKGKVEYRVDKSGIVHIPFGKVDFPEEDLIANFMSVVRSVERNKPSGAKGIYWKTAYLCSSMGPSIKLNIKEMLDYGLESSD

SEQ ID NO: 6885 - protein, 345 aa, Zea mays subsp. mays
  peptide (1)..(345): Ceres Seq. ID no. 12359749
MATAAAATASSSLLAPAASSTAPASSNALLFPSSVPSLRAYPRLLLAFRRPAAAAVADPQGAVLEEEAEVDQQGQYDDDDGYEGGRGPAFTAPTRPRTGKAALLLKRDRTRSKRFLEIQKLRESKKDYDVPTAISLMKQMSSAKFVESAEAHFRMNLDPKYNDQQLRATVNLPKGTGQSVKIAVLTQGEKIDEARAAGADIVGGEDLIEQIKGGFMEFDKLIASPDMMPKVAGLGKILGPRGLMPNPKAGTVSSNITQAIEEFKKGKVEYRVDKSGIVHIPFGKVDFPEEDLIANFMSVVRSVERNKPSGAKGIYWKTAYLCSSMGPSIKLNIKEMLDYGLESSD

SEQ ID NO: 6886 - protein, 209 aa, Zea mays subsp. mays
  peptide (1)..(209): Ceres Seq. ID no. 12359750
MKQMSSAKFVESAEAHFRMNLDPKYNDQQLRATVNLPKGTGQSVKIAVLTQGEKIDEARAAGADIVGGEDLIEQIKGGFMEFDKLIASPDMMPKVAGLGKILGPRGLMPNPKAGTVSSNITQAIEEFKKGKVEYRVDKSGIVHIPFGKVDFPEEDLIANFMSVVRSVERNKPSGAKGIYWKTAYLCSSMGPSIKLNIKEMLDYGLESSD

SEQ ID NO: 6887 - DNA, 1572 bp, Zea mays subsp. mays
  misc_feature (1)..(1572): Ceres Seq. ID no. 12369120
  misc_feature (1)..(1572): Ortholog of  Ceres SEQ ID NO 15168965 as cited in SEQ ID NO 20607
  misc_feature (1)..(1572): Ortholog of  Ceres SEQ ID NO 13597454 as cited in SEQ ID NO 64121
  misc_feature (1)..(1572): Ortholog of  Ceres SEQ ID NO 13623385 as cited in SEQ ID NO 0
atccagccatcgattctcctccagttcataggcacagcagcagaaagcgccaggagcttaagaacatggcgaacaggggcttgcatctggctctgttcctcgtccttctcgggctgtcgtccaatttggcagccgggcagatcctgttccagggcttcaactgggagtcgtggaagcagaacgggggatggtacaacttcctgatgggcaaggtggacgacatcgccgaggccggcatcacgcacgtctggctccctccggcgtcacactctctcgccgagcaaggctacctgccggggcgcctgtacgaccttgacgcgtccaagtacggcaacgaggcgcagctcaagtccctgatcgaggcgttccacagcaagggcgtgaaggtcatcgccgacatcgtcatcaaccaccgcacggcggagcaccaggacggccgcggcatctactgcatcttcgagggcggcacgccggactcccgcctcgactggggcccccacatgatctgcagcgacgacagggcgtactccgacggcacggggaaccccgacaccggcgccgacttcggcggcgcgccggacatcgaccacctgaacccgcgcgtccagcaggagctcaccggctggctcaactggctcaagacggacgtcggcttcgacgcgtggcgcctcgacttcgccaagggctactccgccgacgtcgccaaggtctacatcgacggcacccagccctgcttcgccgtcgccgagatatggacctcgctggcctacggcggcgacggcaagcccttctacgaccagaacgcgcaccggcaggagctggtgagctggctggaccgcgtcggcggcaaggccagcccggccaccacgttcgacttcaccaccaagggcatcctcaacgtggccgtcgacggcgagctgtggcggctgcgcggcgctgacggcaaggcacccggtttgatcgggtggtggccggccaaggccgtcaccttcgtcgacaaccacgacactggctccacgcagcacatgtggccgttccccgccgacaaggtcatgcagggctacgcctacatcctcacgcaccccgggaacccatccatcttctacgatcacttcttcgactggggcctcaagaacgagatcgcgcacctggtgtccatcagggaccgccacgggatccaggcggacagtgagctgcgcatcatcgaggccgacgccgacctctacctcgctgagatcgacggcaaggtcatcgtgaagattggatcaagatacgactgcgggcacctcatcccagaaggcttccaggtcgtggcgcacggagatggctatgccgtctgggagaaaaactgagccaaatctgtgcctgatccgtccgtccggtccggcacgacgagttttagcggatttgacctgcattttccttagcttattattactccaaatacgggatatatatagcgacaacctgtattcgagatacatgcgtgcccccagggacgcggaaaaagaaagagaagcacgcgtgtcaggacagccgaaagaagaacttgtgaagattattttttcccct

SEQ ID NO: 6888 - protein, 449 aa, Zea mays subsp. mays
  peptide (1)..(449): Ceres Seq. ID no. 12369121
PAIDSPPVHRHSSRKRQELKNMANRGLHLALFLVLLGLSSNLAAGQILFQGFNWESWKQNGGWYNFLMGKVDDIAEAGITHVWLPPASHSLAEQGYLPGRLYDLDASKYGNEAQLKSLIEAFHSKGVKVIADIVINHRTAEHQDGRGIYCIFEGGTPDSRLDWGPHMICSDDRAYSDGTGNPDTGADFGGAPDIDHLNPRVQQELTGWLNWLKTDVGFDAWRLDFAKGYSADVAKVYIDGTQPCFAVAEIWTSLAYGGDGKPFYDQNAHRQELVSWLDRVGGKASPATTFDFTTKGILNVAVDGELWRLRGADGKAPGLIGWWPAKAVTFVDNHDTGSTQHMWPFPADKVMQGYAYILTHPGNPSIFYDHFFDWGLKNEIAHLVSIRDRHGIQADSELRIIEADADLYLAEIDGKVIVKIGSRYDCGHLIPEGFQVVAHGDGYAVWEKN

SEQ ID NO: 6889 - protein, 428 aa, Zea mays subsp. mays
  peptide (1)..(428): Ceres Seq. ID no. 12369122
MANRGLHLALFLVLLGLSSNLAAGQILFQGFNWESWKQNGGWYNFLMGKVDDIAEAGITHVWLPPASHSLAEQGYLPGRLYDLDASKYGNEAQLKSLIEAFHSKGVKVIADIVINHRTAEHQDGRGIYCIFEGGTPDSRLDWGPHMICSDDRAYSDGTGNPDTGADFGGAPDIDHLNPRVQQELTGWLNWLKTDVGFDAWRLDFAKGYSADVAKVYIDGTQPCFAVAEIWTSLAYGGDGKPFYDQNAHRQELVSWLDRVGGKASPATTFDFTTKGILNVAVDGELWRLRGADGKAPGLIGWWPAKAVTFVDNHDTGSTQHMWPFPADKVMQGYAYILTHPGNPSIFYDHFFDWGLKNEIAHLVSIRDRHGIQADSELRIIEADADLYLAEIDGKVIVKIGSRYDCGHLIPEGFQVVAHGDGYAVWEKN

SEQ ID NO: 6890 - protein, 382 aa, Zea mays subsp. mays
  peptide (1)..(382): Ceres Seq. ID no. 12369123
MGKVDDIAEAGITHVWLPPASHSLAEQGYLPGRLYDLDASKYGNEAQLKSLIEAFHSKGVKVIADIVINHRTAEHQDGRGIYCIFEGGTPDSRLDWGPHMICSDDRAYSDGTGNPDTGADFGGAPDIDHLNPRVQQELTGWLNWLKTDVGFDAWRLDFAKGYSADVAKVYIDGTQPCFAVAEIWTSLAYGGDGKPFYDQNAHRQELVSWLDRVGGKASPATTFDFTTKGILNVAVDGELWRLRGADGKAPGLIGWWPAKAVTFVDNHDTGSTQHMWPFPADKVMQGYAYILTHPGNPSIFYDHFFDWGLKNEIAHLVSIRDRHGIQADSELRIIEADADLYLAEIDGKVIVKIGSRYDCGHLIPEGFQVVAHGDGYAVWEKN

SEQ ID NO: 6891 - DNA, 1304 bp, Zea mays subsp. mays
  misc_feature (1)..(1304): Ceres Seq. ID no. 12358154
  misc_feature (1)..(1304): Ortholog of  Ceres SEQ ID NO 12611829 as cited in SEQ ID NO 56771
  misc_feature (1)..(1304): Ortholog of  Ceres SEQ ID NO 15171735 as cited in SEQ ID NO 57234
  misc_feature (1)..(1304): Ortholog of  Ceres SEQ ID NO 13597018 as cited in SEQ ID NO 64288
  misc_feature (1)..(1304): Ortholog of  Ceres SEQ ID NO 14305124 as cited in SEQ ID NO 0
attttcgtcagctctcctggcgcccggtggctcgccggcgcaaattaagtaattaacccgaactccctggcattctccgcgggcctgtagtcttgtagcctatcgcttgcttcgccgtagcacttgcttaattagggcggtgttcgagaggtgggtgtggtggtgtactggtgtactagtactactcgcctcgcctcgcctcgcctcgagggtttgtttgactggcggaggcaggagctgcggcggtccgggagcgcatggggaacgcgaacgccaaggagggggagaacggccacatggcggcgtctcctgagccggcggctcccaacggcggcggaggaagcagcagctcggcgggaggcgctgccgcgcgacctccaccgttgtcgccgccagacgacgtgatgctggagcgtccaccgcccgtgccctatctcttcgtgccgcaggttccagagactccactgcacagacctactgagctctctcctcttctcaaccattcaccggtaaacgaatccaccgaccaccactcccaggatcagggtattccaactctgattacatggagccaaggaggagatgaggtgttcctggaaggatcgtgggataactggacatcgaggagggcacttgagagatctggaaaagatcacgccgtcttgttggttctgccatccggagtctaccattaccggatcatcgtggacggggagctgaggtacatccctgaactacctcacgcagctgacgaaagagggcgagtggccaacgtcctcgatgtccatgactacgtgccagaaagcctcgacagcgtagccgagttcgaagcgcccccgtctcccgtgcacagctacgacctgcattgcccgggcgacgaggagttcgccaaggagccgcccacgctcccgccccagcttctcgtgtccgtcctcgggggggacgtcgatagcgctggccatggcaatcaagctttgaagccacagcacgtcgtcctcgaccacctgttcatcgagaaagggtgggggtcgcagtcgctgctcgccctcggcgtcacccaccggtttgagtccaagtacgtgagctttgtgctctacaagccgttggagaggtgatggtggtactgtctactagctgtgtgtgagtggaagaacagagtggactgctggaggtgaataatgtgtgtgtgtgcccttgtatagaagggaaatgcatgcaggagcttgtagctgtagctgatcttttattttatttttttattttcctttcactttcgacgaaagtaataaattagttgaccatgc

SEQ ID NO: 6892 - protein, 285 aa, Zea mays subsp. mays
  peptide (1)..(285): Ceres Seq. ID no. 12358155
MGNANAKEGENGHMAASPEPAAPNGGGGSSSSAGGAAARPPPLSPPDDVMLERPPPVPYLFVPQVPETPLHRPTELSPLLNHSPVNESTDHHSQDQGIPTLITWSQGGDEVFLEGSWDNWTSRRALERSGKDHAVLLVLPSGVYHYRIIVDGELRYIPELPHAADERGRVANVLDVHDYVPESLDSVAEFEAPPSPVHSYDLHCPGDEEFAKEPPTLPPQLLVSVLGGDVDSAGHGNQALKPQHVVLDHLFIEKGWGSQSLLALGVTHRFESKYVSFVLYKPLER

SEQ ID NO: 6893 - protein, 272 aa, Zea mays subsp. mays
  peptide (1)..(272): Ceres Seq. ID no. 12358156
MAASPEPAAPNGGGGSSSSAGGAAARPPPLSPPDDVMLERPPPVPYLFVPQVPETPLHRPTELSPLLNHSPVNESTDHHSQDQGIPTLITWSQGGDEVFLEGSWDNWTSRRALERSGKDHAVLLVLPSGVYHYRIIVDGELRYIPELPHAADERGRVANVLDVHDYVPESLDSVAEFEAPPSPVHSYDLHCPGDEEFAKEPPTLPPQLLVSVLGGDVDSAGHGNQALKPQHVVLDHLFIEKGWGSQSLLALGVTHRFESKYVSFVLYKPLER

SEQ ID NO: 6894 - protein, 236 aa, Zea mays subsp. mays
  peptide (1)..(236): Ceres Seq. ID no. 12358157
MLERPPPVPYLFVPQVPETPLHRPTELSPLLNHSPVNESTDHHSQDQGIPTLITWSQGGDEVFLEGSWDNWTSRRALERSGKDHAVLLVLPSGVYHYRIIVDGELRYIPELPHAADERGRVANVLDVHDYVPESLDSVAEFEAPPSPVHSYDLHCPGDEEFAKEPPTLPPQLLVSVLGGDVDSAGHGNQALKPQHVVLDHLFIEKGWGSQSLLALGVTHRFESKYVSFVLYKPLER

SEQ ID NO: 6895 - DNA, 1704 bp, Zea mays subsp. mays
  misc_feature (1)..(1704): Ceres Seq. ID no. 12348030
  misc_feature (1)..(1704): Ortholog of  Ceres SEQ ID NO 13594209 as cited in SEQ ID NO 59089
  misc_feature (1)..(1704): Ortholog of  Ceres SEQ ID NO 12614124 as cited in SEQ ID NO 68392
actcatctccagtctccctctccactctgcggcccggtcgatccccattccgatccatcgcacgggcagcgcccagtccggttcactcatggagtctctagtggctgcgctccccgcgggcggcgctgcggcggcggcggccttcggtgggctggtggccgctgccgcgctcgccggaaaggtcggccttgtcgggtccaagaaacacctcaacgcgcccccagctgtctctggtttacccctgattgggaatcttcatcagttgaaagagaagaaacctcaccagacctttacaaagtgggcagaaatttatgggccaatttacactataaggaccggttcttctactgtagttgtgctcaattcagcccaagtagccaaggaggcaatgattgcaaaattctcatcaatatctactcgaaagctatcgaaggcattgtcagcgctcacccgtgacaaaactatggttgctacaagtgactatggtgacttccacaaaatgattaagcgttatatcatgacattcatgttgggtacttctggccagaaacaatttagggacacaagaaacatgatggttgacaacatgttgaacactttccatacattgttgatggatgatccaaattctcctctgaacttccgggaagttttcaagaatgaattatttcgcttatccctggttcaggctttaggcgaggatgtgagttcaatctatgtggaagagtatggaaaggttatatcaaaggaggaaatctacaaggccactgtggttgacatgatgatgtgtgcaattgaggtcgactggagggatttcttcccgtacctcagctggattccaaataggaccttcgaaacaagagtactgactaccgaagcgaggagaactaccgtgatgcaagccttgatcaagcagcaaaaggaaagaattgcacgtggggagactaggatatcctacctggacttcctgctggcagagaatacactgactgatgaacaattactaatgctggtgtgggaagcagtcatagaagctgctgatactactttggtcacgaccgagtgggctatgtatgagattgcgaagcacccagaaaaacaggaatacctttatcaagaaatccaaaaagtctgcggcaataagacagttaccgaggatcacctgccagagttaccgtacttgaacgcggtgttccatgagaccatgaggcggcattctccagttccattagtgcctccaagattggtccatgagaataccaacttggctggctatgaggttccagccggcacagagataatcatcaatctgtacgggtgcaacatgaacaaaaacgactgggccgagcctgaggaatggaagccagagaggtttctggacgggaggtttgaagcagtggatatgcacaagaccatggcctttggcgcaggaaggagggcctgtgctggcagcatgcaggcgatgaacatctcgtgcaccgccatcggcaggtttgtgcaagagtttgcctggaggctcgaggaaggcgacgaggacaaggttgacaccatccagcttacaaccaacaggctttacccactgcatgtgtacctcgcacctagaggaaggaaatgagcctctactgtaaacgggtttcactgtactaatttaaaaaaataatttgctgttgcctgtgtatgacttttggatgatctctatgctgc

SEQ ID NO: 6896 - protein, 537 aa, Zea mays subsp. mays
  peptide (1)..(537): Ceres Seq. ID no. 12348031
LISSLPLHSAARSIPIPIHRTGSAQSGSLMESLVAALPAGGAAAAAAFGGLVAAAALAGKVGLVGSKKHLNAPPAVSGLPLIGNLHQLKEKKPHQTFTKWAEIYGPIYTIRTGSSTVVVLNSAQVAKEAMIAKFSSISTRKLSKALSALTRDKTMVATSDYGDFHKMIKRYIMTFMLGTSGQKQFRDTRNMMVDNMLNTFHTLLMDDPNSPLNFREVFKNELFRLSLVQALGEDVSSIYVEEYGKVISKEEIYKATVVDMMMCAIEVDWRDFFPYLSWIPNRTFETRVLTTEARRTTVMQALIKQQKERIARGETRISYLDFLLAENTLTDEQLLMLVWEAVIEAADTTLVTTEWAMYEIAKHPEKQEYLYQEIQKVCGNKTVTEDHLPELPYLNAVFHETMRRHSPVPLVPPRLVHENTNLAGYEVPAGTEIIINLYGCNMNKNDWAEPEEWKPERFLDGRFEAVDMHKTMAFGAGRRACAGSMQAMNISCTAIGRFVQEFAWRLEEGDEDKVDTIQLTTNRLYPLHVYLAPRGRK

SEQ ID NO: 6897 - protein, 508 aa, Zea mays subsp. mays
  peptide (1)..(508): Ceres Seq. ID no. 12348032
MESLVAALPAGGAAAAAAFGGLVAAAALAGKVGLVGSKKHLNAPPAVSGLPLIGNLHQLKEKKPHQTFTKWAEIYGPIYTIRTGSSTVVVLNSAQVAKEAMIAKFSSISTRKLSKALSALTRDKTMVATSDYGDFHKMIKRYIMTFMLGTSGQKQFRDTRNMMVDNMLNTFHTLLMDDPNSPLNFREVFKNELFRLSLVQALGEDVSSIYVEEYGKVISKEEIYKATVVDMMMCAIEVDWRDFFPYLSWIPNRTFETRVLTTEARRTTVMQALIKQQKERIARGETRISYLDFLLAENTLTDEQLLMLVWEAVIEAADTTLVTTEWAMYEIAKHPEKQEYLYQEIQKVCGNKTVTEDHLPELPYLNAVFHETMRRHSPVPLVPPRLVHENTNLAGYEVPAGTEIIINLYGCNMNKNDWAEPEEWKPERFLDGRFEAVDMHKTMAFGAGRRACAGSMQAMNISCTAIGRFVQEFAWRLEEGDEDKVDTIQLTTNRLYPLHVYLAPRGRK

SEQ ID NO: 6898 - protein, 408 aa, Zea mays subsp. mays
  peptide (1)..(408): Ceres Seq. ID no. 12348033
MIAKFSSISTRKLSKALSALTRDKTMVATSDYGDFHKMIKRYIMTFMLGTSGQKQFRDTRNMMVDNMLNTFHTLLMDDPNSPLNFREVFKNELFRLSLVQALGEDVSSIYVEEYGKVISKEEIYKATVVDMMMCAIEVDWRDFFPYLSWIPNRTFETRVLTTEARRTTVMQALIKQQKERIARGETRISYLDFLLAENTLTDEQLLMLVWEAVIEAADTTLVTTEWAMYEIAKHPEKQEYLYQEIQKVCGNKTVTEDHLPELPYLNAVFHETMRRHSPVPLVPPRLVHENTNLAGYEVPAGTEIIINLYGCNMNKNDWAEPEEWKPERFLDGRFEAVDMHKTMAFGAGRRACAGSMQAMNISCTAIGRFVQEFAWRLEEGDEDKVDTIQLTTNRLYPLHVYLAPRGRK

SEQ ID NO: 6899 - DNA, 1579 bp, Zea mays subsp. mays
  misc_feature (1)..(1579): Ceres Seq. ID no. 12352446
  misc_feature (1)..(1579): Ortholog of  Ceres SEQ ID NO 14311731 as cited in SEQ ID NO 51632
  misc_feature (1)..(1579): Ortholog of  Ceres SEQ ID NO 14315189 as cited in SEQ ID NO 57702
aaaagacggcgactctgcctgcacagcattgaccgccgccttcgctcctccacctccccgctcgctctcctgcctccgcgcgggccgcggatcccttcactcgccacagcaagcgctagaagagggaatggagcccggcctcgcatcccgcgtcgcccgttcagccgctcagccgctttccggctgcctgtcgcggcactcgctctcgccgtggctcaagatccagaaccacatttatcctatgccaagtctctgtcacaaggttcctagcacgggaaaatgccacgcttctatgacaacaagttacatggaaacatcagatgtcactgatttggactgggaaaaccttggctttggcctcatcgagactgactttatgtatgttgcaaaatgtggaactgatggaatcttttccaaaggtgaagtcctaccatttggtcctatagcactgagtccttcagctggagtcttaaattatgggcagggattgtttgaaggcctaaaagcatataggaaaactgatgggtccatccttctatttcgtccagaggagaatgctataaggatgctaagcggtgcagagaggatgtgtatgcctgctccaactgttgagcaattcgttgatgctgttaaacaaactgttttggcaaataaaagatgggtgcctcctactggtaaaggttccctatatatcaggccactcctaataggaagcggtgcagttcttggtcttgcgcctgctcctgagtatagctttatcatttttgtatcccctgttgggaattatttcaaggaaggtttatctcctattaatttgatcgttgaggataaatttcaccgtgccagccctggtggaactggaggtgtgaaaaccattggaaactatgcctcggtactgaaagcacaaaagattgcaaaggggaaaggatattctgatgtcctttatttggatgctgttcatgacaaatatcttgaagaagtctcttcctgcaatatttttgttgtgaaagacaatgttatttctacgcctgccattaaaggaacaatacttcctggtataacgaggaaaagtatcattgaagttgctcagagcaaaggtttcaaggttgaggagcgtctggtgtgtgtagatgagttgattaacgctgatgaagttttctgcacggggactgctgttgtggtgtcacctgtggggagtgttacatatatggggaaaagggtggaatatggcaaccaaggagtcggtgtcgtgtctcagcaactatacaagtcacttacaagcctccagatgggcaatgtggaggactggatgggttggaccatgcaacttaatcagtagcggatcacagatattgccttggcagatcccggattattacagctactgggtgcgatagttttttttttggcagatccatcttgagcatatttgactgtaccggtttcccttgagactaagacgaaagtgatcttactgatcttttgtttcaaatctaaaacgataaaataaaatgtggtttgcaccttgccatgtactgtaagaatggacccataaaaaatttcatgctgctgttgcttg

SEQ ID NO: 6900 - protein, 445 aa, Zea mays subsp. mays
  peptide (1)..(445): Ceres Seq. ID no. 12352447
KDGDSACTALTAAFAPPPPRSLSCLRAGRGSLHSPQQALEEGMEPGLASRVARSAAQPLSGCLSRHSLSPWLKIQNHIYPMPSLCHKVPSTGKCHASMTTSYMETSDVTDLDWENLGFGLIETDFMYVAKCGTDGIFSKGEVLPFGPIALSPSAGVLNYGQGLFEGLKAYRKTDGSILLFRPEENAIRMLSGAERMCMPAPTVEQFVDAVKQTVLANKRWVPPTGKGSLYIRPLLIGSGAVLGLAPAPEYSFIIFVSPVGNYFKEGLSPINLIVEDKFHRASPGGTGGVKTIGNYASVLKAQKIAKGKGYSDVLYLDAVHDKYLEEVSSCNIFVVKDNVISTPAIKGTILPGITRKSIIEVAQSKGFKVEERLVCVDELINADEVFCTGTAVVVSPVGSVTYMGKRVEYGNQGVGVVSQQLYKSLTSLQMGNVEDWMGWTMQLNQ

SEQ ID NO: 6901 - protein, 403 aa, Zea mays subsp. mays
  peptide (1)..(403): Ceres Seq. ID no. 12352448
MEPGLASRVARSAAQPLSGCLSRHSLSPWLKIQNHIYPMPSLCHKVPSTGKCHASMTTSYMETSDVTDLDWENLGFGLIETDFMYVAKCGTDGIFSKGEVLPFGPIALSPSAGVLNYGQGLFEGLKAYRKTDGSILLFRPEENAIRMLSGAERMCMPAPTVEQFVDAVKQTVLANKRWVPPTGKGSLYIRPLLIGSGAVLGLAPAPEYSFIIFVSPVGNYFKEGLSPINLIVEDKFHRASPGGTGGVKTIGNYASVLKAQKIAKGKGYSDVLYLDAVHDKYLEEVSSCNIFVVKDNVISTPAIKGTILPGITRKSIIEVAQSKGFKVEERLVCVDELINADEVFCTGTAVVVSPVGSVTYMGKRVEYGNQGVGVVSQQLYKSLTSLQMGNVEDWMGWTMQLNQ

SEQ ID NO: 6902 - protein, 365 aa, Zea mays subsp. mays
  peptide (1)..(365): Ceres Seq. ID no. 12352449
MPSLCHKVPSTGKCHASMTTSYMETSDVTDLDWENLGFGLIETDFMYVAKCGTDGIFSKGEVLPFGPIALSPSAGVLNYGQGLFEGLKAYRKTDGSILLFRPEENAIRMLSGAERMCMPAPTVEQFVDAVKQTVLANKRWVPPTGKGSLYIRPLLIGSGAVLGLAPAPEYSFIIFVSPVGNYFKEGLSPINLIVEDKFHRASPGGTGGVKTIGNYASVLKAQKIAKGKGYSDVLYLDAVHDKYLEEVSSCNIFVVKDNVISTPAIKGTILPGITRKSIIEVAQSKGFKVEERLVCVDELINADEVFCTGTAVVVSPVGSVTYMGKRVEYGNQGVGVVSQQLYKSLTSLQMGNVEDWMGWTMQLNQ

SEQ ID NO: 6903 - DNA, 1601 bp, Zea mays subsp. mays
  misc_feature (1)..(1601): Ceres Seq. ID no. 12435006
  misc_feature (1)..(1601): Ortholog of  Ceres SEQ ID NO 14306479 as cited in SEQ ID NO 53033
actccaactctcaagcgtctctactcctcttcctcctctctctactctccaagttctcttctccgtcgaccgctctacacgtctcttgtcgacctggacaccgaggtggaagaaggaagcagtcagcagatggatccatggatcagcagccagccttctctgagccttgacctgcgcgtcggcctgccgccgctcagcctccaccaccaggcgccggtggccgtcgccttgcccaggcccaagctgctcgtcgaggagaacttcctcctgccgcctccaaagaaagaaccagaggtcgcggctctcgagacggagctgcagcggatgggcgaggagaaccggcgcctggcggaggcgctggccgaggtggcctccaagtacgaggcgctgcgggggcagtacacggagatggtggccgcggcggccacggcctgcgggaaccacccgtcgtccacgtcggagggcgggtccgtgtcgccgtcgcggaagcgcaagagcgagagcacggacaccgcgccgcccgcgcagcagctactgcaccagcactacccggcggtggcgccggaccagacggagtgcacctcgggcgagccgtgcaagcgcatccgggaggcggagtgcaagcccagggtgtcgaagctgcacgtgcacgccgacccggccgacctcagcctggtggtcaaggacgggtaccagtggcgcaagtacggtcagaaggtcaccaaggacaacccctgcccgcgggcctacttccgctgctccttcgccccggcctgcccagtcaagaagaaggtgcagcgcagcgccgacgaccccaccatcctggtcgccacgtacgagggcgaccacaaccacggccagcccccgccacaggcgcaggcgccgcacgacggctccagccctggcgccagcaagaagccgccgtcgccgccgaggccggtcgccgccgctccggcgccgctccaccaccagcaggtccagcagcaccagcagcagcaggcggttggcgcggtgaaatgcgagccgcccgtggccgcggcggcgtcggagctcatccggcggaacctcgcggagcagatgnccatgnactgacgcgggaccccagcttcaaggcggcgttcgtcaccgcgctgtccggccggctcttcgagatgtcgccgaccaaggactgacggaacggatcggatggattgggagattggcatcgcaggagattctggatcagattgtcttcgagcgcacgccgcaatggtcaactgcgcagcgctggcttggctgctgcctccgttcactcttcgctgtcagagcgaaacagcggtaacagagcaagacacgaggggtctgcactctgcagttgtgcaggaggaggaacagacacagggagaggagggcgcgcggccggacatggcgtggaacagagatcgtcgtcaccgccggcgggggtgtggtcgacgacgcgacatgcgaaacactacgtgctagctagcataggaaaaaacaacatgaaatcgtacaaccaaccaatccctcgcactgttttagttgttagctgtaggcgaaactgttcatccaattgatcaaatgaaaattatttttccctg

SEQ ID NO: 6904 - protein, 363 aa, Zea mays subsp. mays
  peptide (1)..(363): Ceres Seq. ID no. 12435007
  misc_feature (361)..(361): Xaa is any aa, unknown or other
  misc_feature (363)..(363): Xaa is any aa, unknown or other
TPTLKRLYSSSSSLYSPSSLLRRPLYTSLVDLDTEVEEGSSQQMDPWISSQPSLSLDLRVGLPPLSLHHQAPVAVALPRPKLLVEENFLLPPPKKEPEVAALETELQRMGEENRRLAEALAEVASKYEALRGQYTEMVAAAATACGNHPSSTSEGGSVSPSRKRKSESTDTAPPAQQLLHQHYPAVAPDQTECTSGEPCKRIREAECKPRVSKLHVHADPADLSLVVKDGYQWRKYGQKVTKDNPCPRAYFRCSFAPACPVKKKVQRSADDPTILVATYEGDHNHGQPPPQAQAPHDGSSPGASKKPPSPPRPVAAAPAPLHHQQVQQHQQQQAVGAVKCEPPVAAAASELIRRNLAEQMXMX

SEQ ID NO: 6905 - protein, 320 aa, Zea mays subsp. mays
  peptide (1)..(320): Ceres Seq. ID no. 12435008
  misc_feature (318)..(318): Xaa is any aa, unknown or other
  misc_feature (320)..(320): Xaa is any aa, unknown or other
MDPWISSQPSLSLDLRVGLPPLSLHHQAPVAVALPRPKLLVEENFLLPPPKKEPEVAALETELQRMGEENRRLAEALAEVASKYEALRGQYTEMVAAAATACGNHPSSTSEGGSVSPSRKRKSESTDTAPPAQQLLHQHYPAVAPDQTECTSGEPCKRIREAECKPRVSKLHVHADPADLSLVVKDGYQWRKYGQKVTKDNPCPRAYFRCSFAPACPVKKKVQRSADDPTILVATYEGDHNHGQPPPQAQAPHDGSSPGASKKPPSPPRPVAAAPAPLHHQQVQQHQQQQAVGAVKCEPPVAAAASELIRRNLAEQMXMX

SEQ ID NO: 6906 - protein, 255 aa, Zea mays subsp. mays
  peptide (1)..(255): Ceres Seq. ID no. 12435009
  misc_feature (253)..(253): Xaa is any aa, unknown or other
  misc_feature (255)..(255): Xaa is any aa, unknown or other
MGEENRRLAEALAEVASKYEALRGQYTEMVAAAATACGNHPSSTSEGGSVSPSRKRKSESTDTAPPAQQLLHQHYPAVAPDQTECTSGEPCKRIREAECKPRVSKLHVHADPADLSLVVKDGYQWRKYGQKVTKDNPCPRAYFRCSFAPACPVKKKVQRSADDPTILVATYEGDHNHGQPPPQAQAPHDGSSPGASKKPPSPPRPVAAAPAPLHHQQVQQHQQQQAVGAVKCEPPVAAAASELIRRNLAEQMXMX

SEQ ID NO: 6907 - DNA, 1405 bp, Zea mays subsp. mays
  misc_feature (1)..(1405): Ceres Seq. ID no. 12344535
  misc_feature (1)..(1405): Ortholog of  Ceres SEQ ID NO 13657915 as cited in SEQ ID NO 66051
gccgccgccgccattcccatggttttccatgctcggttgcgagccagcaattccatttcagtgtcctccctcgtctcgagaccttgccccatccagcccaacgctccgtccatcaactgaatagcttggcggtgtaaccctttcgtgtgcgatgagctcctcgccgttgatcaccgccgcggcgtcggctgccgtggtggcgctggctgtcgccaaccgcgtgctctacaagctcgcgcttgtgcctctcaaggcgtaccctttcttcctcgcccagctcaccaccttcgggtacgttgccgtgtacttctcgatgctctacacgaggtaccgcactgggttggtgactagagacatgctggcgctccccaagcaccggttcgtcgctatcggtttgctggaggcacttggagtctttgctggcatgtctgctggagctatgctaccagggcctgcgattcctatactgtcccagtcattcttggtctggcagcttatcttctctgccctgcttttagggaggacatattcggccagacaagtcattggttgcttcctagtagtttctggtgtgattcttgctgttgcaagtggagcggatgatggccagcttctttcagatgtaaagttaatttggccagcactcatgatcgcttcatcagcatttcacgctggtgcatctattctgaaggaagctgttttcattgatggtgcaaaacgtcttaaggggaagcggccagacatatttgtggtcaattcatttggatctggatttcaggctgtttttgtctttcttcttcttccattcctttctaatttgaggggaattaagtttgctgagcttcctgcttatttaaatggtggtgctgagtgcttcttaaatgtcgcagaaagtccaatcgactgcggaggagctccattcctgcctttgctgtttataatggtgaatatggcattcaatgtctctctcctcaatttggtgaagatgtcatctgccattgtggcttcacttacagcaacatcagcagtgccaatatcgatctatattctttcacttcctttgccctacatccctcatggcacggaattaagcacgtctttcatcattggtgccgtgatattgctgatgggcctgattctgtataaccttcctcaatcgtcactgaaacaattgaaggctgattgaaggtaaagtgacacactgccacatgccttgtaacagagagtttactgattgatattttatggtgaaattgatttccacactgaactatacgaagcatgtgactcattcagattttgtattatgaatgttatcgaaattaagattttctaaaacgcaagcaacatgtgtatgtagtagggacatttttaatacttaccctatagtctggaagtgtgatct

SEQ ID NO: 6908 - protein, 344 aa, Zea mays subsp. mays
  peptide (1)..(344): Ceres Seq. ID no. 12344536
MSSSPLITAAASAAVVALAVANRVLYKLALVPLKAYPFFLAQLTTFGYVAVYFSMLYTRYRTGLVTRDMLALPKHRFVAIGLLEALGVFAGMSAGAMLPGPAIPILSQSFLVWQLIFSALLLGRTYSARQVIGCFLVVSGVILAVASGADDGQLLSDVKLIWPALMIASSAFHAGASILKEAVFIDGAKRLKGKRPDIFVVNSFGSGFQAVFVFLLLPFLSNLRGIKFAELPAYLNGGAECFLNVAESPIDCGGAPFLPLLFIMVNMAFNVSLLNLVKMSSAIVASLTATSAVPISIYILSLPLPYIPHGTELSTSFIIGAVILLMGLILYNLPQSSLKQLKAD

SEQ ID NO: 6909 - protein, 290 aa, Zea mays subsp. mays
  peptide (1)..(290): Ceres Seq. ID no. 12344537
MLYTRYRTGLVTRDMLALPKHRFVAIGLLEALGVFAGMSAGAMLPGPAIPILSQSFLVWQLIFSALLLGRTYSARQVIGCFLVVSGVILAVASGADDGQLLSDVKLIWPALMIASSAFHAGASILKEAVFIDGAKRLKGKRPDIFVVNSFGSGFQAVFVFLLLPFLSNLRGIKFAELPAYLNGGAECFLNVAESPIDCGGAPFLPLLFIMVNMAFNVSLLNLVKMSSAIVASLTATSAVPISIYILSLPLPYIPHGTELSTSFIIGAVILLMGLILYNLPQSSLKQLKAD

SEQ ID NO: 6910 - protein, 276 aa, Zea mays subsp. mays
  peptide (1)..(276): Ceres Seq. ID no. 12344538
MLALPKHRFVAIGLLEALGVFAGMSAGAMLPGPAIPILSQSFLVWQLIFSALLLGRTYSARQVIGCFLVVSGVILAVASGADDGQLLSDVKLIWPALMIASSAFHAGASILKEAVFIDGAKRLKGKRPDIFVVNSFGSGFQAVFVFLLLPFLSNLRGIKFAELPAYLNGGAECFLNVAESPIDCGGAPFLPLLFIMVNMAFNVSLLNLVKMSSAIVASLTATSAVPISIYILSLPLPYIPHGTELSTSFIIGAVILLMGLILYNLPQSSLKQLKAD

SEQ ID NO: 6911 - DNA, 1677 bp, Zea mays subsp. mays
  misc_feature (1)..(1677): Ceres Seq. ID no. 13492998
  misc_feature (1)..(1677): Ortholog of  Ceres SEQ ID NO 15171430 as cited in SEQ ID NO 51500
  misc_feature (1)..(1677): Ortholog of  Ceres SEQ ID NO 14304944 as cited in SEQ ID NO 53041
  misc_feature (1)..(1677): Ortholog of  Ceres SEQ ID NO 13594213 as cited in SEQ ID NO 57038
  misc_feature (1)..(1677): Ortholog of  Ceres SEQ ID NO 15176106 as cited in SEQ ID NO 60324
  misc_feature (1)..(1677): Ortholog of  Ceres SEQ ID NO 13654989 as cited in SEQ ID NO 63117
  misc_feature (1)..(1677): Ortholog of  Ceres SEQ ID NO 13584744 as cited in SEQ ID NO 69137
acaccgggccgtgccgatgggtgtttacgagtagcagctgtatctcgttgacctcaccgcctgcagggcaccaaggaggagatgacttccccgaagcgggcagcagggcgggaagggtgcggatgcttggccgccgtcgcgcggggcctccgcggggcgtgcttccggccggcggtgacggcggacggtgacggcggcggctcggccaagggcagccacgttcacgacgcagcagagacaagatatctgaatgctagcaatcgggagcttggtgatcattttcagacaaaacgtgatggtgaaaatggtgttgatgcatcaattgaaaagagaacacccaagctacttcagtttacctttcaagagttgaaatctgccacgcttaacttcaggccagacagtattcttggggagggtgggttcggttatgtattcaaggggtggattgagccaaacagcactgctcctgcaaaacctggcacaggggttactgtggcagtcaaaagtttgaagccagatgcgcttcaaggtcatagagaatgggtggcagaagttgactttctgggacagttgcatcataaacaccttgttaagctgattggattgtattgaggatgatcaaaggttacttgtatatgaattcatggcacggggaagtcttgaaaatcatcttttcagaagggctcttcccctaccttggtccaacaggatgaagattgctctaggtgccgcgaaaggactagccttcctccatggaggtcccaaacctgttatttacagggattttaagacatcgaatgttcttcttgatgtggagtacaacgcaaaactatctgatttcggtttagcaaaagctggtcctcagggtgataaaactcatgtatctactcgggttgttggcacctatggttatgctgcaccagagtatgtaatgacagggcacttgacatctaagagtgatgtttatagcttcggagttgtgctactcgagatgttgactgggagaagatcaatggacaagaagcggcctacgggggagcagaacctggttgcatgggcaaggccttacctaaatgatcggcgaaggctctatcagcttgtagatcctcgcttggggctgaactactctgtcaaaggggtgcaaaaggtcgctcagatctgccactactgccttacccgtgacagtaagtctcgcccatcgatggatgaagttgtcaagcaactcacaccattacaagatctaaacgacatggcatctgcttcgccaaggcctcgctcaactcagcgcggaaaggtgcatcgatgacaacccggttctgttgtaagaagagcagtgtggtcctggttgcttgatgcttgtttggtttaattgtatagcaaaattaggtgttgcctgccgatacctggagatgtgactccgcctgatgtgtcgctcaggtcagtcacactgctctgctgtttggctggttgccaaagcaagataacgatgtatctggttgcatcatgtaataattattataattaccatttaacttctggcgggggtacatcatgtaatggttggtgtacacccaggttagtaatcttaatagtgtttggctgacaggctgagggtcagtagacggtttgcagttcgcttttttcaggggaaaggtacaggtgttaaattgtgattgt

SEQ ID NO: 6912 - protein, 220 aa, Zea mays subsp. mays
  peptide (1)..(220): Ceres Seq. ID no. 13492999
MARGSLENHLFRRALPLPWSNRMKIALGAAKGLAFLHGGPKPVIYRDFKTSNVLLDVEYNAKLSDFGLAKAGPQGDKTHVSTRVVGTYGYAAPEYVMTGHLTSKSDVYSFGVVLLEMLTGRRSMDKKRPTGEQNLVAWARPYLNDRRRLYQLVDPRLGLNYSVKGVQKVAQICHYCLTRDSKSRPSMDEVVKQLTPLQDLNDMASASPRPRSTQRGKVHR

SEQ ID NO: 6913 - protein, 198 aa, Zea mays subsp. mays
  peptide (1)..(198): Ceres Seq. ID no. 13493000
MKIALGAAKGLAFLHGGPKPVIYRDFKTSNVLLDVEYNAKLSDFGLAKAGPQGDKTHVSTRVVGTYGYAAPEYVMTGHLTSKSDVYSFGVVLLEMLTGRRSMDKKRPTGEQNLVAWARPYLNDRRRLYQLVDPRLGLNYSVKGVQKVAQICHYCLTRDSKSRPSMDEVVKQLTPLQDLNDMASASPRPRSTQRGKVHR

SEQ ID NO: 6914 - protein, 176 aa, Zea mays subsp. mays
  peptide (1)..(176): Ceres Seq. ID no. 13493001
MTSPKRAAGREGCGCLAAVARGLRGACFRPAVTADGDGGGSAKGSHVHDAAETRYLNASNRELGDHFQTKRDGENGVDASIEKRTPKLLQFTFQELKSATLNFRPDSILGEGGFGYVFKGWIEPNSTAPAKPGTGVTVAVKSLKPDALQGHREWVAEVDFLGQLHHKHLVKLIGLY

SEQ ID NO: 6915 - DNA, 1601 bp, Zea mays subsp. mays
  misc_feature (1)..(1601): Ceres Seq. ID no. 12352454
  misc_feature (1)..(1601): Ortholog of  Ceres SEQ ID NO 14314643 as cited in SEQ ID NO 56903
aggtcggtcctacacggtcccgttctgcctggtgcctgcaacctgccttttcttcttccgtcgccacccagcgtgctctctctccctctttctctctctctcgtggcggcgcctgggcagccgtcgctgccgcctgcgctaggtgccaggtcttcttcgggcccttcgccggcgacgagtaccaccaggttgtacatgtgtacacccatgtgctttactgggtcggaccctactcatcctccacactaaggccatctccatagactgcactgtttagactccactgtttagagagtggagatagggagtgagatagagagtggaatagggaggatgctggagatagcctaaggttgccactgagtgtgtgcatgattcagaggcaatgtcatcacaaactggaggtggcaaagagagtgacgccggccctgggcaacacaggcagatgcaaagtttggcaagacaagggtctttatacaaccttaccctcgatgaggtgcagaaccatttgggggagccattgcttagcatgaattttgatgagctcctgaagagcgtgtttcctgatggtgtagattcagatggtgctgtcacaggcaagcctgatcggacctcgagcctgcagcgacaggggagcatcctgatgcctccgcagttgagcaagaagactgttgacgaggtgtggaagggcatccagggtggaccagagaccagtactgtggtggatggtctgcagaggcgagagaggcatccaacacttggggagatgacacttgaggacttcttggtcaaagctggggttgttactgaaggacttgtgaaggattcagctgattttccaagcaatatggatacagctggcagcagtgttgttgtggctgctgcttctagtttgaaccctggagcacagtggttgcaacagtaccagcagcaagttttggggtcccagcaattgagtttggcaggttcatacatggctagtcagttgcgccctcagccattgtctattgctacaggtgctactttggattcaatttactctgatgaccagattacttcgccatcatttggtgcactttcggaccctcagacacctgggcgcaagcgtggtgccttaggggaggtagtggataaggtggttgaaagaaggcagaagaggatgataaagaatagggaatcagctgcgcgatcaagagcgagaaagcaggcttatactaatgaacttgaaaacaaggtattccgtctagaagaggagaataagaggctaaagaaacagcaggagttggatgagatactgagctctgctcctcccccagaacccaaatatcaactcaggagaacgggttcggctgccttttgagtttcggcgctgacaatgctcatagtgatttttgtacattatacaaggattctactttatatggtttccttccttttgtattagaaacatttgatagattgagggtatagctttttcccggcccggtaggtcagtgtatgtaggtcgctagcaagctgtagcatgtcctggcggatcatttccttggtgtctgtcagtgtgtacatcttctagacacatgtctaagtctgagagcttcctt

SEQ ID NO: 6916 - protein, 324 aa, Zea mays subsp. mays
  peptide (1)..(324): Ceres Seq. ID no. 12352455
MSSQTGGGKESDAGPGQHRQMQSLARQGSLYNLTLDEVQNHLGEPLLSMNFDELLKSVFPDGVDSDGAVTGKPDRTSSLQRQGSILMPPQLSKKTVDEVWKGIQGGPETSTVVDGLQRRERHPTLGEMTLEDFLVKAGVVTEGLVKDSADFPSNMDTAGSSVVVAAASSLNPGAQWLQQYQQQVLGSQQLSLAGSYMASQLRPQPLSIATGATLDSIYSDDQITSPSFGALSDPQTPGRKRGALGEVVDKVVERRQKRMIKNRESAARSRARKQAYTNELENKVFRLEEENKRLKKQQELDEILSSAPPPEPKYQLRRTGSAAF

SEQ ID NO: 6917 - protein, 304 aa, Zea mays subsp. mays
  peptide (1)..(304): Ceres Seq. ID no. 12352456
MQSLARQGSLYNLTLDEVQNHLGEPLLSMNFDELLKSVFPDGVDSDGAVTGKPDRTSSLQRQGSILMPPQLSKKTVDEVWKGIQGGPETSTVVDGLQRRERHPTLGEMTLEDFLVKAGVVTEGLVKDSADFPSNMDTAGSSVVVAAASSLNPGAQWLQQYQQQVLGSQQLSLAGSYMASQLRPQPLSIATGATLDSIYSDDQITSPSFGALSDPQTPGRKRGALGEVVDKVVERRQKRMIKNRESAARSRARKQAYTNELENKVFRLEEENKRLKKQQELDEILSSAPPPEPKYQLRRTGSAAF

SEQ ID NO: 6918 - protein, 276 aa, Zea mays subsp. mays
  peptide (1)..(276): Ceres Seq. ID no. 12352457
MNFDELLKSVFPDGVDSDGAVTGKPDRTSSLQRQGSILMPPQLSKKTVDEVWKGIQGGPETSTVVDGLQRRERHPTLGEMTLEDFLVKAGVVTEGLVKDSADFPSNMDTAGSSVVVAAASSLNPGAQWLQQYQQQVLGSQQLSLAGSYMASQLRPQPLSIATGATLDSIYSDDQITSPSFGALSDPQTPGRKRGALGEVVDKVVERRQKRMIKNRESAARSRARKQAYTNELENKVFRLEEENKRLKKQQELDEILSSAPPPEPKYQLRRTGSAAF

SEQ ID NO: 6919 - DNA, 1465 bp, Zea mays subsp. mays
  misc_feature (1)..(1465): Ceres Seq. ID no. 12383185
  misc_feature (1)..(1465): Ortholog of  Ceres SEQ ID NO 14303427 as cited in SEQ ID NO 54799
gaatctcacacccaaaagtttcccactgccctggtcccccattcaattcttccaactccgccgcttcgcctcgttccgtccgccgcccccatggcgtccgccgccgccacgaccacctccgcccccgcccagaacctcaatccccttagtatcaacatcaagctccccccatggctcagcgggctgcgctgccccttcaccttcgtctgcccgcccccgcccccgcctccgccgccgccgccgcctcctcccccgctgccacctacggaacccgtggtcccacggtcgcggaggttaccaagcctgcgggtgaccacggagtacgatagcgaagagggcgtgtttgtgaacaaggtgtcgtgcaagcttgcgggggacctcgccaaactgcggctctccttccagagcgacccgcaggggcagtggcaagggggcggggaggaaggggacccgctacagcagctcttcgccgcgccgttggtggggctcatcaccaagcgtttctccgtgctctacgacgtcgaggcacgcaacgcgctgctccgcggagactgctcgcttcccggaggcgccgtccagctccgtgcctcgcatgatgtcaaggcacaacaaggagaagtttcggtgatcactagtttgggtgatccattgtataaaatggagttatcatctttggtgccttacagtggtttgccaagggcaacattccactttcctattggtcaagtttcagtggaagagaagagaaatgaagatgatgagaaggtgctgtctgtatatgggattggaaaatctgatttcttggacggtgttcttactgctcagtacaatgaaaatgatcttaatctaagatattgttataaggacaaggaattaactttagttccaagtgtctcgttgccttccaatgcagtatccatagacttcaaaaggcgttttggtcctgatgataagttgagctaccgttacatcttcgacactgatgaatggaatgctgtttataaacataaagtgggtaaaaatttcaaagtgaaagctggttatgattctgaggtgcgagtcggatgggcttctctttgggttggagaagaagggggcaaggcgaagactgcgccaatgaaaacaaaacttcagcttatgcttcaagtaccccaggataatcccagaaatccttattttctcttcaatgtgaagaaacgatgggatctgtaaataggtgtaagttatccattatgtggactccaaaggcttcggccaaccttttgttgcaatcttcgtaggtcaacagcaacacaatccatgagctctttctatttatcatatattttcaactactgtacgtagttagtacacagcgccccaagtaatccaaaatttatgtaaactctaaccctaaaccctaagtacttgttcgttttgttctcaatccatgtagattgagtgggattaagtgagtttcaattct

SEQ ID NO: 6920 - protein, 403 aa, Zea mays subsp. mays
  peptide (1)..(403): Ceres Seq. ID no. 12383186
ESHTQKFPTALVPHSILPTPPLRLVPSAAPMASAAATTTSAPAQNLNPLSINIKLPPWLSGLRCPFTFVCPPPPPPPPPPPPPPPLPPTEPVVPRSRRLPSLRVTTEYDSEEGVFVNKVSCKLAGDLAKLRLSFQSDPQGQWQGGGEEGDPLQQLFAAPLVGLITKRFSVLYDVEARNALLRGDCSLPGGAVQLRASHDVKAQQGEVSVITSLGDPLYKMELSSLVPYSGLPRATFHFPIGQVSVEEKRNEDDEKVLSVYGIGKSDFLDGVLTAQYNENDLNLRYCYKDKELTLVPSVSLPSNAVSIDFKRRFGPDDKLSYRYIFDTDEWNAVYKHKVGKNFKVKAGYDSEVRVGWASLWVGEEGGKAKTAPMKTKLQLMLQVPQDNPRNPYFLFNVKKRWDL

SEQ ID NO: 6921 - protein, 373 aa, Zea mays subsp. mays
  peptide (1)..(373): Ceres Seq. ID no. 12383187
MASAAATTTSAPAQNLNPLSINIKLPPWLSGLRCPFTFVCPPPPPPPPPPPPPPPLPPTEPVVPRSRRLPSLRVTTEYDSEEGVFVNKVSCKLAGDLAKLRLSFQSDPQGQWQGGGEEGDPLQQLFAAPLVGLITKRFSVLYDVEARNALLRGDCSLPGGAVQLRASHDVKAQQGEVSVITSLGDPLYKMELSSLVPYSGLPRATFHFPIGQVSVEEKRNEDDEKVLSVYGIGKSDFLDGVLTAQYNENDLNLRYCYKDKELTLVPSVSLPSNAVSIDFKRRFGPDDKLSYRYIFDTDEWNAVYKHKVGKNFKVKAGYDSEVRVGWASLWVGEEGGKAKTAPMKTKLQLMLQVPQDNPRNPYFLFNVKKRWDL

SEQ ID NO: 6922 - DNA, 1378 bp, Zea mays subsp. mays
  misc_feature (1)..(1378): Ceres Seq. ID no. 12352458
  misc_feature (1)..(1378): Ortholog of  Ceres SEQ ID NO 14304654 as cited in SEQ ID NO 53301
  misc_feature (1)..(1378): Ortholog of  Ceres SEQ ID NO 15172291 as cited in SEQ ID NO 55046
  misc_feature (1)..(1378): Ortholog of  Ceres SEQ ID NO 13658153 as cited in SEQ ID NO 66326
  misc_feature (1)..(1378): Ortholog of  Ceres SEQ ID NO 14303011 as cited in SEQ ID NO 67226
atagctgaagcctcggattgcaggttgcagccatgccaatgacaatcgagcgtgatctccacatggccacagggaacggagaaactagctacacgaaaaactctaggattcaggagaaagttatgtttcagatcaagccagtccttgaggaggccactagagcagcatactcagctctcctccctcaaaccatggtcgtggccgacttaggctgctcatcggggcctaacacactgcgcttcgtctccgaggtgattggcatcatagctcgccattgcaaagaacacgaccgacgacatgactacccacaacttcagttcttcctgaatgacctgccgggaaacgacttcaacaatctcttcctactcatccagcagttcaataagtcgatggcaagaaaccacaagggtgaggcagccgaggcactgcctccgtgctatatctctggtttgccaggctccttctacactaggatcttccctagcgaaagcgttcaccttttccactctttgttctccgttcactggcactctcaggcatcagaacaactaaaggacaccaaaaataaatgcttagatatctacatcacaaagaatatgccaccgtcgatggtgaagttgtttcaacagcagtttgagaaggacttctccctcttcctcaagctacgctatgaggaactcgtgtctggtggccaaatggttctaacatttattggaagaaagcatgaggatgtgttcactggagagtccaaccatctttacggattgcttgcgcagtcactgaaatccctagttgatgagggtcttgtggagaaagaaaaacttgagtcattctatcttccgatctactcaccgtcggttggtgaagtggaggcgatagtgaagcaagttgggttgttcaacatgaatcatgttaaagtatttgagataaattgggatccctacggtgactcataaggtgatgatgtgcatgacagtattaggagcggtgaaaatgttgctaagtgcctacgagcagttatggagccgttggttgcaagccaatttggagaacacatactcgacaagttattcaaagagtacgctcgtcgtgttgccaaacaccttgagaatgagaaaaccaagcatgctattcttgtcctatccatcgagaaagcaataattcatgtgtgaagtgtcttgtttctcactatctttccattattatcacatggtaatgtatgtttgttttgaatgtgcatgtttgtgccactagtatattgaatggcatggtgtttttgttgttttctttatcgcttctcctatattttagatgcctgaattttaaggtgatttcaggaaacattcttgtacaaggaattaatacaaataatttgctc

SEQ ID NO: 6923 - protein, 307 aa, Zea mays subsp. mays
  peptide (1)..(307): Ceres Seq. ID no. 12352459
MPMTIERDLHMATGNGETSYTKNSRIQEKVMFQIKPVLEEATRAAYSALLPQTMVVADLGCSSGPNTLRFVSEVIGIIARHCKEHDRRHDYPQLQFFLNDLPGNDFNNLFLLIQQFNKSMARNHKGEAAEALPPCYISGLPGSFYTRIFPSESVHLFHSLFSVHWHSQASEQLKDTKNKCLDIYITKNMPPSMVKLFQQQFEKDFSLFLKLRYEELVSGGQMVLTFIGRKHEDVFTGESNHLYGLLAQSLKSLVDEGLVEKEKLESFYLPIYSPSVGEVEAIVKQVGLFNMNHVKVFEINWDPYGDS

SEQ ID NO: 6924 - protein, 305 aa, Zea mays subsp. mays
  peptide (1)..(305): Ceres Seq. ID no. 12352460
MTIERDLHMATGNGETSYTKNSRIQEKVMFQIKPVLEEATRAAYSALLPQTMVVADLGCSSGPNTLRFVSEVIGIIARHCKEHDRRHDYPQLQFFLNDLPGNDFNNLFLLIQQFNKSMARNHKGEAAEALPPCYISGLPGSFYTRIFPSESVHLFHSLFSVHWHSQASEQLKDTKNKCLDIYITKNMPPSMVKLFQQQFEKDFSLFLKLRYEELVSGGQMVLTFIGRKHEDVFTGESNHLYGLLAQSLKSLVDEGLVEKEKLESFYLPIYSPSVGEVEAIVKQVGLFNMNHVKVFEINWDPYGDS

SEQ ID NO: 6925 - protein, 297 aa, Zea mays subsp. mays
  peptide (1)..(297): Ceres Seq. ID no. 12352461
MATGNGETSYTKNSRIQEKVMFQIKPVLEEATRAAYSALLPQTMVVADLGCSSGPNTLRFVSEVIGIIARHCKEHDRRHDYPQLQFFLNDLPGNDFNNLFLLIQQFNKSMARNHKGEAAEALPPCYISGLPGSFYTRIFPSESVHLFHSLFSVHWHSQASEQLKDTKNKCLDIYITKNMPPSMVKLFQQQFEKDFSLFLKLRYEELVSGGQMVLTFIGRKHEDVFTGESNHLYGLLAQSLKSLVDEGLVEKEKLESFYLPIYSPSVGEVEAIVKQVGLFNMNHVKVFEINWDPYGDS

SEQ ID NO: 6926 - DNA, 1388 bp, Zea mays subsp. mays
  misc_feature (1)..(1388): Ceres Seq. ID no. 12382081
  misc_feature (1)..(1388): Ortholog of  Ceres SEQ ID NO 15168496 as cited in SEQ ID NO 60266
  misc_feature (1)..(1388): Ortholog of  Ceres SEQ ID NO 14303528 as cited in SEQ ID NO 69188
gcacgagaccattacctagaacatcctaatcgaaaagaaaacgtaagggagtcctacttgtctgcttcccgagttcagagttcagactcagcacatcacccttctctagtctcaaatggcgtgctcactcccgctccacgcccccttctcctcgtcgccccgcatcctctcctaccgcgccgcgcccagaaccctccctctgttccgccgagggctcagggttccgtaccaccgctccccttccccgcctcgcgcgctcccggacgttgctgcgggggccgtggcgggcatccgggacgcgctcgccgacgccttcttgacgtcgccgccgacgtggcggtccgccgctgccagcaacctcgctgtctttgtctccggatcgccgttgcttctctcgggactgtccgcctccggcttcgccgccgcctatctcttgggcaccctgacgtgggcgcgcgttcggagcccagggtttcctcctcgttgtcgcatacttcgttgtgggcacagcggttactaagttgaggataagacagaaggaagctctgggagtagcagaaaaaagaggaggaagaagagggcctggaagtgttattggttctagcgctgccggttgtgtttgtgccctactatcgatatatcatgctggtggtacagcgtcctctgagctctggagactgggttttgttgctagtttctgtactaaactaagtgatacagtttcaagtgaaatagggaaggcttttggaagaacaacgtacctggtgacaacattaaaggttgttcctagaggtacagaaggtgcaatcagtattgagggtactattgctggaattctagcgtctgtgtttcttgcaggtgctggttatcttcttgggcaggtggatgtatcacaagttgtgttatgcgttcttgcttctcagattgcaaattatgttgagagctatattggggccactttacaagacaaggaaggttttgaatggctgaataacgatattgtcaatgtactgaatatctctattggtgccatattggctgttctaacgcagcagctgctcgtcagttggagatcttaatttttccttttgacttaggtctgcatccactattcgaattttattcttgtagtagctgccatattttgcccatctgaaatgtaatcatagattcacatttgggcccatcctaactttctctaggttccggtctttgttatgcctactgtgaaaatgcaaaactgtctttccttcagttacattgaggagttctctaattatgctgttaacttaggcagatgttgattaggatctgtttgatagagctctcaaagtgttttttgggagctgaaaacaattttttttattaagaagtgggtgattttatgc

SEQ ID NO: 6927 - protein, 174 aa, Zea mays subsp. mays
  peptide (1)..(174): Ceres Seq. ID no. 12382082
ARDHYLEHPNRKENVRESYLSASRVQSSDSAHHPSLVSNGVLTPAPRPLLLVAPHPLLPRRAQNPPSVPPRAQGSVPPLPFPASRAPGRCCGGRGGHPGRARRRLLDVAADVAVRRCQQPRCLCLRIAVASLGTVRLRLRRRLSLGHPDVGARSEPRVSSSLSHTSLWAQRLLS

SEQ ID NO: 6928 - protein, 134 aa, Zea mays subsp. mays
  peptide (1)..(134): Ceres Seq. ID no. 12382083
MACSLPLHAPFSSSPRILSYRAAPRTLPLFRRGLRVPYHRSPSPPRALPDVAAGAVAGIRDALADAFLTSPPTWRSAAASNLAVFVSGSPLLLSGLSASGFAAAYLLGTLTWARVRSPGFPPRCRILRCGHSGY

SEQ ID NO: 6929 - DNA, 1670 bp, Zea mays subsp. mays
  misc_feature (1)..(1670): Ceres Seq. ID no. 13493469
  misc_feature (1)..(1670): Ortholog of  Ceres SEQ ID NO 12466401 as cited in SEQ ID NO 20698
  misc_feature (1)..(1670): Ortholog of  Ceres SEQ ID NO 15224731 as cited in SEQ ID NO 63650
acctccagctttctactctactacctgcaggagtgcaggctgcaggcgcacacgcaactcgcagccgaccacgccccccgcaggccgcgatgccgccgccgccgcagcagcagcccccgcaccggcacgccaagacggactcggaggtgacgtccagcatggcggcgtcgtccccgccgcgtgcggcctactacgtgcagtcgccgagccacgacgacggcgagaacaagacggccgcgtcctccttccactcgtcccctgcggcatccccgccgcggtcggcgtccaggcactcctcctcctcctcccgcttctccgccagcgcaaagggcaccgcctccggcgccggcggcggccggcgacgcggcagcgcgtgggcgaaggaggcggccatcgaggaggagggcctgctcggcgtggacgacggcagcggcggcgatggagacggccgcggcgggatccccaggcgggcgcgctacttgctcggcttcgcgggcgccttcctcggcctgttcctcctcttcgcgctcgtcctctggggcgccagccgcaaccagcgccccgtcgtggccctgcgcgccgtcacgttccaccgcttcgtcgtccaggccggcaccgacgcgtcgctcgtgcccaccgagatggcctcgctcaacgccaccgtcagcctcaccttccgcaacgtcggtaccttcttcggcgtccacgtctccgccgaccccgtcacgctccactacgcgcagctccagctcgcgtcgggcaacatgaagtacttctaccagccccggaggagccagcggagcctggcggtggcggtggtcggcgacaaggtgcccctgtacggcggcggggcggggctgagcagcaccccgacgacgctgccgccgccgaggaagcgcgcgccgccggtggtggtgccgccgccgcccgtgccgctgcggctggccgtgcgggtgcggtcgcgcgcgttcgtgctggggagcctggtcaagcccaagttctacagcgaggcgcagtgcagcgtcaccatggaccaggccaggctcggtaagccagtctccctcaacaaggcatgcacctacacacactagcttggctaggctacatacatacgcctgctgccgtgggtcgtctcgtcgccaccatgcatggtcgtcgcgtcgtgaactttgcccttcttcttgaacaacacacactctctctcagtctctctctcccttcgcttttctgcgtgcgtgcgtttgttggtcgcttgtcttgtacatagaaatttttagtttctggtgtacgtaggagagttttgagtgagatggaataagaatcaggcattatttccctcatacggcgtttccgattgcgtgacatgccgtggagggcatgtaaaatgtcggtgaaattcaatgcgcctgtttggtgaaattcaatgcgctcgaagcagacgtaagattctggtgaaatacacctaaaaattcacggccgcgcatgtaatatagcttcttcaggtgaagtttggaccccggccgacagtcaccgaccgcaagtgctcatccggtgaggtttgtcagttagattcaaatccactaccgttcatataaatccgattcttttttttagatctgacaaatgtaacacggagccttcgcaatgaatgaatgaatgattgaataaac

SEQ ID NO: 6930 - protein, 362 aa, Zea mays subsp. mays
  peptide (1)..(362): Ceres Seq. ID no. 13493470
LQLSTLLPAGVQAAGAHATRSRPRPPQAAMPPPPQQQPPHRHAKTDSEVTSSMAASSPPRAAYYVQSPSHDDGENKTAASSFHSSPAASPPRSASRHSSSSSRFSASAKGTASGAGGGRRRGSAWAKEAAIEEEGLLGVDDGSGGDGDGRGGIPRRARYLLGFAGAFLGLFLLFALVLWGASRNQRPVVALRAVTFHRFVVQAGTDASLVPTEMASLNATVSLTFRNVGTFFGVHVSADPVTLHYAQLQLASGNMKYFYQPRRSQRSLAVAVVGDKVPLYGGGAGLSSTPTTLPPPRKRAPPVVVPPPPVPLRLAVRVRSRAFVLGSLVKPKFYSEAQCSVTMDQARLGKPVSLNKACTYTH

SEQ ID NO: 6931 - protein, 349 aa, Zea mays subsp. mays
  peptide (1)..(349): Ceres Seq. ID no. 13493471
PPAFYSTTCRSAGCRRTRNSQPTTPPAGRDAAAAAAAAPAPARQDGLGGDVQHGGVVPAACGLLRAVAEPRRRREQDGRVLLPLVPCGIPAAVGVQALLLLLPLLRQRKGHRLRRRRRPATRQRVGEGGGHRGGGPARRGRRQRRRWRRPRRDPQAGALLARLRGRLPRPVPPLRARPLGRQPQPAPRRGPARRHVPPLRRPGRHRRVARAHRDGLAQRHRQPHLPQRRYLLRRPRLRRPRHAPLRAAPARVGQHEVLLPAPEEPAEPGGGGGRRQGAPVRRRGGAEQHPDDAAAAEEARAAGGGAAAARAAAAGRAGAVARVRAGEPGQAQVLQRGAVQRHHGPGQAR

SEQ ID NO: 6932 - protein, 333 aa, Zea mays subsp. mays
  peptide (1)..(333): Ceres Seq. ID no. 13493472
MPPPPQQQPPHRHAKTDSEVTSSMAASSPPRAAYYVQSPSHDDGENKTAASSFHSSPAASPPRSASRHSSSSSRFSASAKGTASGAGGGRRRGSAWAKEAAIEEEGLLGVDDGSGGDGDGRGGIPRRARYLLGFAGAFLGLFLLFALVLWGASRNQRPVVALRAVTFHRFVVQAGTDASLVPTEMASLNATVSLTFRNVGTFFGVHVSADPVTLHYAQLQLASGNMKYFYQPRRSQRSLAVAVVGDKVPLYGGGAGLSSTPTTLPPPRKRAPPVVVPPPPVPLRLAVRVRSRAFVLGSLVKPKFYSEAQCSVTMDQARLGKPVSLNKACTYTH

SEQ ID NO: 6933 - DNA, 1523 bp, Zea mays subsp. mays
  misc_feature (1)..(1523): Ceres Seq. ID no. 12365642
  misc_feature (1)..(1523): Ortholog of  Ceres SEQ ID NO 14315418 as cited in SEQ ID NO 57506
  misc_feature (1)..(1523): Ortholog of  Ceres SEQ ID NO 13658922 as cited in SEQ ID NO 66316
atgagaaaaatagaaaattcctccaaaccctaagcccctctctgctcacctctgtactccgaatctgctcccaagtctgctagggtttaacgctcgcgtcctcctcacgcattcggtctggtcgctgatcttcgcttgttcgattccgctcggctctaggacccaggctctcgaggcggctggagtggcggcgcgacgagagggtgaagcggatgcagacggaggcgagggtggggatggccgccgccacgatggacggcaccggcgccgcggcgtccgccgcccggaggtacacgacgcagcagcagcagcagcagctgcagcaccaccagccgcagctcgggaccgtgccccatctcctcgccggcggcgtcgctggcgcagtcagcaagacctgcaccgccccgctcgcacgcctcaccatcctctttcaggtacaaggaatgcactcagatgtggctacaatgcgcaatactagcatatggcgtgaagcatcccgcattgtctatggagaaggttttcgagctttctggaaagggaaccttgttaccattgctcaccggttgccttactcttcaattagtttctatgcctatgagagatacaagaatttgcttcagatgctaccgggtcttgagaagaatggtggatttggtgcagatgttggtgttagattgctaggtggtggtttatcaggaatcactgcagcttctgtgacgtatccactggacttggtgcggacacgtcttgctgcccagacaaatactgcctactacaggggcatatctcatgctctttatgcgatctgcagagatgagggtgtccgtggattgtacaagggtcttggtgccactttactgggagtgggccccagcattgcagtaagcttctctgtgtatgaaactttacgttcccattggcaaatagagaggccatgtgattcccctgttctgatcagtttggcttgtggaagtctttcaggaattgcatcatctacttttacattcccgttggatcttgtgagacgtcgcatgcaattggaaggagcagccgggagggctcgcgtctaccagacaggactttttggaaccttcggacatattgtccgtacggagggttttagaggcatgtatagaggaatcttgcctgagtactgcaaagtggttcctggtgtcggcatcgtatttatgacatatgagatgcttaaggccatcctcacaggactggaatctgatgattagatatctgcgaggtcatgctacacaattttgatacatggtgtcagaacaacatttgaggctgattagactgggagaaatatgagcatgtagcatacgttagggtttaggatgtgctaaggtttgcagtttgtgttatatggttacagatgtttatgtagtgcaccgtgaaagatgccacaggtcttccaaaatgaatatttttttggcatcaccaccattttgtgtatcttcaataacattgtaatggtacatgaagctgttgtctttagcctgatgatcttt

SEQ ID NO: 6934 - protein, 342 aa, Zea mays subsp. mays
  peptide (1)..(342): Ceres Seq. ID no. 12365643
MQTEARVGMAAATMDGTGAAASAARRYTTQQQQQQLQHHQPQLGTVPHLLAGGVAGAVSKTCTAPLARLTILFQVQGMHSDVATMRNTSIWREASRIVYGEGFRAFWKGNLVTIAHRLPYSSISFYAYERYKNLLQMLPGLEKNGGFGADVGVRLLGGGLSGITAASVTYPLDLVRTRLAAQTNTAYYRGISHALYAICRDEGVRGLYKGLGATLLGVGPSIAVSFSVYETLRSHWQIERPCDSPVLISLACGSLSGIASSTFTFPLDLVRRRMQLEGAAGRARVYQTGLFGTFGHIVRTEGFRGMYRGILPEYCKVVPGVGIVFMTYEMLKAILTGLESDD

SEQ ID NO: 6935 - protein, 334 aa, Zea mays subsp. mays
  peptide (1)..(334): Ceres Seq. ID no. 12365644
MAAATMDGTGAAASAARRYTTQQQQQQLQHHQPQLGTVPHLLAGGVAGAVSKTCTAPLARLTILFQVQGMHSDVATMRNTSIWREASRIVYGEGFRAFWKGNLVTIAHRLPYSSISFYAYERYKNLLQMLPGLEKNGGFGADVGVRLLGGGLSGITAASVTYPLDLVRTRLAAQTNTAYYRGISHALYAICRDEGVRGLYKGLGATLLGVGPSIAVSFSVYETLRSHWQIERPCDSPVLISLACGSLSGIASSTFTFPLDLVRRRMQLEGAAGRARVYQTGLFGTFGHIVRTEGFRGMYRGILPEYCKVVPGVGIVFMTYEMLKAILTGLESDD

SEQ ID NO: 6936 - protein, 329 aa, Zea mays subsp. mays
  peptide (1)..(329): Ceres Seq. ID no. 12365645
MDGTGAAASAARRYTTQQQQQQLQHHQPQLGTVPHLLAGGVAGAVSKTCTAPLARLTILFQVQGMHSDVATMRNTSIWREASRIVYGEGFRAFWKGNLVTIAHRLPYSSISFYAYERYKNLLQMLPGLEKNGGFGADVGVRLLGGGLSGITAASVTYPLDLVRTRLAAQTNTAYYRGISHALYAICRDEGVRGLYKGLGATLLGVGPSIAVSFSVYETLRSHWQIERPCDSPVLISLACGSLSGIASSTFTFPLDLVRRRMQLEGAAGRARVYQTGLFGTFGHIVRTEGFRGMYRGILPEYCKVVPGVGIVFMTYEMLKAILTGLESDD

SEQ ID NO: 6937 - DNA, 1659 bp, Zea mays subsp. mays
  misc_feature (1)..(1659): Ceres Seq. ID no. 12387042
  misc_feature (1)..(1659): Ortholog of  Ceres SEQ ID NO 14310369 as cited in SEQ ID NO 54765
  misc_feature (1)..(1659): Ortholog of  Ceres SEQ ID NO 13638746 as cited in SEQ ID NO 59296
  misc_feature (1)..(1659): Ortholog of  Ceres SEQ ID NO 13596474 as cited in SEQ ID NO 62169
  misc_feature (1)..(1659): Ortholog of  Ceres SEQ ID NO 13598714 as cited in SEQ ID NO 62656
  misc_feature (1)..(1659): Ortholog of  Ceres SEQ ID NO 14302434 as cited in SEQ ID NO 63410
  misc_feature (1)..(1659): Ortholog of  Ceres SEQ ID NO 13597519 as cited in SEQ ID NO 64759
  misc_feature (1)..(1659): Ortholog of  Ceres SEQ ID NO 13587054 as cited in SEQ ID NO 0
aaagaacccgagcaccgcctcagctcatcctcgcagatacgtttcagttccggagcgactagcgcgagcgttcagggattatttactgaaagagagagtgttcagggattttagcacttgttcatggctgctgcgtgcatcagccatcgctttcgccactccaagctcccggtactggtcctggcgctggcgacggtggtggccgccgcacgggctcagctgtcgccgccgacgttctacgcctcgtcgtgccctgccgcgctcgtcaccatcaacgccgccgtgagggctgccgtgctgctggaccgccgcatgggcgcctccctgctccggctccacttccacgactgcttcgtgcagggctgcgacgcgtccgttctgctggacgacacgggcaacttcaccggggagaagggcgcgggccccaacgcgggctcgctcagggggttcggcgtcatcgacaccgtcaaggccctgctggaggcgctgtgcccgcggaccgtgtcgtgcgccgacatcctcgccgtcgccgcccgtgactctgtcgtcgcgctcggaggcccatcgtggaccgtgcagctcggcaggagggactccaccacggcgagcctctccaccgcgaacaccgacctcccctcgccggcgtccagcctgagcaccctgctcgccgcattcgccaggaaaggcggtcagcagcaccgacatggtcgctctgtctggtgcgtccctcaccgatcaatcaaccacggaccacgctttcatcagtgaccagtcatcaccgcagcgcctggcttcacatcacagtgatgttatggcatggtcaccgacgtgaccatgcaactaccagttcccctgtgcctctactctaacagcggtggcagcttggcagttagcaccagcgcggcagcgccaccgccacgtactggtcaccactgacacgtgagcggttgcgtatgcatgatgcaggagcccacacggtggggcaagcgcagtgccagaactaccaggccaggatctacaacgacgccaacatcaacgcggccttcgcggcgtcgctgagggccggctgcccggcgtccggagggggcggcgccaacgcgccgctggacgcgtccacgccgaacgcgttcgacaacgcgtactacggcgatctggtcgcgcagcagggcctgctgcactccgatcaagagctcttcaacggtggctccacggacgcactggtcaggagctacgcggccagctcggcgcggtttagtagcgacttcgccgcagccatggtcaggatgggcgccattggtgtcctgaccgggagcagcggacaggtgcggcgcaactgccggaaggtgaactagccagctcgcagaatactgcattgtatgcatcacactggtggaagaaattgtgtgtgctgagttatccaaccatggttgaacgaagttgtaaagattaaagggcaacgaagtcatatagcttgcattgatgttgtcattaaagaagtacaccctccatttttttctgcaaatacctagaacatttaggtatcactgtagctcaactttgagtataaatgtagcatataattatctctttcatatggccaacaataatatacaaatgtattctgtataagttacaattattataataaaattcaattcc

SEQ ID NO: 6938 - protein, 214 aa, Zea mays subsp. mays
  peptide (1)..(214): Ceres Seq. ID no. 12387043
MAAACISHRFRHSKLPVLVLALATVVAAARAQLSPPTFYASSCPAALVTINAAVRAAVLLDRRMGASLLRLHFHDCFVQGCDASVLLDDTGNFTGEKGAGPNAGSLRGFGVIDTVKALLEALCPRTVSCADILAVAARDSVVALGGPSWTVQLGRRDSTTASLSTANTDLPSPASSLSTLLAAFARKGGQQHRHGRSVWCVPHRSINHGPRFHQ

SEQ ID NO: 6939 - protein, 151 aa, Zea mays subsp. mays
  peptide (1)..(151): Ceres Seq. ID no. 12387044
MGASLLRLHFHDCFVQGCDASVLLDDTGNFTGEKGAGPNAGSLRGFGVIDTVKALLEALCPRTVSCADILAVAARDSVVALGGPSWTVQLGRRDSTTASLSTANTDLPSPASSLSTLLAAFARKGGQQHRHGRSVWCVPHRSINHGPRFHQ

SEQ ID NO: 6940 - protein, 132 aa, Zea mays subsp. mays
  peptide (1)..(132): Ceres Seq. ID no. 12387045
MHDAGAHTVGQAQCQNYQARIYNDANINAAFAASLRAGCPASGGGGANAPLDASTPNAFDNAYYGDLVAQQGLLHSDQELFNGGSTDALVRSYAASSARFSSDFAAAMVRMGAIGVLTGSSGQVRRNCRKVN

SEQ ID NO: 6941 - DNA, 1157 bp, Zea mays subsp. mays
  misc_feature (1)..(1157): Ceres Seq. ID no. 13496128
  misc_feature (1)..(1157): Ortholog of  Ceres SEQ ID NO 12472913 as cited in SEQ ID NO 115
  misc_feature (1)..(1157): Ortholog of  Ceres SEQ ID NO 15225086 as cited in SEQ ID NO 69009
aaagcccagcacgaccaaaacccagaacctgagaatggcgcagttccttcgcggcaaggccgccgccgccgccaccggggcggcggcgctgcgcgcgtcntctccggcgccatggcggcggacggcctccgcgtcgtaccaccacacgatccaggctgtaccgcgggagacagccggcccgcgcgccgcggcgcgcgagcgccgccacggccgcgtcccggcggtcctgctcacgctcgcgggcgccgcgccagggaacggaattgcccaccggcacctccttaccgccgacaggaggcagctcgcggagatgctcaagcagtcgccctacttcctctccacccccgtccgcctccaggtccgcgcgggcgagcgatccaacgccatcctccacgccggcaccgtcctccccatcaaggtgcatagagatgaaaattctgggaatatactgaatttggtaatggtgaaggcagatgaaggaacaatgctgaaggtggatttgcctgtagagttcaagggagaggatgcttgccctgggttgaagaaaggaggctttttgcagaaaataaggaccagcctggtgtatctctgcccagctgagcacatccctccaaaaattgaggtggacctgacaaatcttgatgtcggagatagggtattgatgcatgacattcccgtccatccatcgctcaagttgctgagtaaaaacgagaccatgcccgtctgcaagatcttggcctcaaagccagacgagtaggaggcgctgcaaatacttcagagctgataacattgtacctttaggtggtacagccctccagcagctccgtccctagttcttggcttgctttttggtcatctgtcccctaggtttcaatgtgatagtggattcagacaagctatgggcttcaagtaaagatacgaaggaacaaaatgaagaaatatcactggagagacattgtctgtaccaaccgctatagaataacatcctttctcattcagtttgggttcagggacacatgacatgtaagacgactatcctttgctgtggcctgggtgaattcattctctaagctactcttgcagcggctcacaattcatcgtcctgactgcatgcattgtactgtcatgattctacgtattgaatgttgtattcatgc

SEQ ID NO: 6942 - protein, 251 aa, Zea mays subsp. mays
  peptide (1)..(251): Ceres Seq. ID no. 13496129
  misc_feature (33)..(33): Xaa is any aa, unknown or other
KPSTTKTQNLRMAQFLRGKAAAAATGAAALRAXSPAPWRRTASASYHHTIQAVPRETAGPRAAARERRHGRVPAVLLTLAGAAPGNGIAHRHLLTADRRQLAEMLKQSPYFLSTPVRLQVRAGERSNAILHAGTVLPIKVHRDENSGNILNLVMVKADEGTMLKVDLPVEFKGEDACPGLKKGGFLQKIRTSLVYLCPAEHIPPKIEVDLTNLDVGDRVLMHDIPVHPSLKLLSKNETMPVCKILASKPDE

SEQ ID NO: 6943 - protein, 240 aa, Zea mays subsp. mays
  peptide (1)..(240): Ceres Seq. ID no. 13496130
  misc_feature (22)..(22): Xaa is any aa, unknown or other
MAQFLRGKAAAAATGAAALRAXSPAPWRRTASASYHHTIQAVPRETAGPRAAARERRHGRVPAVLLTLAGAAPGNGIAHRHLLTADRRQLAEMLKQSPYFLSTPVRLQVRAGERSNAILHAGTVLPIKVHRDENSGNILNLVMVKADEGTMLKVDLPVEFKGEDACPGLKKGGFLQKIRTSLVYLCPAEHIPPKIEVDLTNLDVGDRVLMHDIPVHPSLKLLSKNETMPVCKILASKPDE

SEQ ID NO: 6944 - protein, 148 aa, Zea mays subsp. mays
  peptide (1)..(148): Ceres Seq. ID no. 13496131
MLKQSPYFLSTPVRLQVRAGERSNAILHAGTVLPIKVHRDENSGNILNLVMVKADEGTMLKVDLPVEFKGEDACPGLKKGGFLQKIRTSLVYLCPAEHIPPKIEVDLTNLDVGDRVLMHDIPVHPSLKLLSKNETMPVCKILASKPDE

SEQ ID NO: 6945 - DNA, 1620 bp, Zea mays subsp. mays
  misc_feature (1)..(1620): Ceres Seq. ID no. 12408990
  misc_feature (1)..(1620): Ortholog of  Ceres SEQ ID NO 13584646 as cited in SEQ ID NO 60715
actgtactaaaccgcgaggaaaagtagcaaagaaattacaagggggtggacgcgcggggggcaagtcgtctccttcgatttcgttcttgcctctttgcctctctcaaggtctgctcaaactcaaagtggattcggcagaacacgcatggcgtagagcgcggggagcaagagatttcctagcttcaagaacctggaagaacaagtcgaggatccgtcgtcgagcccgactgttctaagagaaagtaattagcaagcagctctcgattatactgtattatttatcgaaaccctatctaagctagtagcaagctagctagctagaagaggaggaggaagctggcgaactggtggtgggacgaggggcggggcggcctgccggagccatcccttggcaagaaccaagaagaaatggcaccttcctccaaggacggcgccaccgccaccgagcagccgacgagcggcgacgacgaccgggagaacggcggcacgggcgagcccaaggaaggcgcggtggtggcgggcaaccggcggccccgcgggcggccgccggggtccaagaacaagcccaagccgcccatcttcgtgacgcgcgacagccccaacgcgctgcgcagccacgtgatggaggtggccggcggcgccgacgtggccgagtccatcgcccacttcgcgcgccgcaggcagcgcggcgtgtgcgtgctcagcggcgcgggcaccgtcgccgacgtggcgctccgccagcccgcggctccgggcgccgtggtcgccctccgcggccgcttcgagatcctctcgctcaccggcacgttcctgccgggccccgcgccgccgggctccacggggctcaccgtgtacctcgcgggcggccaggggcaggtcgtcggcggcagcgtcgtcggcacgctcaccgcggcggggcccgtcatggtgatggcgtccacgttcgccaacgccacctacgagaggctgccgctggacgacgccgacgaggagcccgccgggcagcaggcggcgcagctgcctcccggaccgggcggagggcagcctatggtaatgggcgggatggccgacccctcagcggtgccaatgttcggcggcgccggcgntgtgccgccaagcctcatgccagcaggggccgcagccgcctcctccggtgcgggcctgcagctcgggcacgaccgacttgcatgggctcatgcacggccaccgccatactaggaagccggggaggatgcatcatccatgaccgaggaaattgatgaattagaaatggaggatcgttcagcgcaacaacagctagcagcagctcaaggacgactgccactcaccatcatatagtaactagaaccgaacgaagatcgaattaagcgctagcttccaggagctaataaaactctcttcgatcaattctacctattacagtactctgctaagaaggtaaactacttatagtgctatatatgtatgtatattactacactgctactgcatgcatgtgactgtgtggctgtgccaaatgtcagcgcaagatacgatggagcttgcattgttttttcccattgtaatgtttgatttatattaattattagatacagcatgataaatagatgatggatgatt

SEQ ID NO: 6946 - protein, 269 aa, Zea mays subsp. mays
  peptide (1)..(269): Ceres Seq. ID no. 12408991
  misc_feature (233)..(233): Xaa is any aa, unknown or other
MAPSSKDGATATEQPTSGDDDRENGGTGEPKEGAVVAGNRRPRGRPPGSKNKPKPPIFVTRDSPNALRSHVMEVAGGADVAESIAHFARRRQRGVCVLSGAGTVADVALRQPAAPGAVVALRGRFEILSLTGTFLPGPAPPGSTGLTVYLAGGQGQVVGGSVVGTLTAAGPVMVMASTFANATYERLPLDDADEEPAGQQAAQLPPGPGGGQPMVMGGMADPSAVPMFGGAGXVPPSLMPAGAAAASSGAGLQLGHDRLAWAHARPPPY

SEQ ID NO: 6947 - protein, 198 aa, Zea mays subsp. mays
  peptide (1)..(198): Ceres Seq. ID no. 12408992
  misc_feature (162)..(162): Xaa is any aa, unknown or other
MEVAGGADVAESIAHFARRRQRGVCVLSGAGTVADVALRQPAAPGAVVALRGRFEILSLTGTFLPGPAPPGSTGLTVYLAGGQGQVVGGSVVGTLTAAGPVMVMASTFANATYERLPLDDADEEPAGQQAAQLPPGPGGGQPMVMGGMADPSAVPMFGGAGXVPPSLMPAGAAAASSGAGLQLGHDRLAWAHARPPPY

SEQ ID NO: 6948 - DNA, 1555 bp, Zea mays subsp. mays
  misc_feature (1)..(1555): Ceres Seq. ID no. 12408986
  misc_feature (1)..(1555): Ortholog of  Ceres SEQ ID NO 15177328 as cited in SEQ ID NO 52523
  misc_feature (1)..(1555): Ortholog of  Ceres SEQ ID NO 13655881 as cited in SEQ ID NO 64426
ttctgcaagccttgctccatttgcgactcgcgagctcaccttccacaccctacctactcctccactctgagctcacaccaaacagcccgtgcaccaaggccaccattcacctccaccaacaacaaacgggaactcttcacagcttcgcacctcgcgtcacaacaccaagacgcacgtaggagggaacctcaagcttcagtcgtccatggctcagcagcaaacaaatcctgaagaggtggtcctcgggcaggaggtcggggccgcgagggtggccactctcaaccgcccgcgccagctcaacggcatctccgacagagtggtgtacctcctcgcacagtttctggagaaatgggagaaggatgagaacgccaaattcgtcatctttaagggtgctgggcgtgcattttctgctggtggggacctaaagatgttttatgaagggaaatcaaatgattcctgcctcgaggttgtgtatagaatgtattggctttgctaccacattcacacgtacaagaaaaccatggttgctcttgttaatgggcttgtcatgggtggtggcgctgcaatggttgcgccactaaagtttgcagttgtcacagagaaaacaatctttgctactcctgaggctagtgttggattgcacacagattgtagcttttcctacatccattcccggctccctggatatttaggcgagtatctggctttaactggtgctagactgaatgcgaaggaaatgatttctgctggtcttgctactcattttgtcagttctgaaaaattggaagaacttgaaaaacgtctactggatttggacacaggtgctgagtctgcagtccgagctgttattgaagaattttcaacagatgttcaaactgatgaagatagtatattgaataagctttcaactatcaacaaatgcttctctgcagagactgttgaggatatcataaaagcatttgaatcagaagcgagcatagacggaaaccaatggatagctccagtcctaaagggtctgagaagatcatctccaactgcactgaagatcaccctgagatcgatcagagaaggtcgaaaacagagtttgcctgaatgtttgactaaggaatttaggcttacaatgaatatactgcggtctgttgtcaatggggatgtttatgagggcattagagctcttagcatcgataaagacaatgcccctaagtggaatcccactacccttgaggaggtgaagtacgaggacatcgaccgtctgttccagccgttcagtccggagctggaacttcaggtcccatctgatgattccaacaggtggagcggcaaatacgagaacacggtctatggcagagcttcccagtgactgtatacaagatcccccagccttttgttattttcatccgaaccactgcattacggaatattcagtttgcggcacgtgtgtatttcgagtgtttgtgtagcgcgacgttccaatgtatgaactgttgcaaaggttacacgatgacatgaagtttgatccaacaccaaaaccatctattagatgggaaagttctgc

SEQ ID NO: 6949 - protein, 384 aa, Zea mays subsp. mays
  peptide (1)..(384): Ceres Seq. ID no. 12408987
MAQQQTNPEEVVLGQEVGAARVATLNRPRQLNGISDRVVYLLAQFLEKWEKDENAKFVIFKGAGRAFSAGGDLKMFYEGKSNDSCLEVVYRMYWLCYHIHTYKKTMVALVNGLVMGGGAAMVAPLKFAVVTEKTIFATPEASVGLHTDCSFSYIHSRLPGYLGEYLALTGARLNAKEMISAGLATHFVSSEKLEELEKRLLDLDTGAESAVRAVIEEFSTDVQTDEDSILNKLSTINKCFSAETVEDIIKAFESEASIDGNQWIAPVLKGLRRSSPTALKITLRSIREGRKQSLPECLTKEFRLTMNILRSVVNGDVYEGIRALSIDKDNAPKWNPTTLEEVKYEDIDRLFQPFSPELELQVPSDDSNRWSGKYENTVYGRASQ

SEQ ID NO: 6950 - protein, 310 aa, Zea mays subsp. mays
  peptide (1)..(310): Ceres Seq. ID no. 12408988
MFYEGKSNDSCLEVVYRMYWLCYHIHTYKKTMVALVNGLVMGGGAAMVAPLKFAVVTEKTIFATPEASVGLHTDCSFSYIHSRLPGYLGEYLALTGARLNAKEMISAGLATHFVSSEKLEELEKRLLDLDTGAESAVRAVIEEFSTDVQTDEDSILNKLSTINKCFSAETVEDIIKAFESEASIDGNQWIAPVLKGLRRSSPTALKITLRSIREGRKQSLPECLTKEFRLTMNILRSVVNGDVYEGIRALSIDKDNAPKWNPTTLEEVKYEDIDRLFQPFSPELELQVPSDDSNRWSGKYENTVYGRASQ

SEQ ID NO: 6951 - protein, 293 aa, Zea mays subsp. mays
  peptide (1)..(293): Ceres Seq. ID no. 12408989
MYWLCYHIHTYKKTMVALVNGLVMGGGAAMVAPLKFAVVTEKTIFATPEASVGLHTDCSFSYIHSRLPGYLGEYLALTGARLNAKEMISAGLATHFVSSEKLEELEKRLLDLDTGAESAVRAVIEEFSTDVQTDEDSILNKLSTINKCFSAETVEDIIKAFESEASIDGNQWIAPVLKGLRRSSPTALKITLRSIREGRKQSLPECLTKEFRLTMNILRSVVNGDVYEGIRALSIDKDNAPKWNPTTLEEVKYEDIDRLFQPFSPELELQVPSDDSNRWSGKYENTVYGRASQ

SEQ ID NO: 6952 - DNA, 1274 bp, Zea mays subsp. mays
  misc_feature (1)..(1274): Ceres Seq. ID no. 12352466
  misc_feature (1)..(1274): Ortholog of  Ceres SEQ ID NO 15177854 as cited in SEQ ID NO 51851
  misc_feature (1)..(1274): Ortholog of  Ceres SEQ ID NO 15177087 as cited in SEQ ID NO 51932
  misc_feature (1)..(1274): Ortholog of  Ceres SEQ ID NO 13662937 as cited in SEQ ID NO 64415
  misc_feature (1)..(1274): Ortholog of  Ceres SEQ ID NO 13595984 as cited in SEQ ID NO 68340
  misc_feature (1)..(1274): Ortholog of  Ceres SEQ ID NO 12635014 as cited in SEQ ID NO 0
ctacaaatatatggctgcagctgaggtccgacaccacacaaacagcacatctgtttagccaagctgtggccaacctctgcgaggaatggagatggagtcgactcctctcttgacaccatacaagatgggcgatttcaacctggcacacagggttgtgctggcgccgctgacgaggtgccgggcgttcgggaacgtgccgcagccggagcacatggctctctactaccgccagcgggcgacgcccggcggcttcctcatcgccgaggcctgcgccgtgtcggagagcgcgcgcgggtacccggacgttccggggctgtggacccaccaacaggtcgtggcctggaagccgatcgtcgacgccgtccacgccagcggtgccgtcttcttcgcccagctctggcacaccggccgggcctccccctcagaattccaaccaaatgggcaggcaccgatctctagcacggacaagcaaatcccagcacaggtgaaccattccggtgacgtcaacacgttcgcggtgcctcggagactagagacagaggagataccacacgtcgtcaatgacttccgggttgccgccagaaacgccatcaaagcaggctttgatggagtggagatccacgcggcaaacgggtacctgttcgatcagttcatgaaggacagcaccaatgaccgagacgactcctacgggggcagcttggagaaccggtgccgtttcacagccgaggtgatggcagccgtcgcggacgaggtcggtgccaaccgcctcggtgtgcgcctctctccgttcgcggattatatggactgccacgactccaacccagaggcgctcgcgcttcatgtcatcgacgagacgctgaacccgctcggcgtgctttactgccacatggtagagccaaggatgcgggtgaacccagacgacggtattatgactctcgagcacatgctgctaccgttcaggagggcgtttcgcgggacgttcattgctaatggaggctacgaccgtgaggaaggcaatgacgccattgcccgtggccgtggctatgcagatctcatcgcatacggccggatattccttgccaacccggaccttccgatgcgttttgccaagaatgccccgctgaacaagtatgataggagcaccttctatacctctgatccggtggttgggtacacagattatccatttctcgatcaactctaggatgattggcttataaacaatttccccacctggagtactatcttgaccttaaaataaaatgagtgtcact

SEQ ID NO: 6953 - protein, 372 aa, Zea mays subsp. mays
  peptide (1)..(372): Ceres Seq. ID no. 12352467
MEMESTPLLTPYKMGDFNLAHRVVLAPLTRCRAFGNVPQPEHMALYYRQRATPGGFLIAEACAVSESARGYPDVPGLWTHQQVVAWKPIVDAVHASGAVFFAQLWHTGRASPSEFQPNGQAPISSTDKQIPAQVNHSGDVNTFAVPRRLETEEIPHVVNDFRVAARNAIKAGFDGVEIHAANGYLFDQFMKDSTNDRDDSYGGSLENRCRFTAEVMAAVADEVGANRLGVRLSPFADYMDCHDSNPEALALHVIDETLNPLGVLYCHMVEPRMRVNPDDGIMTLEHMLLPFRRAFRGTFIANGGYDREEGNDAIARGRGYADLIAYGRIFLANPDLPMRFAKNAPLNKYDRSTFYTSDPVVGYTDYPFLDQL

SEQ ID NO: 6954 - protein, 370 aa, Zea mays subsp. mays
  peptide (1)..(370): Ceres Seq. ID no. 12352468
MESTPLLTPYKMGDFNLAHRVVLAPLTRCRAFGNVPQPEHMALYYRQRATPGGFLIAEACAVSESARGYPDVPGLWTHQQVVAWKPIVDAVHASGAVFFAQLWHTGRASPSEFQPNGQAPISSTDKQIPAQVNHSGDVNTFAVPRRLETEEIPHVVNDFRVAARNAIKAGFDGVEIHAANGYLFDQFMKDSTNDRDDSYGGSLENRCRFTAEVMAAVADEVGANRLGVRLSPFADYMDCHDSNPEALALHVIDETLNPLGVLYCHMVEPRMRVNPDDGIMTLEHMLLPFRRAFRGTFIANGGYDREEGNDAIARGRGYADLIAYGRIFLANPDLPMRFAKNAPLNKYDRSTFYTSDPVVGYTDYPFLDQL

SEQ ID NO: 6955 - protein, 359 aa, Zea mays subsp. mays
  peptide (1)..(359): Ceres Seq. ID no. 12352469
MGDFNLAHRVVLAPLTRCRAFGNVPQPEHMALYYRQRATPGGFLIAEACAVSESARGYPDVPGLWTHQQVVAWKPIVDAVHASGAVFFAQLWHTGRASPSEFQPNGQAPISSTDKQIPAQVNHSGDVNTFAVPRRLETEEIPHVVNDFRVAARNAIKAGFDGVEIHAANGYLFDQFMKDSTNDRDDSYGGSLENRCRFTAEVMAAVADEVGANRLGVRLSPFADYMDCHDSNPEALALHVIDETLNPLGVLYCHMVEPRMRVNPDDGIMTLEHMLLPFRRAFRGTFIANGGYDREEGNDAIARGRGYADLIAYGRIFLANPDLPMRFAKNAPLNKYDRSTFYTSDPVVGYTDYPFLDQL

SEQ ID NO: 6956 - DNA, 1177 bp, Zea mays subsp. mays
  misc_feature (1)..(1177): Ceres Seq. ID no. 12408979
  misc_feature (1)..(1177): Ortholog of  Ceres SEQ ID NO 14314068 as cited in SEQ ID NO 52242
  misc_feature (1)..(1177): Ortholog of  Ceres SEQ ID NO 14314999 as cited in SEQ ID NO 52342
  misc_feature (1)..(1177): Ortholog of  Ceres SEQ ID NO 15177057 as cited in SEQ ID NO 55817
  misc_feature (1)..(1177): Ortholog of  Ceres SEQ ID NO 13585458 as cited in SEQ ID NO 60907
  misc_feature (1)..(1177): Ortholog of  Ceres SEQ ID NO 13598678 as cited in SEQ ID NO 61508
  misc_feature (1)..(1177): Ortholog of  Ceres SEQ ID NO 12625392 as cited in SEQ ID NO 63315
  misc_feature (1)..(1177): Ortholog of  Ceres SEQ ID NO 13598319 as cited in SEQ ID NO 68758
  misc_feature (1)..(1177): Ortholog of  Ceres SEQ ID NO 12589816 as cited in SEQ ID NO 0
  misc_feature (1)..(1177): Ortholog of  Ceres SEQ ID NO 12635175 as cited in SEQ ID NO 0
atagcgtatcacaaatagaatacaaccaatggctagtcgtccgagcacattccgatttgccgtcgtggccgtgctgtcgaccctgccacttgttgccagctctgcctccggccacgagaaccccgagcccgtggtcagggactcgccgcagaacggcaccaacaggaggtacctgtgggcgtcgtcgtcggcgcgaggctacggcggctggtcctccggcggcgcgacgtggtacgggagccctaacggcgccggcaccgacggtggcgcttgtggttatcacggtgacgtcagccagcgcccattcaagtcgatgatcgcggccggcggcccttccctcttcaagaacggcaaaggatgcggcgcatgctaccaaattaggtgcacgggcaacagagcctgctccggccggccagtgaccgtcaccgtcaccgactcgtgccccggcggtgcctgcctcgccgagtcggcgcacttcgacatgagcggcacggccttcggcgccatggccaacaaccgaggcatggccgaccgcctccgctccgccggaatcctcaagatccaatacaggagggtggcctgcaactacaacggcaggaccgtcagcttcaaggtggacgcggggtctaacccgtactacctcgccgttctcatcgagtacgtggccggcgacggcgacatctccgcggcggacatcatgcaagccggctgcgactcgtgggcgccgatgcagcagtcatggggcgccgtgtggcgcgtcaactccaacaacggccagccactccgtgcgcccttctcggtccgcgtcacctcgggctccggcaaggtcctcgtcgtcaggaacgccatccccgccgggtggaccgccgggaggacctaccggtccaccgtgaactacggctactgaggcagtgcgtgcgtgcgtatctcttcttcggtcttgggttttataagtgcgtccggaaaacgcgagaggccgatctggaagaggaggtttaggtatattcgtacgcgttcgatgtaacgacgtcttggtgcctccctccacacagaccgcagtgtgttttccttgtgatgtactaatgtttttatattagtatcggttgctctaacccgacagtaatatcaaacatcacttcatgttattcttctaaaccgataatgatatctttatttg

SEQ ID NO: 6957 - protein, 292 aa, Zea mays subsp. mays
  peptide (1)..(292): Ceres Seq. ID no. 12408980
MASRPSTFRFAVVAVLSTLPLVASSASGHENPEPVVRDSPQNGTNRRYLWASSSARGYGGWSSGGATWYGSPNGAGTDGGACGYHGDVSQRPFKSMIAAGGPSLFKNGKGCGACYQIRCTGNRACSGRPVTVTVTDSCPGGACLAESAHFDMSGTAFGAMANNRGMADRLRSAGILKIQYRRVACNYNGRTVSFKVDAGSNPYYLAVLIEYVAGDGDISAADIMQAGCDSWAPMQQSWGAVWRVNSNNGQPLRAPFSVRVTSGSGKVLVVRNAIPAGWTAGRTYRSTVNYGY

SEQ ID NO: 6958 - protein, 197 aa, Zea mays subsp. mays
  peptide (1)..(197): Ceres Seq. ID no. 12408981
MIAAGGPSLFKNGKGCGACYQIRCTGNRACSGRPVTVTVTDSCPGGACLAESAHFDMSGTAFGAMANNRGMADRLRSAGILKIQYRRVACNYNGRTVSFKVDAGSNPYYLAVLIEYVAGDGDISAADIMQAGCDSWAPMQQSWGAVWRVNSNNGQPLRAPFSVRVTSGSGKVLVVRNAIPAGWTAGRTYRSTVNYGY

SEQ ID NO: 6959 - DNA, 1092 bp, Zea mays subsp. mays
  misc_feature (1)..(1092): Ceres Seq. ID no. 12408975
  misc_feature (1)..(1092): Ortholog of  Ceres SEQ ID NO 14303263 as cited in SEQ ID NO 1224
  misc_feature (1)..(1092): Ortholog of  Ceres SEQ ID NO 13593955 as cited in SEQ ID NO 54278
  misc_feature (1)..(1092): Ortholog of  Ceres SEQ ID NO 13655302 as cited in SEQ ID NO 63307
  misc_feature (1)..(1092): Ortholog of  Ceres SEQ ID NO 13597380 as cited in SEQ ID NO 64054
  misc_feature (1)..(1092): Ortholog of  Ceres SEQ ID NO 12625474 as cited in SEQ ID NO 64169
  misc_feature (1)..(1092): Ortholog of  Ceres SEQ ID NO 13597502 as cited in SEQ ID NO 64681
ctgatggcacaggcacaccaccctcttctcctactaattcttttgctcttcctctcctccactgccattccttcctccaagagaacccagccgaagttctcggccgtcttctacttcggcgactcggttctcgacaccggcaacaacaaccatctccccacggtagctgtggcgaaccatgctccttacggaagggacttcccagggaagaaaccgacggggaggttttccgacggccggcttatcccagacctcctcaacgagaggctgcagctcaaagagttctcgccgccgtttctggacgcaaggctgccgaacaacgatgtcgcgacgggggtgaacttcgcttcggctgggtcaggattcgacgaccagacgtcgcggctgtccaacactctgccgatgtcgaaacaggtggacctcttcgaggactacctgctccggctcagaggcatcgttggggacaaggaggcttccaggatcgttgccagatctctgatctttatcagctcggggaccaacgatttctcacattactaccgttcgccaaagaagaggaagatggagattggtgactaccaggatattgttctccagatggtacaggtttatgtcaaggaattgtatgaccttggggggcgacagttctgtttggcaggccttccgccgtttggctgcacacctatccaaatcacgttgagcggagaccctggcagggcatgtgtggatgagcaaaactgggatgctcatgtctacaactctaaacttcaaagactgcttgcgaagttgcaaggctcactccatgggagcagaattgtgtacgtggacgcatacagagctctcgtggagatcctggagaacccggccaaatatggatttacagagacatcacgaggatgttgtgggactgggctcagagaggtcgctctgttttgcaatgcattcactcctatctgcaaaaatgtgtcatcctatgtattttacgatgctgtgcacccaacagagagggtttacatgttagtaaacgattacatagtcaacgatgttattccacagttttaattaatcaaatacccagataaggttttctcg

SEQ ID NO: 6960 - protein, 353 aa, Zea mays subsp. mays
  peptide (1)..(353): Ceres Seq. ID no. 12408976
LMAQAHHPLLLLILLLFLSSTAIPSSKRTQPKFSAVFYFGDSVLDTGNNNHLPTVAVANHAPYGRDFPGKKPTGRFSDGRLIPDLLNERLQLKEFSPPFLDARLPNNDVATGVNFASAGSGFDDQTSRLSNTLPMSKQVDLFEDYLLRLRGIVGDKEASRIVARSLIFISSGTNDFSHYYRSPKKRKMEIGDYQDIVLQMVQVYVKELYDLGGRQFCLAGLPPFGCTPIQITLSGDPGRACVDEQNWDAHVYNSKLQRLLAKLQGSLHGSRIVYVDAYRALVEILENPAKYGFTETSRGCCGTGLREVALFCNAFTPICKNVSSYVFYDAVHPTERVYMLVNDYIVNDVIPQF

SEQ ID NO: 6961 - protein, 352 aa, Zea mays subsp. mays
  peptide (1)..(352): Ceres Seq. ID no. 12408977
MAQAHHPLLLLILLLFLSSTAIPSSKRTQPKFSAVFYFGDSVLDTGNNNHLPTVAVANHAPYGRDFPGKKPTGRFSDGRLIPDLLNERLQLKEFSPPFLDARLPNNDVATGVNFASAGSGFDDQTSRLSNTLPMSKQVDLFEDYLLRLRGIVGDKEASRIVARSLIFISSGTNDFSHYYRSPKKRKMEIGDYQDIVLQMVQVYVKELYDLGGRQFCLAGLPPFGCTPIQITLSGDPGRACVDEQNWDAHVYNSKLQRLLAKLQGSLHGSRIVYVDAYRALVEILENPAKYGFTETSRGCCGTGLREVALFCNAFTPICKNVSSYVFYDAVHPTERVYMLVNDYIVNDVIPQF

SEQ ID NO: 6962 - protein, 219 aa, Zea mays subsp. mays
  peptide (1)..(219): Ceres Seq. ID no. 12408978
MSKQVDLFEDYLLRLRGIVGDKEASRIVARSLIFISSGTNDFSHYYRSPKKRKMEIGDYQDIVLQMVQVYVKELYDLGGRQFCLAGLPPFGCTPIQITLSGDPGRACVDEQNWDAHVYNSKLQRLLAKLQGSLHGSRIVYVDAYRALVEILENPAKYGFTETSRGCCGTGLREVALFCNAFTPICKNVSSYVFYDAVHPTERVYMLVNDYIVNDVIPQF

SEQ ID NO: 6963 - DNA, 1727 bp, Zea mays subsp. mays
  misc_feature (1)..(1727): Ceres Seq. ID no. 12349196
  misc_feature (1)..(1727): Ortholog of  Ceres SEQ ID NO 13596299 as cited in SEQ ID NO 68023
aacctaaacctcgtctcgcctccttcagtccatcccctcaaccccggcggccaaaagccggcacaccgaagcggcggccatggcggagctaaagcggctgtcagagagccgggacctgacgcggatcgagcgcatcggcgcgcactcccacatccgggggctagggctggactcctccatggaggcgcgcgacgcctcggagggcatggtcgggcagctgcccgcgcgccgcgccgcggggctcatactccagctcatccgccagggcaagatcgccggccgcgccgttctcctcgcgggccagcccggcaccggcaagaccgcgctcgccatgggcatcgccaagtcgctcggcgcggagacgcccttcgcctccgtcgcagcctcggagctcttctcgctcgacctctccaagacggaggcgctcacgcaggccttccgccgcgccatcggcgtgcgcatcaaggaggagacggaaatcatcgagggcgaggtcgtggagatcttgatcgaccgccctttgtcggcctctgccgctggcggcagctcggctgcccctacaggtgctactgcggctggtaagtcggggcggctcacgctgaagaccacggacatggaaacggtgtacgagctcgggggaaagatgattgaggctcttgggaaggagaaggtgcagagcggggatgtgattgcacttgacaaggcctccgggaaggtcaccaagcttggacgctccattgggaggtcgcgggattatgatgccgttggcccgcacaccaagtttgtcaagtgtcctgatggcgagctccagaagcgcaaggagatcgtgcactgtgttaccttacatgagattgatgtcattaatagcaggacacagggttttcttgcactgttcactggtgacaccggtgaaattcgtgcagaggttcgggaacagatcgacacaaaagtcgcagagtggagagaggaaggaaaagctgatattgtccctggtgttctgttcatcgatgaagttcacatgctagacattgagtgcttctccttcctcaaccgagcattggaaaatgacatggctccgatcctagtaatcgcaacaaacagagggatcacatccattcgtgggacaaactaccgctcgccacacgggatcccgccagacttccttgaccggttactgatcatcacgacgcagccctacacggaggatgagatcaggaagatcctggacatccggtgcgatgaggaggatgtggagatgtccgcggacgccaaggtcctgctcaccaaaatcggcgtggagacctcgctgcggtacgccatcaaccttatcacatctgccgcattagcctgccagaggcgcaaggggaaggtggttgacatggaggacattagccgggtgtaccagttgttcctggacgtgaagcggtcgacgcagtacctgatggagtaccagagccagtacatgttcaacgaagtgcccggggaagcagatggagaggacgcgatgcaatcctagatgaacttttcttcaccaggtgtctgtgttagtatgtactgcgtgtctgcgtcgtctatttctggtgcatcttgcttgtttagttgctgttatatcctgacaaggcgtggtgtgtgcgatgggctgcctgtaagctgatttaggtaactatatatgcaattcagatgtatcttagtaaaattcaccccagttggagtgagattgtttgttt

SEQ ID NO: 6964 - protein, 478 aa, Zea mays subsp. mays
  peptide (1)..(478): Ceres Seq. ID no. 12349197
MAELKRLSESRDLTRIERIGAHSHIRGLGLDSSMEARDASEGMVGQLPARRAAGLILQLIRQGKIAGRAVLLAGQPGTGKTALAMGIAKSLGAETPFASVAASELFSLDLSKTEALTQAFRRAIGVRIKEETEIIEGEVVEILIDRPLSASAAGGSSAAPTGATAAGKSGRLTLKTTDMETVYELGGKMIEALGKEKVQSGDVIALDKASGKVTKLGRSIGRSRDYDAVGPHTKFVKCPDGELQKRKEIVHCVTLHEIDVINSRTQGFLALFTGDTGEIRAEVREQIDTKVAEWREEGKADIVPGVLFIDEVHMLDIECFSFLNRALENDMAPILVIATNRGITSIRGTNYRSPHGIPPDFLDRLLIITTQPYTEDEIRKILDIRCDEEDVEMSADAKVLLTKIGVETSLRYAINLITSAALACQRRKGKVVDMEDISRVYQLFLDVKRSTQYLMEYQSQYMFNEVPGEADGEDAMQS

SEQ ID NO: 6965 - protein, 445 aa, Zea mays subsp. mays
  peptide (1)..(445): Ceres Seq. ID no. 12349198
MEARDASEGMVGQLPARRAAGLILQLIRQGKIAGRAVLLAGQPGTGKTALAMGIAKSLGAETPFASVAASELFSLDLSKTEALTQAFRRAIGVRIKEETEIIEGEVVEILIDRPLSASAAGGSSAAPTGATAAGKSGRLTLKTTDMETVYELGGKMIEALGKEKVQSGDVIALDKASGKVTKLGRSIGRSRDYDAVGPHTKFVKCPDGELQKRKEIVHCVTLHEIDVINSRTQGFLALFTGDTGEIRAEVREQIDTKVAEWREEGKADIVPGVLFIDEVHMLDIECFSFLNRALENDMAPILVIATNRGITSIRGTNYRSPHGIPPDFLDRLLIITTQPYTEDEIRKILDIRCDEEDVEMSADAKVLLTKIGVETSLRYAINLITSAALACQRRKGKVVDMEDISRVYQLFLDVKRSTQYLMEYQSQYMFNEVPGEADGEDAMQS

SEQ ID NO: 6966 - protein, 436 aa, Zea mays subsp. mays
  peptide (1)..(436): Ceres Seq. ID no. 12349199
MVGQLPARRAAGLILQLIRQGKIAGRAVLLAGQPGTGKTALAMGIAKSLGAETPFASVAASELFSLDLSKTEALTQAFRRAIGVRIKEETEIIEGEVVEILIDRPLSASAAGGSSAAPTGATAAGKSGRLTLKTTDMETVYELGGKMIEALGKEKVQSGDVIALDKASGKVTKLGRSIGRSRDYDAVGPHTKFVKCPDGELQKRKEIVHCVTLHEIDVINSRTQGFLALFTGDTGEIRAEVREQIDTKVAEWREEGKADIVPGVLFIDEVHMLDIECFSFLNRALENDMAPILVIATNRGITSIRGTNYRSPHGIPPDFLDRLLIITTQPYTEDEIRKILDIRCDEEDVEMSADAKVLLTKIGVETSLRYAINLITSAALACQRRKGKVVDMEDISRVYQLFLDVKRSTQYLMEYQSQYMFNEVPGEADGEDAMQS

SEQ ID NO: 6967 - DNA, 1743 bp, Zea mays subsp. mays
  misc_feature (1)..(1743): Ceres Seq. ID no. 12353879
  misc_feature (1)..(1743): Ortholog of  Ceres SEQ ID NO 13598368 as cited in SEQ ID NO 62140
aaacccacagagacagccagacaccaggcaactagtgtgtgctctctccagatctttctcgtagtttctcacacgacgacgacgagtccatgtccgccgcggtgatgacggcgccgccctgccacaggcagccgtcccctctcaaccccaactcgagggccacgcagtcgccgatcagcaacggcaagcccaacgcggtctccacgacaaggaggcacctcgccaacctcgaccgcctcctcgtcaagccgccaccgctcccgctcccgctcccgccgcagcccaggaaactgccagccgatgaggtaccaggcgacggggaggccacccccgacgaccgcagcggccacggcgggctcctcaacgcgctgaacctgtccacgtttctgcccttcacgcggaaggcagccgtggacgagatgtccccgagcagcctggcgtacatgcagcgcctcctcacgctctccccgcggctgtcgcccaagggctccatcgcgggcgagtggcggaggtaccacggcgaaggcaggtgggagggcctcctcgacccgctcgaccagaacctgcgccgcgagctcctccgctacggcgacttcgtgcaggccgcgtacacggcgttccactccatgccgtcggcggcggaggcagcctccagcggtcagcagcgcaccctcgtgctcccggaccgctcgtaccacccgacccgcagcctgttcgcctcgtcgtcgctgtccatcccgccgtgggcgcagcggcggtcggcgcccagctggctcacgcagcgcaccagcttcgtcggctacgtcgccgtctgtgaaaacgagcgggaggtccgtcgcatgggccgccgcgacatagccatcgtgctacgtggcaccgccacgtgccccgagtgggccgagaacctccgcgccggcctcgtgccgctcacggcggacgacgacgcgtccgcgcccaaggtggcgaaggggttcctgagcctatacaggacgccaggagaccatgcgcccagcctctcgaccgccatagtggaggaggtgaagcgtctcgtgcaggtgtacaggggggaggagctcagcatcacagtcgtgggccacagccttggcgcgtcgctggccctcctcgccgccgacgagctcagcccctgcctggctgctcaaacagacggcaccgcggaccaccagccgccgccgatcgcggtggtctccttcggaggccccaagaccggaaaccgcgcgttcgcagagcgtctgcagcgcgagcgcggtgtgaacgtcttgcgggtggtgaacgcgggcgacgtggtgacgcgcgtgccggcgccgatcgcgcgggaagggtatgtgcacgcgggtggcgctgagctgagactgcacaacagcgactcgccgtgcctgcgtcccgacgcgggtccagcgtgctgccacgacctggaggcgtacctacaccttctggatgggttcgccggctccgggcggccgttccgccccgacgcgagccgcagcgtggcgcggctgctgacataccagcggcccaacgtgaagcgtgcgtacgtggagcacgcgcggatgctcgggttcgagccggcctcaccgaacgccagcgccaatggcgccaccgccgacggccagtacggctacctggccagccctacatgactctactttgtagctacaaagcaagcaagcaaacatgcatgcatgcaaactccattcttaacaaaggatatggacgtgtttcttg

SEQ ID NO: 6968 - protein, 522 aa, Zea mays subsp. mays
  peptide (1)..(522): Ceres Seq. ID no. 12353880
MSAAVMTAPPCHRQPSPLNPNSRATQSPISNGKPNAVSTTRRHLANLDRLLVKPPPLPLPLPPQPRKLPADEVPGDGEATPDDRSGHGGLLNALNLSTFLPFTRKAAVDEMSPSSLAYMQRLLTLSPRLSPKGSIAGEWRRYHGEGRWEGLLDPLDQNLRRELLRYGDFVQAAYTAFHSMPSAAEAASSGQQRTLVLPDRSYHPTRSLFASSSLSIPPWAQRRSAPSWLTQRTSFVGYVAVCENEREVRRMGRRDIAIVLRGTATCPEWAENLRAGLVPLTADDDASAPKVAKGFLSLYRTPGDHAPSLSTAIVEEVKRLVQVYRGEELSITVVGHSLGASLALLAADELSPCLAAQTDGTADHQPPPIAVVSFGGPKTGNRAFAERLQRERGVNVLRVVNAGDVVTRVPAPIAREGYVHAGGAELRLHNSDSPCLRPDAGPACCHDLEAYLHLLDGFAGSGRPFRPDASRSVARLLTYQRPNVKRAYVEHARMLGFEPASPNASANGATADGQYGYLASPT

SEQ ID NO: 6969 - protein, 517 aa, Zea mays subsp. mays
  peptide (1)..(517): Ceres Seq. ID no. 12353881
MTAPPCHRQPSPLNPNSRATQSPISNGKPNAVSTTRRHLANLDRLLVKPPPLPLPLPPQPRKLPADEVPGDGEATPDDRSGHGGLLNALNLSTFLPFTRKAAVDEMSPSSLAYMQRLLTLSPRLSPKGSIAGEWRRYHGEGRWEGLLDPLDQNLRRELLRYGDFVQAAYTAFHSMPSAAEAASSGQQRTLVLPDRSYHPTRSLFASSSLSIPPWAQRRSAPSWLTQRTSFVGYVAVCENEREVRRMGRRDIAIVLRGTATCPEWAENLRAGLVPLTADDDASAPKVAKGFLSLYRTPGDHAPSLSTAIVEEVKRLVQVYRGEELSITVVGHSLGASLALLAADELSPCLAAQTDGTADHQPPPIAVVSFGGPKTGNRAFAERLQRERGVNVLRVVNAGDVVTRVPAPIAREGYVHAGGAELRLHNSDSPCLRPDAGPACCHDLEAYLHLLDGFAGSGRPFRPDASRSVARLLTYQRPNVKRAYVEHARMLGFEPASPNASANGATADGQYGYLASPT

SEQ ID NO: 6970 - protein, 412 aa, Zea mays subsp. mays
  peptide (1)..(412): Ceres Seq. ID no. 12353882
MSPSSLAYMQRLLTLSPRLSPKGSIAGEWRRYHGEGRWEGLLDPLDQNLRRELLRYGDFVQAAYTAFHSMPSAAEAASSGQQRTLVLPDRSYHPTRSLFASSSLSIPPWAQRRSAPSWLTQRTSFVGYVAVCENEREVRRMGRRDIAIVLRGTATCPEWAENLRAGLVPLTADDDASAPKVAKGFLSLYRTPGDHAPSLSTAIVEEVKRLVQVYRGEELSITVVGHSLGASLALLAADELSPCLAAQTDGTADHQPPPIAVVSFGGPKTGNRAFAERLQRERGVNVLRVVNAGDVVTRVPAPIAREGYVHAGGAELRLHNSDSPCLRPDAGPACCHDLEAYLHLLDGFAGSGRPFRPDASRSVARLLTYQRPNVKRAYVEHARMLGFEPASPNASANGATADGQYGYLASPT

SEQ ID NO: 6971 - DNA, 1353 bp, Zea mays subsp. mays
  misc_feature (1)..(1353): Ceres Seq. ID no. 12402491
  misc_feature (1)..(1353): Ortholog of  Ceres SEQ ID NO 13582619 as cited in SEQ ID NO 56520
  misc_feature (1)..(1353): Ortholog of  Ceres SEQ ID NO 14315846 as cited in SEQ ID NO 58094
  misc_feature (1)..(1353): Ortholog of  Ceres SEQ ID NO 14314632 as cited in SEQ ID NO 59923
  misc_feature (1)..(1353): Ortholog of  Ceres SEQ ID NO 13660872 as cited in SEQ ID NO 60830
  misc_feature (1)..(1353): Ortholog of  Ceres SEQ ID NO 15226831 as cited in SEQ ID NO 62916
  misc_feature (1)..(1353): Ortholog of  Ceres SEQ ID NO 12616221 as cited in SEQ ID NO 63291
acgctcatgactttgaagagtgtcccttggcttgggtccagccttcagacttcagaggcaaaccgccggccggcatgcagtagaggcaggctagctgcaagagagttcatctagctagctagctagtgtgtgtttagggtacctagctagctagcttcaacatatatatcttagttgcacacagagctcaaagaaaggaaccatcgatcgatcggcagggagcggggatggggctgagggagatcgagtccacattgccgccggggttcaggttctatcccagcgacgaggagctggtgtgccactacctctacaagaaggtggccaacgagcgcgccgcgcaggggacgctggtggaggtcgacctgcacgcgcgagagccatgggagcttccagacgcggccaagctgacggcgagcgagtggtacttcttcagcttccgggaccgcaagtacgccacggggtcgcgcaccaaccgcgccaccaagacggggtactggaaggccaccggcaaggaccgcgaggtgcgcagcccggccacccgcgccgtcgtcggcatgaggaagacgctcgtcttctaccagggccgcgcacccaacggcgtcaagtcctgctgggtcatgcacgagttccgcctcgactcgccgcatacgccaccaaaggaggactgggtgctctgcagggtgttccagaagcggaaagacagcgagcaagacaacggcggcggctcctcctcgccgacgacctttgccggcgcgtcgtcgcagggggtcgttctagatctgccggacgaccagcccagcatgacgatggccggcgcgtacgtagcagcggaccaccagccgggctcttccgccgccgtcgggttcgcactgccgccgcatgcgcaggacaacggcctcggcgatggcggcctggacgcgttgctgatgaacggagcgacgatgtggcagtacagctcagcatcggccctcgccgatcacttcccgccggaggaagtgaccgccgcgcccatgatggggctaggctccaggggaggaggaggtgacgggtgcagcttcttctacgacagcggcttcgacgacatggggttcccgcagggatggatgggctgaggaggcaaggcaccaactgcaacaacgccatgggatgatggattctgaaggaaacgattgaattgattccattagtggtagtattgtacagtaggtacgtagtgtgaggttaggttattggaaattattagagtgcacctccccaatccaaaacaacggaatgaaaagtagagcgcatgacgacaattgtatgtatccattcactcctactactatgcttgtacattaattaattagt

SEQ ID NO: 6972 - protein, 295 aa, Zea mays subsp. mays
  peptide (1)..(295): Ceres Seq. ID no. 12402492
MGLREIESTLPPGFRFYPSDEELVCHYLYKKVANERAAQGTLVEVDLHAREPWELPDAAKLTASEWYFFSFRDRKYATGSRTNRATKTGYWKATGKDREVRSPATRAVVGMRKTLVFYQGRAPNGVKSCWVMHEFRLDSPHTPPKEDWVLCRVFQKRKDSEQDNGGGSSSPTTFAGASSQGVVLDLPDDQPSMTMAGAYVAADHQPGSSAAVGFALPPHAQDNGLGDGGLDALLMNGATMWQYSSASALADHFPPEEVTAAPMMGLGSRGGGGDGCSFFYDSGFDDMGFPQGWMG

SEQ ID NO: 6973 - protein, 221 aa, Zea mays subsp. mays
  peptide (1)..(221): Ceres Seq. ID no. 12402493
MGASRRGQADGERVVLLQLPGPQVRHGVAHQPRHQDGVLEGHRQGPRGAQPGHPRRRRHEEDARLLPGPRTQRRQVLLGHARVPPRLAAYATKGGLGALQGVPEAERQRARQRRRLLLADDLCRRVVAGGRSRSAGRPAQHDDGRRVRSSGPPAGLFRRRRVRTAAACAGQRPRRWRPGRVADERSDDVAVQLSIGPRRSLPAGGSDRRAHDGARLQGRRR

SEQ ID NO: 6974 - protein, 185 aa, Zea mays subsp. mays
  peptide (1)..(185): Ceres Seq. ID no. 12402494
MRKTLVFYQGRAPNGVKSCWVMHEFRLDSPHTPPKEDWVLCRVFQKRKDSEQDNGGGSSSPTTFAGASSQGVVLDLPDDQPSMTMAGAYVAADHQPGSSAAVGFALPPHAQDNGLGDGGLDALLMNGATMWQYSSASALADHFPPEEVTAAPMMGLGSRGGGGDGCSFFYDSGFDDMGFPQGWMG

SEQ ID NO: 6975 - DNA, 906 bp, Zea mays subsp. mays
  misc_feature (1)..(906): Ceres Seq. ID no. 12401209
  misc_feature (1)..(906): Ortholog of  Ceres SEQ ID NO 13664013 as cited in SEQ ID NO 67686
aatgatattcagcttagtattcgtatgcccagtggaaatagactggagatcaaactaacaaaacaagatgttttaaggaaagtgaagaatttcgtggatgaaaaccaaggcaatgggcttggctcatatgacctttctctggtttatcctaaaagagttttctctgaacaagatatggaagcaacactatccgagctgggtattcaaaaccgtcatgcaatgattgttgttccacatcggcagtctggtcaggtatcaaggcgtcactcctcggcatcttatgatatgggtgtcaattcaggtgcggatgatgttggtggcaattcaggtgcggggggatactttggttacctgagaaccgtcctgtcttatgtgaatccactctcctacctgaggggaaataccaactcatcaaatacagagctacagtcaaatgaaggcctgcggcagcttagacatggatctggtccatggagtgagccacggcctcttggcaataggggccatgaagtgactgatgcagactctgcaaacacgctgcgaaggcggcctagaccatttggtgccaatatccacactctggggagcgaggatcatggtccgtctgatgaaagaaatgttttctggaacgggaactcgacagagtttggaggcgacgacagaaaataggttgtggcgtggctggcagggcctgggacgacactatcagacagaatcaaagttgggaatagacagctgaaacaaatgcctcgacaggcttattgaggaataagtattgagattatagtgctgaaataatcgctgaattgtgatgtttacatttgtggaaacatacggtcgctggatccgtatactcgttgtatagtacatagccacagatatattaaatccgaactgcttggttcc

SEQ ID NO: 6976 - protein, 222 aa, Zea mays subsp. mays
  peptide (1)..(222): Ceres Seq. ID no. 12401210
NDIQLSIRMPSGNRLEIKLTKQDVLRKVKNFVDENQGNGLGSYDLSLVYPKRVFSEQDMEATLSELGIQNRHAMIVVPHRQSGQVSRRHSSASYDMGVNSGADDVGGNSGAGGYFGYLRTVLSYVNPLSYLRGNTNSSNTELQSNEGLRQLRHGSGPWSEPRPLGNRGHEVTDADSANTLRRRPRPFGANIHTLGSEDHGPSDERNVFWNGNSTEFGGDDRK

SEQ ID NO: 6977 - protein, 214 aa, Zea mays subsp. mays
  peptide (1)..(214): Ceres Seq. ID no. 12401211
MPSGNRLEIKLTKQDVLRKVKNFVDENQGNGLGSYDLSLVYPKRVFSEQDMEATLSELGIQNRHAMIVVPHRQSGQVSRRHSSASYDMGVNSGADDVGGNSGAGGYFGYLRTVLSYVNPLSYLRGNTNSSNTELQSNEGLRQLRHGSGPWSEPRPLGNRGHEVTDADSANTLRRRPRPFGANIHTLGSEDHGPSDERNVFWNGNSTEFGGDDRK

SEQ ID NO: 6978 - protein, 164 aa, Zea mays subsp. mays
  peptide (1)..(164): Ceres Seq. ID no. 12401212
MEATLSELGIQNRHAMIVVPHRQSGQVSRRHSSASYDMGVNSGADDVGGNSGAGGYFGYLRTVLSYVNPLSYLRGNTNSSNTELQSNEGLRQLRHGSGPWSEPRPLGNRGHEVTDADSANTLRRRPRPFGANIHTLGSEDHGPSDERNVFWNGNSTEFGGDDRK

SEQ ID NO: 6979 - DNA, 1107 bp, Zea mays subsp. mays
  misc_feature (1)..(1107): Ceres Seq. ID no. 12412322
  misc_feature (1)..(1107): Ortholog of  Ceres SEQ ID NO 15178852 as cited in SEQ ID NO 0
accagaaagatagacacgcacgtccgccgtctctgctccggttttcgctgtctcgctgccgtcctaggtttggagccaggtcaccggcgctaggagggcgtgaaatcgagtcgacggtcggcacccggcactcacgcgttctccacctactgctggcgctcctgtgaggcgacgccggaccggccaccccgcatgcgaacagcgcacggaccggccaccggtgtgactcctccatccaaggcttcagctccagaccgagccgccccgccaatcgccgtccgccgaaccaggcctaggaatttgttttcctcatcgaaagttactgcattgtattccatagaaatggctatggggttgattaatgctaatcctataatccatgagaaaaaagaaagacgcatccgacaggcaccagagaccacagatgaaaatgcggcagagtccatagaccagctggaaatatttgatcacattagagatataaaggatccagagcacccatactcactggaacagctgaatgtggtaactgaagactcaattgaactcaatgatgaaagcaatcatgtcagggttattttcaccccaacagtggagcactgcagtatggcaactattattggcctttgcatacgggtgaaacttgtacggagtctccctccttattacaaggtggacataagggttgcccctggatcacacgcaactgaagctgctgtgaataagcaactgaatgacaaagaacgtgttgcggctgcattggaaaacccaaacctactggacatggttgaagagtgcttatcaccaacattcgattgaggtctcagttgttgcacatctgggagccatggtgtttcatgttcagaagccacacaagcttattgccataggaattcactcctgaatattatatctgagggccatggtgtttcatgtgcatgatttttttttttgtcctccgtccctttgagttaatacaattgttatctttttggacatttgttggtgcttgtgacctccctgggcaaagggacctgtaatcagatcttgtgtagtagctttcagagcgtttccagtgccacgccattttgtggctgttgtaccccc

SEQ ID NO: 6980 - protein, 208 aa, Zea mays subsp. mays
  peptide (1)..(208): Ceres Seq. ID no. 12412323
MRTAHGPATGVTPPSKASAPDRAAPPIAVRRTRPRNLFSSSKVTALYSIEMAMGLINANPIIHEKKERRIRQAPETTDENAAESIDQLEIFDHIRDIKDPEHPYSLEQLNVVTEDSIELNDESNHVRVIFTPTVEHCSMATIIGLCIRVKLVRSLPPYYKVDIRVAPGSHATEAAVNKQLNDKERVAAALENPNLLDMVEECLSPTFD

SEQ ID NO: 6981 - protein, 158 aa, Zea mays subsp. mays
  peptide (1)..(158): Ceres Seq. ID no. 12412324
MAMGLINANPIIHEKKERRIRQAPETTDENAAESIDQLEIFDHIRDIKDPEHPYSLEQLNVVTEDSIELNDESNHVRVIFTPTVEHCSMATIIGLCIRVKLVRSLPPYYKVDIRVAPGSHATEAAVNKQLNDKERVAAALENPNLLDMVEECLSPTFD

SEQ ID NO: 6982 - protein, 156 aa, Zea mays subsp. mays
  peptide (1)..(156): Ceres Seq. ID no. 12412325
MGLINANPIIHEKKERRIRQAPETTDENAAESIDQLEIFDHIRDIKDPEHPYSLEQLNVVTEDSIELNDESNHVRVIFTPTVEHCSMATIIGLCIRVKLVRSLPPYYKVDIRVAPGSHATEAAVNKQLNDKERVAAALENPNLLDMVEECLSPTFD

SEQ ID NO: 6983 - DNA, 1701 bp, Zea mays subsp. mays
  misc_feature (1)..(1701): Ceres Seq. ID no. 12412318
  misc_feature (1)..(1701): Ortholog of  Ceres SEQ ID NO 13594317 as cited in SEQ ID NO 57796
ctctctcgtgattctcccgtgccccggtctctgtctctagtggcgacgactgcgctgcgccgccgccctacccaggtgcccaagtgtctatcttcgggactgcgccggcgacgagcacccaccagagattgttggacctgggtctgcccctggattcgagcttggggccaagctaattcgagctctgagcatttgatttctagcatcttacatgcaaaaggctagtacttggaatccgagcaagatctaacccagacagtgcagtggcaggtcttttcagttcagcgcagcatatcaagattgtctctgttaatttgtgtatgagatcagttaactgataaggatatgtaaagaaccaatggtcagtaatttttacactccagattgtagtatcctctaagatggacggaagagaatcagtcttatggtaaatcctggtgaatattcatgggaggtcagcaagttctggcctgactaagtctggtaaaaaaagttgcttcatctcagatcatcaatgattcctggtggatgggcagcacagagaataggaggcagacgtgttctgctactgtcgtttgtattgtggtctatgatatgtggtttaatcccactcgaccccaacagatgggtgccaccgcaggagcgctctcgctcggtatctctcactacctcggggatgtatcttggtgcagctggtggcatgcttttcttcccaagtctggtgaagcacacgggaccccagtcagttttctttgtcgaagcagtgctgggagtagcatggtctgtcatatggttgaaattttccagcgacccacctcgtaccgatcttccaaaggtatcgatgccgaaagtggcatctcgggacatgattaaggcacaagcaggaggggttgttgcacctcgcacagtaaagatcccgtggcgaaggataatattcagtctacctgtttgggcaatcgttgtaaacaacttcaccttccactatgccctgtatgttcttatgaactggctccctacctattttgagcttggcctcaagcttagcctccaggacatgggttcctcaaagatgctcccttatttcaacatgttcattttctccaacatcggtggtgtgatcgccgatcacttgattacaaggaggattctgtctgttaccaagacgaggaagcttctgaacaccatcggattcatcatctcagcatttgcactcatggcccttcctttattcagcacaccctcaggcactgtaacgtgttcggcgatatccctcggttttcttgccctgggaagagcagggtttgccgtaaaccacatggatgttgctccgaagtttgcagggatagtgatgggcgtctctaacacggcggggacactggctgggattgttggtgtcggcctcactggtaatatcctggaggcggcgaaggcttctaacaaggatctaacggactcggaaacctggaaaacagtcttctttgttccggcatacctttgtatcttcagctctgtcatttttttaatcttttcgactggcgaaaagatattcgagtagaggatgattatatttttttgtttctcatttacagtgaggcaggatagcagaacgggaatctcacatgtacccgtagcatttttacaaaatttcatactgtatcatacacatgatctaaagctatgtcaggaaatctcacatttttc

SEQ ID NO: 6984 - protein, 346 aa, Zea mays subsp. mays
  peptide (1)..(346): Ceres Seq. ID no. 12412319
MIPGGWAAQRIGGRRVLLLSFVLWSMICGLIPLDPNRWVPPQERSRSVSLTTSGMYLGAAGGMLFFPSLVKHTGPQSVFFVEAVLGVAWSVIWLKFSSDPPRTDLPKVSMPKVASRDMIKAQAGGVVAPRTVKIPWRRIIFSLPVWAIVVNNFTFHYALYVLMNWLPTYFELGLKLSLQDMGSSKMLPYFNMFIFSNIGGVIADHLITRRILSVTKTRKLLNTIGFIISAFALMALPLFSTPSGTVTCSAISLGFLALGRAGFAVNHMDVAPKFAGIVMGVSNTAGTLAGIVGVGLTGNILEAAKASNKDLTDSETWKTVFFVPAYLCIFSSVIFLIFSTGEKIFE

SEQ ID NO: 6985 - protein, 321 aa, Zea mays subsp. mays
  peptide (1)..(321): Ceres Seq. ID no. 12412320
MICGLIPLDPNRWVPPQERSRSVSLTTSGMYLGAAGGMLFFPSLVKHTGPQSVFFVEAVLGVAWSVIWLKFSSDPPRTDLPKVSMPKVASRDMIKAQAGGVVAPRTVKIPWRRIIFSLPVWAIVVNNFTFHYALYVLMNWLPTYFELGLKLSLQDMGSSKMLPYFNMFIFSNIGGVIADHLITRRILSVTKTRKLLNTIGFIISAFALMALPLFSTPSGTVTCSAISLGFLALGRAGFAVNHMDVAPKFAGIVMGVSNTAGTLAGIVGVGLTGNILEAAKASNKDLTDSETWKTVFFVPAYLCIFSSVIFLIFSTGEKIFE

SEQ ID NO: 6986 - protein, 292 aa, Zea mays subsp. mays
  peptide (1)..(292): Ceres Seq. ID no. 12412321
MYLGAAGGMLFFPSLVKHTGPQSVFFVEAVLGVAWSVIWLKFSSDPPRTDLPKVSMPKVASRDMIKAQAGGVVAPRTVKIPWRRIIFSLPVWAIVVNNFTFHYALYVLMNWLPTYFELGLKLSLQDMGSSKMLPYFNMFIFSNIGGVIADHLITRRILSVTKTRKLLNTIGFIISAFALMALPLFSTPSGTVTCSAISLGFLALGRAGFAVNHMDVAPKFAGIVMGVSNTAGTLAGIVGVGLTGNILEAAKASNKDLTDSETWKTVFFVPAYLCIFSSVIFLIFSTGEKIFE

SEQ ID NO: 6987 - DNA, 1248 bp, Zea mays subsp. mays
  misc_feature (1)..(1248): Ceres Seq. ID no. 12412314
  misc_feature (1)..(1248): Ortholog of  Ceres SEQ ID NO 13597831 as cited in SEQ ID NO 64617
ctccatccccaatctcgggccttgactccttgagcacagcacaccgagtccaagccccgaagcctcctgaccttggttactgggtagcttctgcttggtactccatgcgaggacgacaatggcgatcgccgccgtccccgcctccctccccttcgtcctcctccctccgaggctgttccgcgggagggcggtgaggtggccgcgcccgattagggcttcggcgtcgaccaacgccgggtgacgttgcaggcggagagcggaagtttggggctctggtgagcagggtgggagatctgagggcgctcgtagcctccgtgcctcctgctgttgcttcgatgcagaaaaacattggcccaaattttgttgctggtttctgtgttagcatggcatttgtggctgctgctgcaagacagatctccttaagaagtcgagagcatgttagtaaaggttctgttgctgatcttgtaaggcgtggccagttaaaatcagggcaacgagggattgcaaagctccgtacatacgatgatcctttcaataacccgttagtaaagattgatgagggtacatctactgcacaaatgtttggcaaggagtaccgtttggctcctgttaggcttacgaaagagcagcaagaaatgcaccagaacaggagatcgcgtgcatatcagtggaaaaggccaaccgtgtttctcagggaaggtgattccttacctccagatgttgatccggatacagttagatggattccagcaaaccatcccttttctgctgcttcaagtgaagtggatgaggagaccgccaaacaaaatgtctaccaaaaggatggcatcccatcccgtgtcaaggctgagcatgaagctttgcgggcaaggctagaggcctcaaacgatgttgccagactcccttcggatccaaggagtattcagcgtaatgagagaccaatgagattgtcaggcgagccatctgaacatcttcagagctccaagtttgagaaccaagatagacaactggctactgagtctggtaaacatagctctgatggatgtttacaatcaaacgagccggaagggcaataaaaacgtgtgtatttcagctcttcgaagatatttgctttgttacgtagtgttatcagcttttaggttgtagctgtagatagagaagttttggaacagtgagcttatacggcttactggtttacatagtgagcagttaatatgcgagttgcttgacgtgttgggatcgaatggt

SEQ ID NO: 6988 - protein, 246 aa, Zea mays subsp. mays
  peptide (1)..(246): Ceres Seq. ID no. 12412315
MQKNIGPNFVAGFCVSMAFVAAAARQISLRSREHVSKGSVADLVRRGQLKSGQRGIAKLRTYDDPFNNPLVKIDEGTSTAQMFGKEYRLAPVRLTKEQQEMHQNRRSRAYQWKRPTVFLREGDSLPPDVDPDTVRWIPANHPFSAASSEVDEETAKQNVYQKDGIPSRVKAEHEALRARLEASNDVARLPSDPRSIQRNERPMRLSGEPSEHLQSSKFENQDRQLATESGKHSSDGCLQSNEPEGQ

SEQ ID NO: 6989 - protein, 230 aa, Zea mays subsp. mays
  peptide (1)..(230): Ceres Seq. ID no. 12412316
MAFVAAAARQISLRSREHVSKGSVADLVRRGQLKSGQRGIAKLRTYDDPFNNPLVKIDEGTSTAQMFGKEYRLAPVRLTKEQQEMHQNRRSRAYQWKRPTVFLREGDSLPPDVDPDTVRWIPANHPFSAASSEVDEETAKQNVYQKDGIPSRVKAEHEALRARLEASNDVARLPSDPRSIQRNERPMRLSGEPSEHLQSSKFENQDRQLATESGKHSSDGCLQSNEPEGQ

SEQ ID NO: 6990 - protein, 165 aa, Zea mays subsp. mays
  peptide (1)..(165): Ceres Seq. ID no. 12412317
MFGKEYRLAPVRLTKEQQEMHQNRRSRAYQWKRPTVFLREGDSLPPDVDPDTVRWIPANHPFSAASSEVDEETAKQNVYQKDGIPSRVKAEHEALRARLEASNDVARLPSDPRSIQRNERPMRLSGEPSEHLQSSKFENQDRQLATESGKHSSDGCLQSNEPEGQ

SEQ ID NO: 6991 - DNA, 1069 bp, Zea mays subsp. mays
  misc_feature (1)..(1069): Ceres Seq. ID no. 12408967
  misc_feature (1)..(1069): Ortholog of  Ceres SEQ ID NO 14308679 as cited in SEQ ID NO 58616
  misc_feature (1)..(1069): Ortholog of  Ceres SEQ ID NO 13596492 as cited in SEQ ID NO 68623
tccaagacccgcacgcgaacgccctccctgccgctccgccgtttcgcgtgggagtcgtttcgaaaaagtctgtttcgcgagcggtgaggactgaggagtgtggaggcctaaaaccatggcggcgagcatcgggatcatggacggcgcctacttcgtcggcaggggcgagatcctgcactggatcaatgcgaccctccagctctccctcgccaaggtcgaggaggcagcgtctggcgcagtgcagtgccagctcatggatatggttcaccctggagtgggtgcccatgcataaggtcaatttcgatgcgaagacagaatatgacatgatccagaactacaaggttcttcaggacgtgttcaacaagctgcggataggcaagaatattgaggtcaacaagcttgttaaaggacggccattggacaacttggagttccttcagtggttgaaaagatattgtgattctgtgaatggtggaattatgaacgaaaattacaaccctgtagaaaggaggtcaaagggatgcaaagaacgtgtctcaaagggttccaataagccatctaaatcattgcaagccaataggctttctggtgctgatccaacagatggaggccatggagttgggaaagtatgtaacactttttctgaagagcattacatagaacagattcagaagttgtctgaaaagattgcagacctgaaagtttctgtcgatagtactgaaaaagaaagagacttctacttctcgaagttgcgtgatattgagatactgtgtcaacggcctgagttagagcatctaccgatgactaaggcggtccggaagatactttatgcagctgatgcaaaggattcaccgctacctgaggcgaatgatataatcacaaagtcaccaagcttgttctcaaatgaaaccgagtgagatgtgcggctacatgagctaattttccatgattgatcgtcttagttctgagtctgtaaatgcgtaaaataacatttgacacaagtctttttgctgtcaaaaacagttttcctgtaagaacttgagtggggttaagtagttattacgcattc

SEQ ID NO: 6992 - protein, 304 aa, Zea mays subsp. mays
  peptide (1)..(304): Ceres Seq. ID no. 12408968
QDPHANALPAAPPFRVGVVSKKSVSRAVRTEECGGLKPWRRASGSWTAPTSSAGARSCTGSMRPSSSPSPRSRRQRLAQCSASSWIWFTLEWVPMHKVNFDAKTEYDMIQNYKVLQDVFNKLRIGKNIEVNKLVKGRPLDNLEFLQWLKRYCDSVNGGIMNENYNPVERRSKGCKERVSKGSNKPSKSLQANRLSGADPTDGGHGVGKVCNTFSEEHYIEQIQKLSEKIADLKVSVDSTEKERDFYFSKLRDIEILCQRPELEHLPMTKAVRKILYAADAKDSPLPEANDIITKSPSLFSNETE

SEQ ID NO: 6993 - protein, 243 aa, Zea mays subsp. mays
  peptide (1)..(243): Ceres Seq. ID no. 12408969
MRPSSSPSPRSRRQRLAQCSASSWIWFTLEWVPMHKVNFDAKTEYDMIQNYKVLQDVFNKLRIGKNIEVNKLVKGRPLDNLEFLQWLKRYCDSVNGGIMNENYNPVERRSKGCKERVSKGSNKPSKSLQANRLSGADPTDGGHGVGKVCNTFSEEHYIEQIQKLSEKIADLKVSVDSTEKERDFYFSKLRDIEILCQRPELEHLPMTKAVRKILYAADAKDSPLPEANDIITKSPSLFSNETE

SEQ ID NO: 6994 - protein, 210 aa, Zea mays subsp. mays
  peptide (1)..(210): Ceres Seq. ID no. 12408970
MHKVNFDAKTEYDMIQNYKVLQDVFNKLRIGKNIEVNKLVKGRPLDNLEFLQWLKRYCDSVNGGIMNENYNPVERRSKGCKERVSKGSNKPSKSLQANRLSGADPTDGGHGVGKVCNTFSEEHYIEQIQKLSEKIADLKVSVDSTEKERDFYFSKLRDIEILCQRPELEHLPMTKAVRKILYAADAKDSPLPEANDIITKSPSLFSNETE

SEQ ID NO: 6995 - DNA, 1233 bp, Zea mays subsp. mays; identical to SEQ ID NO: 2545
  misc_feature (1)..(1233): Ceres Seq. ID no. 13564187
  misc_feature (1)..(1233): Ortholog of  Ceres SEQ ID NO 15172729 as cited in SEQ ID NO 56037
  misc_feature (1)..(1233): Ortholog of  Ceres SEQ ID NO 13584899 as cited in SEQ ID NO 64830
  misc_feature (1)..(1233): Ortholog of  Ceres SEQ ID NO 13654441 as cited in SEQ ID NO 67814
  misc_feature (1)..(1233): Ortholog of  Ceres SEQ ID NO 13596128 as cited in SEQ ID NO 67831
  misc_feature (1)..(1233): Ortholog of  Ceres SEQ ID NO 12585194 as cited in SEQ ID NO 68878
  misc_feature (1)..(1233): Ortholog of  Ceres SEQ ID NO 12589186 as cited in SEQ ID NO 0

SEQ ID NO: 6996 - protein, 267 aa, Zea mays subsp. mays; identical to SEQ ID NO: 2546
  peptide (1)..(267): Ceres Seq. ID no. 13564188

SEQ ID NO: 6997 - protein, 251 aa, Zea mays subsp. mays; identical to SEQ ID NO: 2547
  peptide (1)..(251): Ceres Seq. ID no. 13564189

SEQ ID NO: 6998 - DNA, 1356 bp, Zea mays subsp. mays
  misc_feature (1)..(1356): Ceres Seq. ID no. 12344215
  misc_feature (1)..(1356): Ortholog of  Ceres SEQ ID NO 13581947 as cited in SEQ ID NO 51812
ctcagctcggtggaggccctcaagtccgacgcgctccgttcccctttccctttccgaagcttctcgaccccccatcccctccctgacatggccgacaacgcgaaggccgcggcggcgcatgcgaggccggagtcgtcgcaggaggaggaggaggactggaaggaggccgagggggacgtcgccgaagtcgaccgcgccgctaccaatggcgccggcgaggggggcgtgcccacagacaggccgatccgggtctacgccgacggcatctacgacctcttccacttcggccacgccaagtcgctggagcaggccaagaagtcgtttccaaacacatatcttcttgttggatgctgcaatgatgagttgacacataaattcaaaggaagaactgttatgactgaggatgagcgatatgagtcacttcgtcattgcaagtgggttgatgaagtcattccagatgctccatgggtggtgacagaagagttcttggataagcataacattgattttgttgctcatgattctctgccgtatgctgatgctagtggagctggtaacgatgtttatgaacatgtaaaaaagcttggtaagtttaaggagactcagcgcactgatgggatatcaacatcggacattataatgcggattgttaaagattataatgagtatgttatgcggaatctggccaggggctacactagaaaggatcttggtgttagttatgtcaaggaaaaacgactgcgagtgaacatgggacttaaaaacctgcgtgacagagtgaaacagcaccaagaaaaagtaggggagaagtggagcacggttgcaaaactccaggaagagtgggtggaaaatgcagaccgctgggtggctggtttcttagagaagtttgaggaagggtgccactcaatggggacagccatcaaggagaggatccaggagaggctcatcaaggcacaatccagcgactttggcagcctcctacagtacgacagctacgattctgatgaagccaaagaaaacgacgaggacgaagacgaagatgaactctttgaagacgtcaaggaatagcacctccgtacatatacaatggttttgtagctgcaaattgtgttgtgagtcagttgcctctctctggttggtgatctttatatatggtctcaaaggtaggtcaggttgcaatgtttgtagctgctcttggtgtttgttcaggcaacgcatggttgtaaaagctgtggaaagactcttgtgcagtcaaggatacagattccgatggttacctttgggttagaacatatacggctgtaaaattggaagtcgaggtggttaaaactctgatatcttgtctgttttctttcc

SEQ ID NO: 6999 - protein, 355 aa, Zea mays subsp. mays
  peptide (1)..(355): Ceres Seq. ID no. 12344216
LSSVEALKSDALRSPFPFRSFSTPHPLPDMADNAKAAAAHARPESSQEEEEDWKEAEGDVAEVDRAATNGAGEGGVPTDRPIRVYADGIYDLFHFGHAKSLEQAKKSFPNTYLLVGCCNDELTHKFKGRTVMTEDERYESLRHCKWVDEVIPDAPWVVTEEFLDKHNIDFVAHDSLPYADASGAGNDVYEHVKKLGKFKETQRTDGISTSDIIMRIVKDYNEYVMRNLARGYTRKDLGVSYVKEKRLRVNMGLKNLRDRVKQHQEKVGEKWSTVAKLQEEWVENADRWVAGFLEKFEEGCHSMGTAIKERIQERLIKAQSSDFGSLLQYDSYDSDEAKENDEDEDEDELFEDVKE

SEQ ID NO: 7000 - protein, 326 aa, Zea mays subsp. mays
  peptide (1)..(326): Ceres Seq. ID no. 12344217
MADNAKAAAAHARPESSQEEEEDWKEAEGDVAEVDRAATNGAGEGGVPTDRPIRVYADGIYDLFHFGHAKSLEQAKKSFPNTYLLVGCCNDELTHKFKGRTVMTEDERYESLRHCKWVDEVIPDAPWVVTEEFLDKHNIDFVAHDSLPYADASGAGNDVYEHVKKLGKFKETQRTDGISTSDIIMRIVKDYNEYVMRNLARGYTRKDLGVSYVKEKRLRVNMGLKNLRDRVKQHQEKVGEKWSTVAKLQEEWVENADRWVAGFLEKFEEGCHSMGTAIKERIQERLIKAQSSDFGSLLQYDSYDSDEAKENDEDEDEDELFEDVKE

SEQ ID NO: 7001 - protein, 224 aa, Zea mays subsp. mays
  peptide (1)..(224): Ceres Seq. ID no. 12344218
MTEDERYESLRHCKWVDEVIPDAPWVVTEEFLDKHNIDFVAHDSLPYADASGAGNDVYEHVKKLGKFKETQRTDGISTSDIIMRIVKDYNEYVMRNLARGYTRKDLGVSYVKEKRLRVNMGLKNLRDRVKQHQEKVGEKWSTVAKLQEEWVENADRWVAGFLEKFEEGCHSMGTAIKERIQERLIKAQSSDFGSLLQYDSYDSDEAKENDEDEDEDELFEDVKE

SEQ ID NO: 7002 - DNA, 1596 bp, Zea mays subsp. mays
  misc_feature (1)..(1596): Ceres Seq. ID no. 12405494
  misc_feature (1)..(1596): Ortholog of  Ceres SEQ ID NO 15178228 as cited in SEQ ID NO 58330
  misc_feature (1)..(1596): Ortholog of  Ceres SEQ ID NO 13596635 as cited in SEQ ID NO 62488
gaccgtgctggaaacttctaaccaaaacccctaatgtctcgaggtggcgcaccccaacaaactggctccgcctccttcctcctcccctccggcctccgccgctgccttcttttccccgtgcgcatagtcgctcgcagaggcgccgacatcacttcgtccggaccggaaacacgcacgaagtgaggaccagcaccaaacaccgcgccgcttctcctatatttgttcctctcccggagccgcatcgtgtgtaagcgtgtggcggatccatggcagcggcggcggatacctcggaggcgtccgcggcaggaatcgcgctcgcagaggccaatatcaactgggagaggttggacaagacgaggtttcatgtgattggagctatcctgttcacggcccagcaaggtgctctgcacccaacagctgttgtgaagactaggatgcaggttgctgaaggtgggcttgcacatatgtctgggtttgctgtttttaggaggatattgagaagcgatggcatccctggcattttcagaggatttggcaccgctgctgttggagctctgcctgggcgagtgctagctctaacatcactggagatctctaaagaaatgacatttaagtattgtgaacattttgatctgtcagaggcgtcacaaattgctatagcaaatggcattgcaggtctaatgtcgagtatctgttcatgctcatactttgtgcctctagatgtgatttgccaaaggctcatggttcaaggattgccagggatggcaacatacaggggcccattcgatgtgataaataaggttgtcagaacagaagggatccgggggctttatcgaggttttggtatcactatgttgactcagtcgccagcttcagccctttggtggagtgcatatggtggtgctcaacatgctatttggaggagtttgggttatggaaatgactcacaaacaaaaccatctcaatcagaacttgttgttgtccaagtaacagcaggaacaattgctggtgcttgctcgtcgattatcaccactccagtagataccatcaagactcggcttcaggttatggacaactatggtaaaggcaggccttcagtcatgaaaactaccaggctgctgcttgatgaagatggctggaggggattctatagaggttttggaccgaggtttcttaacatgtctgtctggggcacatcaatgatcgtgacatatgagctcataaaaaggctatccgtgaagtctgaatgacacattttggtggattctcaactaaggtgatttactgttcaaaatcatctatacagatataggcaatcaagtcagtttgcctcgcgaagagtataggcgagtattatgatcgggtgggatgcagaattatggtttagttgcataggataacatgcttctgtatgacacttgcgatgtatatatttttgctaaagagccctcctttcaggatgtttgtagccagcttcttttggatgtaacagatggaggccaagacgcctgttctgtctaatgaggcacattatatgtagctgtactattcgtggtccaacaaaattttggcaaagaactctgcatccttttcgtt

SEQ ID NO: 7003 - protein, 327 aa, Zea mays subsp. mays
  peptide (1)..(327): Ceres Seq. ID no. 12405495
MAAAADTSEASAAGIALAEANINWERLDKTRFHVIGAILFTAQQGALHPTAVVKTRMQVAEGGLAHMSGFAVFRRILRSDGIPGIFRGFGTAAVGALPGRVLALTSLEISKEMTFKYCEHFDLSEASQIAIANGIAGLMSSICSCSYFVPLDVICQRLMVQGLPGMATYRGPFDVINKVVRTEGIRGLYRGFGITMLTQSPASALWWSAYGGAQHAIWRSLGYGNDSQTKPSQSELVVVQVTAGTIAGACSSIITTPVDTIKTRLQVMDNYGKGRPSVMKTTRLLLDEDGWRGFYRGFGPRFLNMSVWGTSMIVTYELIKRLSVKSE

SEQ ID NO: 7004 - protein, 271 aa, Zea mays subsp. mays
  peptide (1)..(271): Ceres Seq. ID no. 12405496
MQVAEGGLAHMSGFAVFRRILRSDGIPGIFRGFGTAAVGALPGRVLALTSLEISKEMTFKYCEHFDLSEASQIAIANGIAGLMSSICSCSYFVPLDVICQRLMVQGLPGMATYRGPFDVINKVVRTEGIRGLYRGFGITMLTQSPASALWWSAYGGAQHAIWRSLGYGNDSQTKPSQSELVVVQVTAGTIAGACSSIITTPVDTIKTRLQVMDNYGKGRPSVMKTTRLLLDEDGWRGFYRGFGPRFLNMSVWGTSMIVTYELIKRLSVKSE

SEQ ID NO: 7005 - protein, 261 aa, Zea mays subsp. mays
  peptide (1)..(261): Ceres Seq. ID no. 12405497
MSGFAVFRRILRSDGIPGIFRGFGTAAVGALPGRVLALTSLEISKEMTFKYCEHFDLSEASQIAIANGIAGLMSSICSCSYFVPLDVICQRLMVQGLPGMATYRGPFDVINKVVRTEGIRGLYRGFGITMLTQSPASALWWSAYGGAQHAIWRSLGYGNDSQTKPSQSELVVVQVTAGTIAGACSSIITTPVDTIKTRLQVMDNYGKGRPSVMKTTRLLLDEDGWRGFYRGFGPRFLNMSVWGTSMIVTYELIKRLSVKSE

SEQ ID NO: 7006 - DNA, 1430 bp, Zea mays subsp. mays
  misc_feature (1)..(1430): Ceres Seq. ID no. 12405490
  misc_feature (1)..(1430): Ortholog of  Ceres SEQ ID NO 14311044 as cited in SEQ ID NO 53643
gatatttttttggttggatctagcgtgacggcaaagacggtgtatcgaagggtcgacaatggttacgacgatcggtagtccatagcagcggcgggcgcaacttcgacccggttttcttcccatatatctgtcaaatccttctccggttaccctccatcggcagcaatttccgccatagataccggcgatcgagggcctcggacaacccaatcgacggagcagcgcggcggcaggagagggcaaacccttttcttctcagtactctacttgtctgcgcctggatcccctccgcaggaagataagacatgggtcaagcactcggcttgattcaagtggatcaatcgacagtagccatcaaggaaacttttgggaagtttgacgaggtcctagagcctggatgccacttcttgccatggtgcatagggaagcaaattgctgggtatctgtcactgcgtgtgcagcagcttgatgtccgctgcgaaacaaagacaaaggataatgtcttcgtcaatgttgtggcatctgtgcaatatcgtgcccttgccgataaggcatctgatgcattttacaggcttagtaacaccagggagcaaatccagtcatatgtttttgatgtcatcagggcaagtgttccgaagatgaacttggatgatgcctttgagcagaagaatgaaatcgccaaagctgtagaaaatgaacttgaaaaggcaatgtctatgtatggatacgagattgtgcagactctgattgttgatattgagcctgatgagcatgtgaagagagctatgaatgagatcaatgcagctgctaggctgaggttggctgccagcgagaaagctgaggcagagaagatactgcagatcaagagagccgaaggtgatgcagaatccaagtacttggcgggtctgggtatcgcaagacagcgccaggctatagtggatgggctcagagacagtgttcttgctttctctgagaatgtgcctgggacctctgcaaaggatgtcatggacatggttctggttacccagtacttcgacaccatggaggagattggggccccgtccaagtccccgtcggttttcaccccccatggaccaggtgctgtcagagacatcgcagcgcagataagggatggtcagccccaggccagtctgctgtgagcacgttggaaaaggcatgcttttgacattcccatcagtaaagaagtacatatacatcatgaggagtaaaaaaaaacttactagcgataatgtgagtacagcttgttcgttctatctatatggtgcatgtgattattattatggagattaatgttaaataggttcgcatgtattgtgccagaacaaggctaaggaccagtttccgtaaaaaaatgtatgttcggaacttatctaagttttggagcctgaggaaacccctccatcctgtgc

SEQ ID NO: 7007 - protein, 284 aa, Zea mays subsp. mays
  peptide (1)..(284): Ceres Seq. ID no. 12405491
MGQALGLIQVDQSTVAIKETFGKFDEVLEPGCHFLPWCIGKQIAGYLSLRVQQLDVRCETKTKDNVFVNVVASVQYRALADKASDAFYRLSNTREQIQSYVFDVIRASVPKMNLDDAFEQKNEIAKAVENELEKAMSMYGYEIVQTLIVDIEPDEHVKRAMNEINAAARLRLAASEKAEAEKILQIKRAEGDAESKYLAGLGIARQRQAIVDGLRDSVLAFSENVPGTSAKDVMDMVLVTQYFDTMEEIGAPSKSPSVFTPHGPGAVRDIAAQIRDGQPQASLL

SEQ ID NO: 7008 - protein, 173 aa, Zea mays subsp. mays
  peptide (1)..(173): Ceres Seq. ID no. 12405492
MNLDDAFEQKNEIAKAVENELEKAMSMYGYEIVQTLIVDIEPDEHVKRAMNEINAAARLRLAASEKAEAEKILQIKRAEGDAESKYLAGLGIARQRQAIVDGLRDSVLAFSENVPGTSAKDVMDMVLVTQYFDTMEEIGAPSKSPSVFTPHGPGAVRDIAAQIRDGQPQASLL

SEQ ID NO: 7009 - protein, 149 aa, Zea mays subsp. mays
  peptide (1)..(149): Ceres Seq. ID no. 12405493
MSMYGYEIVQTLIVDIEPDEHVKRAMNEINAAARLRLAASEKAEAEKILQIKRAEGDAESKYLAGLGIARQRQAIVDGLRDSVLAFSENVPGTSAKDVMDMVLVTQYFDTMEEIGAPSKSPSVFTPHGPGAVRDIAAQIRDGQPQASLL

SEQ ID NO: 7010 - DNA, 1959 bp, Zea mays subsp. mays; identical to SEQ ID NO: 1843
  misc_feature (1)..(1959): Ceres Seq. ID no. 12373566
  misc_feature (1)..(1959): Ortholog of  Ceres SEQ ID NO 14315862 as cited in SEQ ID NO 60207
  misc_feature (1)..(1959): Ortholog of  Ceres SEQ ID NO 13660129 as cited in SEQ ID NO 67547

SEQ ID NO: 7011 - protein, 466 aa, Zea mays subsp. mays; identical to SEQ ID NO: 1844
  peptide (1)..(466): Ceres Seq. ID no. 12373567

SEQ ID NO: 7012 - protein, 383 aa, Zea mays subsp. mays; identical to SEQ ID NO: 1845
  peptide (1)..(383): Ceres Seq. ID no. 12373568

SEQ ID NO: 7013 - protein, 347 aa, Zea mays subsp. mays; identical to SEQ ID NO: 1846
  peptide (1)..(347): Ceres Seq. ID no. 12373569

SEQ ID NO: 7014 - DNA, 1442 bp, Zea mays subsp. mays
  misc_feature (1)..(1442): Ceres Seq. ID no. 12408959
  misc_feature (1)..(1442): Ortholog of  Ceres SEQ ID NO 13598741 as cited in SEQ ID NO 62749
  misc_feature (1)..(1442): Ortholog of  Ceres SEQ ID NO 12587535 as cited in SEQ ID NO 64020
  misc_feature (1)..(1442): Ortholog of  Ceres SEQ ID NO 15176854 as cited in SEQ ID NO 64525
  misc_feature (1)..(1442): Ortholog of  Ceres SEQ ID NO 12586366 as cited in SEQ ID NO 68983
  misc_feature (1)..(1442): Ortholog of  Ceres SEQ ID NO 15178891 as cited in SEQ ID NO 0
acgaactcagcgtgctcataggttcctgacgtacgtatctcagttgcgttcgagcgttgtggacttgtggtggtttccttcctgcgccggagaaggtagacgatgggaaggggaagcgaacagtgccggacgcccgtcgagctgcgctgctcttgatcgtctgcttggcggctcgagcggcttctgcaatccaggatggcctgttgccgaacggcaactntcgaggaggcgccgcccaagtcgcagctcaacggcacgagggtgatggggcgcaacgcgataccgcactgggagatctccgggtacgtggagtacatcgggtcgggccagaagcagggcgacatgctgctgccggtgccggagggcgcctacgccgtgcggctggggaacgaggcatccatccagcagcgcctcgccgtgacgccgggcgcgcgctactccatcaccttcagcgcggcgcggacctgcgcccaggccgagcagctcaacgtgacggtcgcccccgagtcggacgtactcccgatccagacggtctacaccagcagcggctgggactcctactcctgggccttccaggccgcgggcagcgtcgtgaccctgatcgtccacaaccccggcgtcgccgaggacgcagcctgcggccccctcatcgatctgtttgccattaagaccatgccgactcctcggagcagcaagaataatatgctgaagaacggggacttcgaggacggcccgtacatcttccccaacacgcagtggggggtgctggtgccgccgatggacgaggacgactactccccgctggccccgtggatggtcctgtcgtccaccaagtcggtgaagtacgttgacgcgccgcaccacgccgtgccgcacggcgcccgcgccgtggagctggtgtccggcatggagacggcgctggtgcagaacgtgaccaccgttcccggacagctctacaggctccagttctcggccggggacgccggcaacggctgcgtgggctccatgaccgtccaggcgtacgccgcgcggggcagcgtcaaggtnccgtaccagtcccagggcaagggcggccacacgcgcggcgtgctggacttcgcggcggtcgcggaccagaccagggtggtgttcgtcagcatgggctacatcatgaagcccgacggcacgctgtgcggancnccgtcgtcgacgacgtctcgcttgtctccacgcggaaccatcctgctcgccgcttgcttctgtgatgctaccgacaagattcgttcatgggttaatgtgaatggctgtgagtgtgctcgaactcgaatgctcgggcttcatttaaccagatctgggtagagtccacggccatcacatgtatttgcatcgttgttttgtctttcttggccaaatgtacttgcttcgttgtagttgtatagactatgtatgcttcgacgggtgcc

SEQ ID NO: 7015 - protein, 380 aa, Zea mays subsp. mays
  peptide (1)..(380): Ceres Seq. ID no. 12408960
  misc_feature (9)..(9): Xaa is any aa, unknown or other
  misc_feature (284)..(284): Xaa is any aa, unknown or other
  misc_feature (328)..(328): Xaa is any aa, unknown or other
MACCRTATXEEAPPKSQLNGTRVMGRNAIPHWEISGYVEYIGSGQKQGDMLLPVPEGAYAVRLGNEASIQQRLAVTPGARYSITFSAARTCAQAEQLNVTVAPESDVLPIQTVYTSSGWDSYSWAFQAAGSVVTLIVHNPGVAEDAACGPLIDLFAIKTMPTPRSSKNNMLKNGDFEDGPYIFPNTQWGVLVPPMDEDDYSPLAPWMVLSSTKSVKYVDAPHHAVPHGARAVELVSGMETALVQNVTTVPGQLYRLQFSAGDAGNGCVGSMTVQAYAARGSVKXPYQSQGKGGHTRGVLDFAAVADQTRVVFVSMGYIMKPDGTLCGXPSSTTSRLSPRGTILLAACFCDATDKIRSWVNVNGCECARTRMLGLHLTRSG

SEQ ID NO: 7016 - protein, 357 aa, Zea mays subsp. mays
  peptide (1)..(357): Ceres Seq. ID no. 12408961
  misc_feature (261)..(261): Xaa is any aa, unknown or other
  misc_feature (305)..(305): Xaa is any aa, unknown or other
MGRNAIPHWEISGYVEYIGSGQKQGDMLLPVPEGAYAVRLGNEASIQQRLAVTPGARYSITFSAARTCAQAEQLNVTVAPESDVLPIQTVYTSSGWDSYSWAFQAAGSVVTLIVHNPGVAEDAACGPLIDLFAIKTMPTPRSSKNNMLKNGDFEDGPYIFPNTQWGVLVPPMDEDDYSPLAPWMVLSSTKSVKYVDAPHHAVPHGARAVELVSGMETALVQNVTTVPGQLYRLQFSAGDAGNGCVGSMTVQAYAARGSVKXPYQSQGKGGHTRGVLDFAAVADQTRVVFVSMGYIMKPDGTLCGXPSSTTSRLSPRGTILLAACFCDATDKIRSWVNVNGCECARTRMLGLHLTRSG

SEQ ID NO: 7017 - protein, 331 aa, Zea mays subsp. mays
  peptide (1)..(331): Ceres Seq. ID no. 12408962
  misc_feature (235)..(235): Xaa is any aa, unknown or other
  misc_feature (279)..(279): Xaa is any aa, unknown or other
MLLPVPEGAYAVRLGNEASIQQRLAVTPGARYSITFSAARTCAQAEQLNVTVAPESDVLPIQTVYTSSGWDSYSWAFQAAGSVVTLIVHNPGVAEDAACGPLIDLFAIKTMPTPRSSKNNMLKNGDFEDGPYIFPNTQWGVLVPPMDEDDYSPLAPWMVLSSTKSVKYVDAPHHAVPHGARAVELVSGMETALVQNVTTVPGQLYRLQFSAGDAGNGCVGSMTVQAYAARGSVKXPYQSQGKGGHTRGVLDFAAVADQTRVVFVSMGYIMKPDGTLCGXPSSTTSRLSPRGTILLAACFCDATDKIRSWVNVNGCECARTRMLGLHLTRSG

SEQ ID NO: 7018 - DNA, 1471 bp, Zea mays subsp. mays
  misc_feature (1)..(1471): Ceres Seq. ID no. 12373562
  misc_feature (1)..(1471): Ortholog of  Ceres SEQ ID NO 13654802 as cited in SEQ ID NO 62664
acggacatgcgatgctttatggatggtctagatcacgcgcttctactgacccgactcactctctctgaaaagtgaaaactaggaaccccactccccctcccgaaactaccgccgccgccgctgccgctgccgccgcgatccaggtctcccgcttcgcctgagctctcgacctcttcactcctcgccgccgctgctcgccctcccgcgtatcctcgtctcagctctcaggttttcagcctgatcaaaccggtgtaaccagccgtgcatgactgcattggttcggctcgccggaagagcagcttcgcggagtagggtcggcatagcggcggcggcggcaccccctcctgtcggcttgtccgtgcagcgccggagggcgttccagggcgtgagaatggagacggggggaagcaagggcggccgtggcgctctggtggtcctggaaggcctggaccggagcgggaaaacttcgcagtgtgcccggctgctgtccttcctcaaaggcaaaggctacaatgccgaaggatggagtttccccgatagggccaccagtgtggggcagatgatctcttcctacctcgcgaacgattcgcagcttgatgacaggacgattcatctgctcttcagcgccaaccgctgggagaaaagagctttgatggagagcaagctacttagtggaactactctcattgtagaccgctactcctattcgggagtggccttttcagctgctaagggccttgacattgagtggtgcaaggctccagaaaatggacttattgctccagaccttgtaatatatcttgatgtacagccagagaaagcggctgaaagaggaggctatggggatgagcgatatgaaaagatagagttccaaaagaaagttgcagagcattaccattcactctgtgattcgacatggaaggtggttgatggtttccttcccatggagactgttgaagaaagactgagagatttagctacgagctgtattcaggactgccaagggaacccacttaccaatctggcctggtgaagtgccttatgcacaaagtaatggcggccacacatcgtcttgtgtgatcaaccatggtcgggatagaattaggcatccggaagcattggcctttccatttgctctatcagtattccttgtgcttatttataatttcaaagcgtgttttttctttcctaaagttaggccccggttaaaacctctagagctaattgttagctaactaataagttgttagttggttttagctgggttgagacagctacaactaatgactatttgagaggtatagctaacaattagtcagtctattatctgatctgatccgtttaaaacctttcagttaattttagatgccaactattagttttagaggtttggaacaggacctagtctgtctgccggtgtacggattttgtgtaacgtgaaacatgtgagagtgcaaaacacttaaattgc

SEQ ID NO: 7019 - protein, 255 aa, Zea mays subsp. mays
  peptide (1)..(255): Ceres Seq. ID no. 12373563
MTALVRLAGRAASRSRVGIAAAAAPPPVGLSVQRRRAFQGVRMETGGSKGGRGALVVLEGLDRSGKTSQCARLLSFLKGKGYNAEGWSFPDRATSVGQMISSYLANDSQLDDRTIHLLFSANRWEKRALMESKLLSGTTLIVDRYSYSGVAFSAAKGLDIEWCKAPENGLIAPDLVIYLDVQPEKAAERGGYGDERYEKIEFQKKVAEHYHSLCDSTWKVVDGFLPMETVEERLRDLATSCIQDCQGNPLTNLAW

SEQ ID NO: 7020 - protein, 213 aa, Zea mays subsp. mays
  peptide (1)..(213): Ceres Seq. ID no. 12373564
METGGSKGGRGALVVLEGLDRSGKTSQCARLLSFLKGKGYNAEGWSFPDRATSVGQMISSYLANDSQLDDRTIHLLFSANRWEKRALMESKLLSGTTLIVDRYSYSGVAFSAAKGLDIEWCKAPENGLIAPDLVIYLDVQPEKAAERGGYGDERYEKIEFQKKVAEHYHSLCDSTWKVVDGFLPMETVEERLRDLATSCIQDCQGNPLTNLAW

SEQ ID NO: 7021 - protein, 157 aa, Zea mays subsp. mays
  peptide (1)..(157): Ceres Seq. ID no. 12373565
MISSYLANDSQLDDRTIHLLFSANRWEKRALMESKLLSGTTLIVDRYSYSGVAFSAAKGLDIEWCKAPENGLIAPDLVIYLDVQPEKAAERGGYGDERYEKIEFQKKVAEHYHSLCDSTWKVVDGFLPMETVEERLRDLATSCIQDCQGNPLTNLAW

SEQ ID NO: 7022 - DNA, 1738 bp, Zea mays subsp. mays
  misc_feature (1)..(1738): Ceres Seq. ID no. 12381225
  misc_feature (1)..(1738): Ortholog of  Ceres SEQ ID NO 15226870 as cited in SEQ ID NO 58831
  misc_feature (1)..(1738): Ortholog of  Ceres SEQ ID NO 15224334 as cited in SEQ ID NO 0
ccattacctagaacatcctaatcgaaaaattataagcaagcaaagcgcagacttgcataagcaaaccccagccgtcgcagacttgcataagcaagcaaagcgcaggcctcgctcggcctctcgccagttcttcctctcttcttcccgcgacgtacgtcacactgcagcctgcttgctactcttgatttatcatccctcttggtgccgagcaggcagacgtagctgctgcatctcctagctgcctgcctccgttgattatccgatcgacctgttcgacaacaacaagtgaggacgaaccaggcgatccaggtggggcccggccggcaatcaggtgaaaagttgagctgtgttgtcaagacagactgacagagacatcagtttctcgctcgcatcacatgcgtgcattctacgcgggcaagaagggcgatgagagcagtccgtcagctgatgtattagcaaccacaagagagagagggaagagaagagaacaatgagtatttattatccagcaaagagtccaaagggcccagtagcagcgttccctctacggtctgctctcgtcttcttcgtcacatcgttcggcttctacgtctgctacttctcctcacgtcagataatagccctggaaaccgaagcagaaacgacggccagcggaggcggagcagaacccacagagacccgttgcacaaataggcccgcgatcattccacatgggccacagacgcggtacgtgcacttcccgaggcccgccacctacgacaggggcgaatgcgtttgtaacccggtgcgcttcttcgtgatcgtgtcgacgcagaggtcggggagcgggtgggtggaggccttgctcaacagccaccccaacgtcagctccaacggcgaggtgttctccatgagggagaggagacagaacctctcctctgttctggggactcttgacaggctgtacggcatggactggctcaccagcgcggccaagaacgagtgcacggcggcgttcgggttcaagtggatgctcaaccagggactgatggaaaaccatcgcgacatcgtgaactatttgaacaggaagggtgcgatggtggtgttcctcttcaggaggaacacgctgcggaggctcatctctgtggtggccaacaactacgacaggagagcgaggcagctcaacggcgtccacaaatcacacgttcattccaaagaggaggctgaggtcctcgcaaggttcaggccggagctggacgcgccggctctgattccgagcatcagaaccgcccagcgcgccgtgagagcctgcctgcgccgcttcggcagcacgcgccacatggtcctctactacgaggacgtggtccgggacagcaggaaggcgttgtcccgggtgcaggagttcctcggggttccggcgagggagctgtccagcaagcatgtcaagatccacaccaggcccctcccggacctcgtcggcaactgggaggaggtgaggcggacgctcgcgggacagagtacagccgattcctagatgatgatgcagagtaggtcaagtgtcgagtttctatggaggtaatacaagacaaacagtcaagcggagagatggagaaagcgatgggagttttatctccgcctttacattcctgtgtaggtatactggtttaaactcatcattgctgcttgggtagtggggtgccgcgtgggatagcaaaaggtaatgtattggttcaagtgcattacataaaccaaagtcttg

SEQ ID NO: 7023 - protein, 340 aa, Zea mays subsp. mays
  peptide (1)..(340): Ceres Seq. ID no. 12381226
MSIYYPAKSPKGPVAAFPLRSALVFFVTSFGFYVCYFSSRQIIALETEAETTASGGGAEPTETRCTNRPAIIPHGPQTRYVHFPRPATYDRGECVCNPVRFFVIVSTQRSGSGWVEALLNSHPNVSSNGEVFSMRERRQNLSSVLGTLDRLYGMDWLTSAAKNECTAAFGFKWMLNQGLMENHRDIVNYLNRKGAMVVFLFRRNTLRRLISVVANNYDRRARQLNGVHKSHVHSKEEAEVLARFRPELDAPALIPSIRTAQRAVRACLRRFGSTRHMVLYYEDVVRDSRKALSRVQEFLGVPARELSSKHVKIHTRPLPDLVGNWEEVRRTLAGQSTADS

SEQ ID NO: 7024 - protein, 207 aa, Zea mays subsp. mays
  peptide (1)..(207): Ceres Seq. ID no. 12381227
MRERRQNLSSVLGTLDRLYGMDWLTSAAKNECTAAFGFKWMLNQGLMENHRDIVNYLNRKGAMVVFLFRRNTLRRLISVVANNYDRRARQLNGVHKSHVHSKEEAEVLARFRPELDAPALIPSIRTAQRAVRACLRRFGSTRHMVLYYEDVVRDSRKALSRVQEFLGVPARELSSKHVKIHTRPLPDLVGNWEEVRRTLAGQSTADS

SEQ ID NO: 7025 - protein, 187 aa, Zea mays subsp. mays
  peptide (1)..(187): Ceres Seq. ID no. 12381228
MDWLTSAAKNECTAAFGFKWMLNQGLMENHRDIVNYLNRKGAMVVFLFRRNTLRRLISVVANNYDRRARQLNGVHKSHVHSKEEAEVLARFRPELDAPALIPSIRTAQRAVRACLRRFGSTRHMVLYYEDVVRDSRKALSRVQEFLGVPARELSSKHVKIHTRPLPDLVGNWEEVRRTLAGQSTADS

SEQ ID NO: 7026 - DNA, 1150 bp, Zea mays subsp. mays
  misc_feature (1)..(1150): Ceres Seq. ID no. 12353887
  misc_feature (1)..(1150): Ortholog of  Ceres SEQ ID NO 13594377 as cited in SEQ ID NO 58177
  misc_feature (1)..(1150): Ortholog of  Ceres SEQ ID NO 15224613 as cited in SEQ ID NO 58938
  misc_feature (1)..(1150): Ortholog of  Ceres SEQ ID NO 13664309 as cited in SEQ ID NO 60596
ctcgcccaaacagcagagcaagctatggcgcgcgcgcgtgacgccgccctccacctcctcctcctggcagcgggcgcactcctacttctagccgtggtgtctcaggccaccgtggtgccgccgagcgttccggcgggcgcccccgaggacccgcggtgccgcgcgctggcgccgcggcgtggcgcgctggcggtgtacccgagcgacatggagcaactgcagttccttctcaacgccaagttcgtggaggcggagtggttcctgcacgcggcgctgggacgtggcgtggacttcctggaccgcaacctgtccggcggcgggcctcggccgtccggggccaggaaggcggacctggacttccgcacaaccgaggtcgccgccgagctcgggtaccaggaggtgggccacatccgcgccatcaggcaggccgtgggcgggttcccgcggccgcccatcgacctcggcgccgaccgcttcgccatggtcatggacgacgccatgggcgtccgtctggacccgccgttcgacccgtacgccgggcccgtcaacttcctgctcgcctcctacgtgttcccgcacgtcaccgccgccgccgccatgggcatcggccccagcctcatgggctacgcctccaagcgcctccaggcgagcatcctggcggtggaggccgggcaggacgcggtgatccggctgctgctgtaccagcgcgccgacgatgccgtcccaccgtaccagggccacaccgtggccgacttcacgcgccggatctccgactggcgcaaccggatgtccgggtgcggcgccaaggacgaaggggtcaaggtgctggaccggcggcagggcgccgagcgccgcaccataagcaacatcctcggcgccggcgaggactcgctcgggttccaacgcacgcctgcggaggtgctccgcatcctctacggctcgcgcaacgagcagatccccggtgggttcctccccaggggtgccaatggaaccatcgctagaggtttcttccagctcgcgtagatcaaaagatactaacaacatcctagtctatcttgagacatcacaagctgatcgatggtagtaccaatcaacttgaaattaaaggtccaagaaatgtgataaaaaaacagaaaccattattattttg

SEQ ID NO: 7027 - protein, 340 aa, Zea mays subsp. mays
  peptide (1)..(340): Ceres Seq. ID no. 12353888
LAQTAEQAMARARDAALHLLLLAAGALLLLAVVSQATVVPPSVPAGAPEDPRCRALAPRRGALAVYPSDMEQLQFLLNAKFVEAEWFLHAALGRGVDFLDRNLSGGGPRPSGARKADLDFRTTEVAAELGYQEVGHIRAIRQAVGGFPRPPIDLGADRFAMVMDDAMGVRLDPPFDPYAGPVNFLLASYVFPHVTAAAAMGIGPSLMGYASKRLQASILAVEAGQDAVIRLLLYQRADDAVPPYQGHTVADFTRRISDWRNRMSGCGAKDEGVKVLDRRQGAERRTISNILGAGEDSLGFQRTPAEVLRILYGSRNEQIPGGFLPRGANGTIARGFFQLA

SEQ ID NO: 7028 - protein, 332 aa, Zea mays subsp. mays
  peptide (1)..(332): Ceres Seq. ID no. 12353889
MARARDAALHLLLLAAGALLLLAVVSQATVVPPSVPAGAPEDPRCRALAPRRGALAVYPSDMEQLQFLLNAKFVEAEWFLHAALGRGVDFLDRNLSGGGPRPSGARKADLDFRTTEVAAELGYQEVGHIRAIRQAVGGFPRPPIDLGADRFAMVMDDAMGVRLDPPFDPYAGPVNFLLASYVFPHVTAAAAMGIGPSLMGYASKRLQASILAVEAGQDAVIRLLLYQRADDAVPPYQGHTVADFTRRISDWRNRMSGCGAKDEGVKVLDRRQGAERRTISNILGAGEDSLGFQRTPAEVLRILYGSRNEQIPGGFLPRGANGTIARGFFQLA

SEQ ID NO: 7029 - protein, 271 aa, Zea mays subsp. mays
  peptide (1)..(271): Ceres Seq. ID no. 12353890
MEQLQFLLNAKFVEAEWFLHAALGRGVDFLDRNLSGGGPRPSGARKADLDFRTTEVAAELGYQEVGHIRAIRQAVGGFPRPPIDLGADRFAMVMDDAMGVRLDPPFDPYAGPVNFLLASYVFPHVTAAAAMGIGPSLMGYASKRLQASILAVEAGQDAVIRLLLYQRADDAVPPYQGHTVADFTRRISDWRNRMSGCGAKDEGVKVLDRRQGAERRTISNILGAGEDSLGFQRTPAEVLRILYGSRNEQIPGGFLPRGANGTIARGFFQLA

SEQ ID NO: 7030 - DNA, 790 bp, Zea mays subsp. mays
  misc_feature (1)..(790): Ceres Seq. ID no. 12403482
  misc_feature (1)..(790): Ortholog of  Ceres SEQ ID NO 15175022 as cited in SEQ ID NO 62436
aagagccaacagagcaacgcccaggcacacacgacacgaaccaggcagccagccgcggagggaggaaccctagcggaacaggtgacggcggcgcgctaccggtgacgggggatacggcggcatcgtcccctcctccatccccggcgcggcggcgccagcagccggcctgcaggctgtttgaagagctcgccatttaatctcaatggaagccaagtttttccgtttcctgaagctcgttggggtcggcttcaaagcgaggtcagagagccaaggccgtgagttgttccttaaactgggcttcagccatgaggtgcagttcaccgctcctccagctgtccgtgtcttctgcttcaaacccaacataatctgctgcaccggcatcgataaggacagggtgcaccagttcgccggcgccatccggagctctaaggctccagaggtgtacaaggggaaggggatcctgtacattgacgaggttatcaagctgaagcccggaaagaagcgaaaaaataagtgacgatccgaaggcgttacaactttttctgtcttttaaccccattcttcgcatttgtagtgatctggatctggggtctgctgtgttgtgttgtgtacttgcgttgtgctacacagatcaccattatcttacctttacctcagctgcatgtaggaccatgagtgggaataagttaccagtttgttgatatgagctggaacgttgctttgcgaattggattggattaccgagtgggatgttttgtttcaaacttgaagtctttcaatagattgttgc

SEQ ID NO: 7031 - protein, 104 aa, Zea mays subsp. mays
  peptide (1)..(104): Ceres Seq. ID no. 12403483
MEAKFFRFLKLVGVGFKARSESQGRELFLKLGFSHEVQFTAPPAVRVFCFKPNIICCTGIDKDRVHQFAGAIRSSKAPEVYKGKGILYIDEVIKLKPGKKRKNK

SEQ ID NO: 7032 - protein, 64 aa, Zea mays subsp. mays
  peptide (1)..(64): Ceres Seq. ID no. 12403484
EPTEQRPGTHDTNQAASRGGRNPSGTGDGGALPVTGDTAASSPPPSPARRRQQPACRLFEELAI

SEQ ID NO: 7033 - DNA, 838 bp, Zea mays subsp. mays
  misc_feature (1)..(838): Ceres Seq. ID no. 12336716
  misc_feature (1)..(838): Ortholog of  Ceres SEQ ID NO 15226870 as cited in SEQ ID NO 58831
  misc_feature (1)..(838): Ortholog of  Ceres SEQ ID NO 15224334 as cited in SEQ ID NO 0
cgtggccgtagtggactacttcaatcgaagaggagtctctgcaatatttctcttcagaaggaatctgctccgccagttggtatcacagctagcgaataaccacgacagattcctgaagcagttaaacggaacacacaaggcgcatgtccacacagagcatgaggcccatatactcgcgagatacaagcccaggctgaacacgtcgtcgctaatacggaaactgaaacaggctgatgagtacacacgcgacgcccttgagaacctaaataacacccgccacatcactgtctactacgaggacatcgtccgcaacagaacaaggcttctcgacgccctggatttcctcggagtgccgaggagggagctggcgagtcggcacgtgaagatacacacgaagcccctgtcggagcagatcgagaactgggacgaagtntacagcgccctcaacggtacccagtacgagggcttcctgaatgccgctgactatacgtaatatgacgtcacggtctccacgtntcttgatgtagatgtaggtgtgtaggtatagcccccagctgtgactccttttgttcttgttttcgagtanccggccggccttctgcgtgcctgcctggcaggagttttgatgcgggggatggaggcgctttgccatggttgcgttcgagctcctggctagcccacccactagctttcctcatgtccatgtaacgaccctcgagcttctctcatctttggccgtccgcttgtaatgcttgtcgtcagtgatctcacccatgtcatgccatgccatgccttcgagggacaaagctgtgcacttgaacttgaggcttgtcttttc

SEQ ID NO: 7034 - protein, 163 aa, Zea mays subsp. mays
  peptide (1)..(163): Ceres Seq. ID no. 12336717
  misc_feature (144)..(144): Xaa is any aa, unknown or other
VAVVDYFNRRGVSAIFLFRRNLLRQLVSQLANNHDRFLKQLNGTHKAHVHTEHEAHILARYKPRLNTSSLIRKLKQADEYTRDALENLNNTRHITVYYEDIVRNRTRLLDALDFLGVPRRELASRHVKIHTKPLSEQIENWDEXYSALNGTQYEGFLNAADYT

SEQ ID NO: 7035 - DNA, 1791 bp, Zea mays subsp. mays
  misc_feature (1)..(1791): Ceres Seq. ID no. 12407706
  misc_feature (1)..(1791): Ortholog of  Ceres SEQ ID NO 14302251 as cited in SEQ ID NO 62093
aggcctcccactgcgtgtggggccgagccagcttgctccatcaagccgagagcccactcttctttctcacctcgcatcgcactccctcaatctctcgtctctatcgccgcatcgcttctctgccggagctccaacaacctcgcctcgcgcagcactccgctgaccctccctgactccctccctgccgctgggatggccgggaaacgagttacgggccgcgatgggcaagacgagggcggcgccaaggtcgggctcccggcgatggacctctccctcgcgttcccgcaggccacacctgcctccattttcccgccgtccgcttcggattattacccgtctgatgatttgctgaccagtgaagagcgctctatcaggatgaaggtcaggggtattatggaaaaagaaattgctcccattatgtcagcgtactgggaaaaggcagagtttccatttaatgccattcctaaacttgcaagccttggtgttgctggtggtacaataaagggttatgggtgcccaggactttccattacagccagtgctgttactatgtcagaaattgcacgggtatatgcaagctgttccacatttatactggtgcactcctctcttgcgatggtgacaatagctctttgcggatccgaggctcagaagcagaagtacttgccatcccttgctcaacttactactgttggctgttgggcattgacagagccaaattatggaagtgatgcgagctctttgagaaccctagcgaccaaggcacctggtgggtggcacatagatggtcaaaaacgctggatcggtaacagtactttcgccgatgtcctcgtcgtgttagccaggaatgcagacacgcaacagctaaatgggttcattgtgcggaaaggagctcctggcctgaaagctacaaagatcgagaacaaaattggcctcaggatggttcagaacggtgacatagttttgaacaaggtgttcgtccctgacgaagaccggttgccaggcatcaactcgtttcaggacatcagcaaggtgctcgccatttcacgcattatggtggcatggcaaccggttggcatatcaatgggggtctttgacatgtgccaccggtatctgaaagaaaggaagcagttcggagtccctctggcggcgtttcagctgaaccaagagaagctcgcccggatgctcggtaacgtccagtcgatggtcctcgtcggctggcgtctctgcaagctctacgagtcggggaaaatgacgccgggccacgctagcctagggaaggcttggaactccaggacggcccgcgaggtggtctcccttggccgagagctgctgggtgggaacgggattttggccgacttccttgtagccaaggcgttctgcgacctggagcccatctactcgtacgagggcacgtacgacattaacagcctggtgaccggcagggaggtcaccgggatcgcgagcttcaggcccgccgcgccagcgaaagcccggctgtgacgtgataacctgtgtccccgtgttgcagggaactggaggcgaataaatcatgatcaggtcgtcgtcgtcgtcgccatcgaacaaactgagcacgttcctggaacccgcccggtcaacgttggctgctcacatggtgtaccgtagccgagtgcggatgggaacggattcctagatatatgtagtactatacgaagatatctgttgcgggtggattactgtaaaccgggtctaatctctgttgcggtgtttgccgtctttggtcagaaggtaaggggggaacgccaggcg

SEQ ID NO: 7036 - protein, 500 aa, Zea mays subsp. mays
  peptide (1)..(500): Ceres Seq. ID no. 12407707
RPPTACGAEPACSIKPRAHSSFSPRIALPQSLVSIAASLLCRSSNNLASRSTPLTLPDSLPAAGMAGKRVTGRDGQDEGGAKVGLPAMDLSLAFPQATPASIFPPSASDYYPSDDLLTSEERSIRMKVRGIMEKEIAPIMSAYWEKAEFPFNAIPKLASLGVAGGTIKGYGCPGLSITASAVTMSEIARVYASCSTFILVHSSLAMVTIALCGSEAQKQKYLPSLAQLTTVGCWALTEPNYGSDASSLRTLATKAPGGWHIDGQKRWIGNSTFADVLVVLARNADTQQLNGFIVRKGAPGLKATKIENKIGLRMVQNGDIVLNKVFVPDEDRLPGINSFQDISKVLAISRIMVAWQPVGISMGVFDMCHRYLKERKQFGVPLAAFQLNQEKLARMLGNVQSMVLVGWRLCKLYESGKMTPGHASLGKAWNSRTAREVVSLGRELLGGNGILADFLVAKAFCDLEPIYSYEGTYDINSLVTGREVTGIASFRPAAPAKARL

SEQ ID NO: 7037 - protein, 436 aa, Zea mays subsp. mays
  peptide (1)..(436): Ceres Seq. ID no. 12407708
MAGKRVTGRDGQDEGGAKVGLPAMDLSLAFPQATPASIFPPSASDYYPSDDLLTSEERSIRMKVRGIMEKEIAPIMSAYWEKAEFPFNAIPKLASLGVAGGTIKGYGCPGLSITASAVTMSEIARVYASCSTFILVHSSLAMVTIALCGSEAQKQKYLPSLAQLTTVGCWALTEPNYGSDASSLRTLATKAPGGWHIDGQKRWIGNSTFADVLVVLARNADTQQLNGFIVRKGAPGLKATKIENKIGLRMVQNGDIVLNKVFVPDEDRLPGINSFQDISKVLAISRIMVAWQPVGISMGVFDMCHRYLKERKQFGVPLAAFQLNQEKLARMLGNVQSMVLVGWRLCKLYESGKMTPGHASLGKAWNSRTAREVVSLGRELLGGNGILADFLVAKAFCDLEPIYSYEGTYDINSLVTGREVTGIASFRPAAPAKARL

SEQ ID NO: 7038 - protein, 413 aa, Zea mays subsp. mays
  peptide (1)..(413): Ceres Seq. ID no. 12407709
MDLSLAFPQATPASIFPPSASDYYPSDDLLTSEERSIRMKVRGIMEKEIAPIMSAYWEKAEFPFNAIPKLASLGVAGGTIKGYGCPGLSITASAVTMSEIARVYASCSTFILVHSSLAMVTIALCGSEAQKQKYLPSLAQLTTVGCWALTEPNYGSDASSLRTLATKAPGGWHIDGQKRWIGNSTFADVLVVLARNADTQQLNGFIVRKGAPGLKATKIENKIGLRMVQNGDIVLNKVFVPDEDRLPGINSFQDISKVLAISRIMVAWQPVGISMGVFDMCHRYLKERKQFGVPLAAFQLNQEKLARMLGNVQSMVLVGWRLCKLYESGKMTPGHASLGKAWNSRTAREVVSLGRELLGGNGILADFLVAKAFCDLEPIYSYEGTYDINSLVTGREVTGIASFRPAAPAKARL

SEQ ID NO: 7039 - DNA, 1391 bp, Zea mays subsp. mays
  misc_feature (1)..(1391): Ceres Seq. ID no. 12406330
  misc_feature (1)..(1391): Ortholog of  Ceres SEQ ID NO 12609045 as cited in SEQ ID NO 51314
  misc_feature (1)..(1391): Ortholog of  Ceres SEQ ID NO 14316312 as cited in SEQ ID NO 60042
  misc_feature (1)..(1391): Ortholog of  Ceres SEQ ID NO 13654367 as cited in SEQ ID NO 67993
gcacgagaccattacctagaacatcctaatcgaaaaaagcagtcatgactcatgacactagaatggaatgggatggtgttcgtgcatcacgcgtcggcgagcttgggcgtgggtatgtggctgtcgacgaaggccttcatatcctgcagcaccttggtagcctcggggagctccgggaagccgtagaagccgtggaacatgcctgggtactcggccaccagcacctccttccccttccggcgcagcacgtcggcgtagcgtcgctgccagtccatgagcgggtcgaagccgccgatgatgaccatggcgggcgggaagtcgtcggcgaggtcggcgttgtcgtcggtgacgtgcgcggccgggtggtcgcgggtggcaccgtcgggcaggaacgcggtccacgagaagtcggagcgcctgaggttgaccacgggcgccacgccctctagctccagctccgacggcgtgcgctccacgccgccgaagtagggctgcacggggaagacgcccgcgacgcggagggcccgcgcggacggctgccacgccgccgcccagcggttggcgacgtggtgcacgatgtttccgcccgcgctctccccggccaggaagcagctgccgaggtcgacgggcacgccgtcgtccaggcccgggacgccgccgcgggcgtcgaggaagcgcagcgcgtcgacgccgtcgtcgtaggcggcgggccagcggtgctccggggccaggcggtagttgacggacaccacgacggcgccgagcgcggcgcagaggcggcggcacacgccgttgaagggcccgatggccggggagaagagcgcgaagccgccgccgtggaagtacacgaccacggggagcgggcggtccgccgcggccggcgcgaagacgcgcgcccagatgccgcgggacgcgtccatggtcacgtcgtaggagcgcaccccggaggcgtccgggcgcgggctggcgcgcgcgctcaggagccggtcgatcacgccgtacaggcagcggttcaccgtcccgtcgcggcgctccacggcgtcgatggccgccgtcagcccggccagctggaggcgcaccgacagcggcagcggtggtggcttcggcttcggcttatctgctgctccttggttgctgtcgctggccatggactccattccttcgctctggcctgctcgtcggtatctttgatcagtgtttccctggggttggacgtgcgatggagtatatagctgacagctcgtgtgccgtgtgggcagcggagcaggtagagagtttgagacggaactgtcggtatggcggcgcgtgcgtgccctgtctgtatttgtcaagacgggcgtggcgacgtgtcgcctggccttccacaaacggcaacggagagaccctgtctg

SEQ ID NO: 7040 - protein, 134 aa, Zea mays subsp. mays
  peptide (1)..(134): Ceres Seq. ID no. 12406331
MTHDTRMEWDGVRASRVGELGRGYVAVDEGLHILQHLGSLGELREAVEAVEHAWVLGHQHLLPLPAQHVGVASLPVHERVEAADDDHGGREVVGEVGVVVGDVRGRVVAGGTVGQERGPREVGAPEVDHGRHAL

SEQ ID NO: 7041 - protein, 128 aa, Zea mays subsp. mays
  peptide (1)..(128): Ceres Seq. ID no. 12406332
MEWDGVRASRVGELGRGYVAVDEGLHILQHLGSLGELREAVEAVEHAWVLGHQHLLPLPAQHVGVASLPVHERVEAADDDHGGREVVGEVGVVVGDVRGRVVAGGTVGQERGPREVGAPEVDHGRHAL

SEQ ID NO: 7042 - protein, 71 aa, Zea mays subsp. mays
  peptide (1)..(71): Ceres Seq. ID no. 12406333
MSGSKPPMMTMAGGKSSARSALSSVTCAAGWSRVAPSGRNAVHEKSERLRLTTGATPSSSSSDGVRSTPPK

SEQ ID NO: 7043 - DNA, 1793 bp, Zea mays subsp. mays
  misc_feature (1)..(1793): Ceres Seq. ID no. 12408952
  misc_feature (1)..(1793): Ortholog of  Ceres SEQ ID NO 14311287 as cited in SEQ ID NO 53177
aatcacgcacggacgataaatccaagtaaggaaatccccgatgatctcctgcgcgtcgcagcgccagccactcgattagtggagtccaccaaccaagcacgcgtccctccccgtcccagatcccatcccgcggcagccggtcagtccgatccatctccagtacccagcccgtcacccgccttccccgttcgctctcgtcggcgcgcgatggagggtctcatcaaggggttggtccacgtggccatcgacgccgtggaggacgccgtgagggagagggaccacggccgcgccgacgacgacgaggtgccgaggaggagggcggcccaaagctccgatccagatgacgacggggaggaggaacgcgacgaacgatcgcggtcgacgtgggccgaggtcgtctccgagcagaagtgcagcgatccggacgagcgccgggaccatcgaagctcggggcgggacaatcgccatgagaggagggatgacgagggttggaaaagggccgatggtcggaaccagcagcagcaccacgcaggccggcagaaccagtgcgagggggaggaaaggtgggatggcagtggcagccggcggcgtcagcaacagcagcaggcacaaggatacgggaatcagcatcaggaagaagaaaggataaacgatggaggctggcagaccgtcggtgagaaaaagcgccatggaagaccacagcagtctgaagcatggaatggatacagaaagccaccatcagaacaaaagtactctgaggatgtcggtcatatccaccaaggactcaatttcgagcccaccagggaggagctgaatagcttatcgaaagcgtgtagccgactttgggagctcgatatgaaccgtattgttcctggtaaggactacataatcgactgtggcaaggggaagaaagtttatcagaagggtgatatggcatctgaaagcttgttcagctggctaggcgacgatgtgctaagaaaacccacctactcacgtttctgcgcacttctggataactacaacccccaccaggggtacaaagaagttgttacccagcaggataagcacgaagaaatagctttcgttgaagagatcgctagaacagcgccaattaagtacttgcaccggtacttagtgcagaagggggctgtgcctcaggactacgaggacttcaagagaatgctgacatccctatggtttgatttgtatggaagaggtggcaactctagctgctcttctgcctttgagcatgtgtttgttggtgagatcaaaggacggggacaaggggagagtgaggtatcaggcttccataactggattcagttttacctggaagaagccaagggaaatgtggattaccaaggttatatatttccaaggcgccgtggtgaatcgcctgattcagagatacagctgctgactgttcagtttgagtggcatggcgtgctgaaatcggtatccagcacgttgattggcgtcagtcctgagtttgaggttgcactctacacgttgtgcttttttgttggaggggaagacaaccgcgtcgatattggcccgtatagtgtgaacgtcaagtgctaccgattggggaacaacaaaattggatcagcctttcccattgtagagaactgattatctggtgctatgcttctgcaggtttccaaatattcactttcttcgtttcataatcaattacgtgaagttaacaatgtactattttacttgtgcatgaaaaggtaccatactgttcaatttgttgctgccatctgcaatagtattgctacttgcactgc

SEQ ID NO: 7044 - protein, 543 aa, Zea mays subsp. mays
  peptide (1)..(543): Ceres Seq. ID no. 12408953
NHARTINPSKEIPDDLLRVAAPATRLVESTNQARVPPRPRSHPAAAGQSDPSPVPSPSPAFPVRSRRRAMEGLIKGLVHVAIDAVEDAVRERDHGRADDDEVPRRRAAQSSDPDDDGEEERDERSRSTWAEVVSEQKCSDPDERRDHRSSGRDNRHERRDDEGWKRADGRNQQQHHAGRQNQCEGEERWDGSGSRRRQQQQQAQGYGNQHQEEERINDGGWQTVGEKKRHGRPQQSEAWNGYRKPPSEQKYSEDVGHIHQGLNFEPTREELNSLSKACSRLWELDMNRIVPGKDYIIDCGKGKKVYQKGDMASESLFSWLGDDVLRKPTYSRFCALLDNYNPHQGYKEVVTQQDKHEEIAFVEEIARTAPIKYLHRYLVQKGAVPQDYEDFKRMLTSLWFDLYGRGGNSSCSSAFEHVFVGEIKGRGQGESEVSGFHNWIQFYLEEAKGNVDYQGYIFPRRRGESPDSEIQLLTVQFEWHGVLKSVSSTLIGVSPEFEVALYTLCFFVGGEDNRVDIGPYSVNVKCYRLGNNKIGSAFPIVEN

SEQ ID NO: 7045 - protein, 474 aa, Zea mays subsp. mays
  peptide (1)..(474): Ceres Seq. ID no. 12408954
MEGLIKGLVHVAIDAVEDAVRERDHGRADDDEVPRRRAAQSSDPDDDGEEERDERSRSTWAEVVSEQKCSDPDERRDHRSSGRDNRHERRDDEGWKRADGRNQQQHHAGRQNQCEGEERWDGSGSRRRQQQQQAQGYGNQHQEEERINDGGWQTVGEKKRHGRPQQSEAWNGYRKPPSEQKYSEDVGHIHQGLNFEPTREELNSLSKACSRLWELDMNRIVPGKDYIIDCGKGKKVYQKGDMASESLFSWLGDDVLRKPTYSRFCALLDNYNPHQGYKEVVTQQDKHEEIAFVEEIARTAPIKYLHRYLVQKGAVPQDYEDFKRMLTSLWFDLYGRGGNSSCSSAFEHVFVGEIKGRGQGESEVSGFHNWIQFYLEEAKGNVDYQGYIFPRRRGESPDSEIQLLTVQFEWHGVLKSVSSTLIGVSPEFEVALYTLCFFVGGEDNRVDIGPYSVNVKCYRLGNNKIGSAFPIVEN

SEQ ID NO: 7046 - DNA, 1527 bp, Zea mays subsp. mays
  misc_feature (1)..(1527): Ceres Seq. ID no. 12425149
  misc_feature (1)..(1527): Ortholog of  Ceres SEQ ID NO 13662391 as cited in SEQ ID NO 68631
gcacgagaccattacctagaacatcctaatcgaaaaaactttagccacaaatttcacccaaaaccaaaaaaataataatcccaaattaaagaaaaggagcagaagaaaaacaactttcatcgccgtccgccaccggagctcacttcgtcggccttccctcagtgtcaacccccttctcaaaacttgtatttgcacctcagtccctgccggtctgcccggtcgccgcctcgccggaggaagcccctcgtctccttgccctgcggcgggttcatggggttctcgctgtaccccatgaagacgtccacgcggatgctctggagcactagcttcttccgccataagctcagctcctcctcctgcttcctctgaggacgccccacccgcctcgatcgcttcggcggcgggccgctgctgctgcgctgtcctagcatccgttcaagtgtgtgtttgcgttcttaggtttcaagattggcttttgttgcgttcttggcgagacgaagggactagggcgcggacaaagaatcagcatgcatccgagcgcggtcagtttcgactccggcgacgggcggcggcgcggtggcgcgcagatgctgctcttcggcggcggaggcagcgccaacagcaacggcttcttccgaggtgttccgatggcggtcctggccatggacgacgcgacgcgcgtgggcaagcggcccttcttcacgacacacgaggagctcctggaggaggagtactacgacgagcaggcgccggagaagaagcgccgtctgacggcggagcaggtgcagctgctggagcggagcttcgaggaagagaacaagctggagcctgagcgcaagaccgagctggctcgccgcctggggatggcgccccgccaggtggccgtgtggttccagaaccgccgcgcgcgttggaagacaaagcagctcgagaccgactatgaccgcctcaaggctgcctacaacgcgctcgccgctgaccaccagggcctcctggccgacaacgatagcctccgggcacaggtgatctgcctaacagagaagctgcaaggcaaggagacatccctgtcggcaaccatcgctgcccaagaggtcgaccagccaaacgaacacaccacaggcactgagaaattgctggcgcagcagctcaaggacgacctgcacagcagctgcggttgcactggacatggtgccctgtcttcggaggaagaggatggtggcgtggtcagcgatgagggctgcaactttgatctccccgacgccatgtttgctgttggggtcaccaaccatggtgctgaggaggcgcagctggccaactggacatcttggttctggaactgatcggttgatggatggatgcatcaagtgcaaagagcaaatcctctcctggtttcgactcttttctgcaacatataattactgtgttgattatgtgccgtcagatgttttcaagtaatgaaacagaactgatgttgtaagtttatgtttctgaagatttgtatgttcatatatataataatatgcttgg

SEQ ID NO: 7047 - protein, 270 aa, Zea mays subsp. mays
  peptide (1)..(270): Ceres Seq. ID no. 12425150
MHPSAVSFDSGDGRRRGGAQMLLFGGGGSANSNGFFRGVPMAVLAMDDATRVGKRPFFTTHEELLEEEYYDEQAPEKKRRLTAEQVQLLERSFEEENKLEPERKTELARRLGMAPRQVAVWFQNRRARWKTKQLETDYDRLKAAYNALAADHQGLLADNDSLRAQVICLTEKLQGKETSLSATIAAQEVDQPNEHTTGTEKLLAQQLKDDLHSSCGCTGHGALSSEEEDGGVVSDEGCNFDLPDAMFAVGVTNHGAEEAQLANWTSWFWN

SEQ ID NO: 7048 - protein, 250 aa, Zea mays subsp. mays
  peptide (1)..(250): Ceres Seq. ID no. 12425151
MLLFGGGGSANSNGFFRGVPMAVLAMDDATRVGKRPFFTTHEELLEEEYYDEQAPEKKRRLTAEQVQLLERSFEEENKLEPERKTELARRLGMAPRQVAVWFQNRRARWKTKQLETDYDRLKAAYNALAADHQGLLADNDSLRAQVICLTEKLQGKETSLSATIAAQEVDQPNEHTTGTEKLLAQQLKDDLHSSCGCTGHGALSSEEEDGGVVSDEGCNFDLPDAMFAVGVTNHGAEEAQLANWTSWFWN

SEQ ID NO: 7049 - protein, 230 aa, Zea mays subsp. mays
  peptide (1)..(230): Ceres Seq. ID no. 12425152
MAVLAMDDATRVGKRPFFTTHEELLEEEYYDEQAPEKKRRLTAEQVQLLERSFEEENKLEPERKTELARRLGMAPRQVAVWFQNRRARWKTKQLETDYDRLKAAYNALAADHQGLLADNDSLRAQVICLTEKLQGKETSLSATIAAQEVDQPNEHTTGTEKLLAQQLKDDLHSSCGCTGHGALSSEEEDGGVVSDEGCNFDLPDAMFAVGVTNHGAEEAQLANWTSWFWN

SEQ ID NO: 7050 - DNA, 1265 bp, Zea mays subsp. mays
  misc_feature (1)..(1265): Ceres Seq. ID no. 12344227
  misc_feature (1)..(1265): Ortholog of  Ceres SEQ ID NO 14315553 as cited in SEQ ID NO 60445
  misc_feature (1)..(1265): Ortholog of  Ceres SEQ ID NO 13598045 as cited in SEQ ID NO 66822
aacgctcctcctttcaaacccacgccgacaccgatgccgagagccggggtgtccagcagcgagagtagccgccgtggcgccggtgcgttcagaaccctctccgaagatcgccgcatcaccgtattctgctccgacggtcgcctctaccaagtcgattacgcgtggaacgctacgaagctggcgggcgtcacctccgtcggggtgcgtgggaccgactccgtatgcgtcgtcggccagcggagggcgaacacgcacgcgcccaaggacaaattgctggacatgaccagcgtttcgcgcctgttcccgatcaccgaccggctggggttgctcgccacggggatcgcaggtgaggggagagcattggcacatgaggcaaggaatcaaactgcagaatttcgtttcaattggggatatgaaatgcctcctgatgttttggcacaatggattgcagacagagcacagatctggacccagtatgtttccaagagaccttctggagttgttgccatgattctgggcattgatgatgagaaaggaactccacaactctttacatgtgatcctgctgggtattttttcggtcacaaggcagcaagtgctggccaaagagatacggaggctgtcaactttcttgagaagaaaatgaagaacaatccttcactaccatttcaggaaaccattcagatggcaatatcagcattgcagttcgccctgaaggctgacctcaaagcctcggaagtcgaggttggggttgtcaggacggatgatccaactttcagagtgctgacagaagctgaaatcgatgagcatctggaagccatcaacccagagccgcggccactctgaaatgctccccggtttattccgggataaactgacattggagaactgaaaccatggcgacctcagctgcattttgggcaccggaaagtcaaagctttcatgtggttctttacgacggctctatggacattggattagcggtttttgggcggttttttcgttccagtgactagcggttttcagtggaaaaacggtttggtaaacctactgggcacacacgaccggccatccgccaagtcaggcgagccccgcgcggtcagtgcttgacgacgtggtatcacagccgccgtctaccgtccctcagcggacggccgggccaattcatgcatcaccgagcaataccgagcaatactgacatctaaaatgttctttagccgtaccatatccaagcaatgaccatagcactagctatgaacgtggtc

SEQ ID NO: 7051 - protein, 281 aa, Zea mays subsp. mays
  peptide (1)..(281): Ceres Seq. ID no. 12344228
NAPPFKPTPTPMPRAGVSSSESSRRGAGAFRTLSEDRRITVFCSDGRLYQVDYAWNATKLAGVTSVGVRGTDSVCVVGQRRANTHAPKDKLLDMTSVSRLFPITDRLGLLATGIAGEGRALAHEARNQTAEFRFNWGYEMPPDVLAQWIADRAQIWTQYVSKRPSGVVAMILGIDDEKGTPQLFTCDPAGYFFGHKAASAGQRDTEAVNFLEKKMKNNPSLPFQETIQMAISALQFALKADLKASEVEVGVVRTDDPTFRVLTEAEIDEHLEAINPEPRPL

SEQ ID NO: 7052 - protein, 270 aa, Zea mays subsp. mays
  peptide (1)..(270): Ceres Seq. ID no. 12344229
MPRAGVSSSESSRRGAGAFRTLSEDRRITVFCSDGRLYQVDYAWNATKLAGVTSVGVRGTDSVCVVGQRRANTHAPKDKLLDMTSVSRLFPITDRLGLLATGIAGEGRALAHEARNQTAEFRFNWGYEMPPDVLAQWIADRAQIWTQYVSKRPSGVVAMILGIDDEKGTPQLFTCDPAGYFFGHKAASAGQRDTEAVNFLEKKMKNNPSLPFQETIQMAISALQFALKADLKASEVEVGVVRTDDPTFRVLTEAEIDEHLEAINPEPRPL

SEQ ID NO: 7053 - protein, 188 aa, Zea mays subsp. mays
  peptide (1)..(188): Ceres Seq. ID no. 12344230
MTSVSRLFPITDRLGLLATGIAGEGRALAHEARNQTAEFRFNWGYEMPPDVLAQWIADRAQIWTQYVSKRPSGVVAMILGIDDEKGTPQLFTCDPAGYFFGHKAASAGQRDTEAVNFLEKKMKNNPSLPFQETIQMAISALQFALKADLKASEVEVGVVRTDDPTFRVLTEAEIDEHLEAINPEPRPL

SEQ ID NO: 7054 - DNA, 1498 bp, Zea mays subsp. mays
  misc_feature (1)..(1498): Ceres Seq. ID no. 12381221
  misc_feature (1)..(1498): Ortholog of  Ceres SEQ ID NO 13639514 as cited in SEQ ID NO 55736
  misc_feature (1)..(1498): Ortholog of  Ceres SEQ ID NO 14312254 as cited in SEQ ID NO 59148
  misc_feature (1)..(1498): Ortholog of  Ceres SEQ ID NO 13662804 as cited in SEQ ID NO 65394
  misc_feature (1)..(1498): Ortholog of  Ceres SEQ ID NO 13656519 as cited in SEQ ID NO 69226
gcacgagaccattacctagaacatcctaatcgaaaaaaaaaccaaagcaaagcaaacccagggcggccagcggacggaacccaaggcgaaaaggaagccagcggaagcagcgaaaagcccacgccaccttccaatcccccccaaattcccttgcattccattcccttcttcccttcccacacacctcctcctcctcctcctccgcgtctcttccccggcccccacatccgtccccccctctctctctcttcgccggccgccattgcgctcccgcattgcgccgggtcctaccagtccagcgcgggtccgtgccggcggcgggcatgatgccgcggcgcgtggcgtcggtgccggtgcccgactggctggaggcgctgctggccacgcgcttcttcctcgcctgcgccgcgcacccggcgtccccgcgcaacgagtgcaacatgttctgcctcgactgcacgggcgcgccgccgccgccgccgccggccttctgctactactgccgcgcgcaccgacactcgtcgcaccgcgtcatccagataaggcggtcctcctaccacgacgtcgtccgcgtgtcggaggtggaggacgtgctcgacatctccggcgtgcagacctacgtcatcaacagcgcccgggtgctcttcctcaacgagaggccccagccgcgcggcgccggcgcggccgcgggcaaggccgccgcgtccccctacaactgcgagatctgcggccgcgcgctgctcgaccccntccgcttctgctcgctcggatgcaagctggtggacaccaagaggagcaacggccacgcggctagttccgcggacggaggcggcggcggcggcggcgcagccagtggcaatgacgagacgacggaggccggcgggagcaagaacggcccgggggcgcggccgcacggacggcggcggaaggggaccccacaccgcgcgcccttctggtcctgacccaccaccggcaatggcgatcggtcgagttactccactagcgagcatcgaggcaatcaagagatcgataggggaataatggagggaggggacgatcgccgtctctcctccgcgccgccccgcgcttcttcggttcggttcggtttggttgtccttatatatacgtaattagaaacagaaaagcaaaggagagagaaaaagatactgcccgcccaactagagaaaggaaggaaggttatagataaacagatagaaaagcgagctgaggtcggcaccctcgcgcgcatcccccctcaaccaccggagggagggagagagggagccggcccggggccgcgcgctcgctggactgcagtaagcaacttgtctgtccccatccctctctcaccataccatggcgccatttggtacggtaggtgtgcatgatggcatgcctgatcatctcctcctcctcctcctcctagtcatcatattcatagatgatgctggtgaacttgagctagcaggaaatggatttaattctttctttttttttg

SEQ ID NO: 7055 - protein, 212 aa, Zea mays subsp. mays
  peptide (1)..(212): Ceres Seq. ID no. 12381222
  misc_feature (143)..(143): Xaa is any aa, unknown or other
MMPRRVASVPVPDWLEALLATRFFLACAAHPASPRNECNMFCLDCTGAPPPPPPAFCYYCRAHRHSSHRVIQIRRSSYHDVVRVSEVEDVLDISGVQTYVINSARVLFLNERPQPRGAGAAAGKAAASPYNCEICGRALLDPXRFCSLGCKLVDTKRSNGHAASSADGGGGGGGAASGNDETTEAGGSKNGPGARPHGRRRKGTPHRAPFWS

SEQ ID NO: 7056 - protein, 211 aa, Zea mays subsp. mays
  peptide (1)..(211): Ceres Seq. ID no. 12381223
  misc_feature (142)..(142): Xaa is any aa, unknown or other
MPRRVASVPVPDWLEALLATRFFLACAAHPASPRNECNMFCLDCTGAPPPPPPAFCYYCRAHRHSSHRVIQIRRSSYHDVVRVSEVEDVLDISGVQTYVINSARVLFLNERPQPRGAGAAAGKAAASPYNCEICGRALLDPXRFCSLGCKLVDTKRSNGHAASSADGGGGGGGAASGNDETTEAGGSKNGPGARPHGRRRKGTPHRAPFWS

SEQ ID NO: 7057 - protein, 173 aa, Zea mays subsp. mays
  peptide (1)..(173): Ceres Seq. ID no. 12381224
  misc_feature (104)..(104): Xaa is any aa, unknown or other
MFCLDCTGAPPPPPPAFCYYCRAHRHSSHRVIQIRRSSYHDVVRVSEVEDVLDISGVQTYVINSARVLFLNERPQPRGAGAAAGKAAASPYNCEICGRALLDPXRFCSLGCKLVDTKRSNGHAASSADGGGGGGGAASGNDETTEAGGSKNGPGARPHGRRRKGTPHRAPFWS

SEQ ID NO: 7058 - DNA, 1580 bp, Zea mays subsp. mays
  misc_feature (1)..(1580): Ceres Seq. ID no. 13493331
  misc_feature (1)..(1580): Ortholog of  Ceres SEQ ID NO 14304528 as cited in SEQ ID NO 53293
  misc_feature (1)..(1580): Ortholog of  Ceres SEQ ID NO 14315162 as cited in SEQ ID NO 60005
  misc_feature (1)..(1580): Ortholog of  Ceres SEQ ID NO 13659881 as cited in SEQ ID NO 66938
agctccccactctctctccgctgctgcctccgcggacggattccatccccggccctataagtgtggcttcgggacggcgcttcccatccgacaccggcgccttcgcggactgggtcgcctcctncgncgccgcggcgcgcggggacgacctctccctcggcttcaatgccagcgcggcggccgccgnngccgcggcnncctcnngcgcctcgctgggcgcgggcctctggggcccggcgtcctccgcctccgccgccatgcgccaggcggccgccatgaactacgggatggccgacgtggggatggtcgtcgtcgcgcccgccgcctccttccaccacacgcaccancaccaccaccaccacgaggccgccgccgccgccgccgccgcggctgcggcggcctccggcgaccccatcttcccgctgctctccggcggcccctgcgtgcttgatccggacaagtcggcctccgccagcgccatccagttctggcagcagcagcctccgccgccgtcgtcgccggctgctgcagcgggcgctaaccctaaccctagcgccagccccttcgcctacctcaagaagcccctcccgatgctggacgccggcgccggctcctcaggctccggcgccaccacgtgccaggactgcggcaaccaagcgaagaaggactgcggccacaaccggtgccgcacctgctgcaagagccgcggcttcgactgctccacgcacgtcaagagcacctgggtccccgccgcccgccgccgcgagcgccagcagctcgccgcctccggctccgcctcctcctcccccgccaccgcatccgcggcggccgtcgccgcgtccgcgtccaagaagccccgcctcctctcgtcgcagaccaccacctcgcacacgtccacctccaacgccaccacgccccgaagcttcgacaccacgtccagccaccaagacgcgtcgttcagggacagcctcccgaggcaggtgcgcgcgccggcggtgttcaagtgcgtgcgcgtgacgtccatcgaggacggcgaggacgagtacgcgtaccaggcgacggtcaccatcaacggccacctgttcaaggggttcctgtacgaccagggccccgacgacgggcgccacgcggcccaccagcaacgacgactgcacggcccggcgggtgcccaacatctccgagctccatctcggagcggcgtctggttccggcgccggcaccggcacctcgatgtcgatggctcctcccacggggctgtacggtgggggtggcggaggacatcatccgcacattctcggcgggtcgtcgagctacggtaacaccatgaactgatggagtacgttcctcccttctacaccggaagagtcccggcccgttaatttccattccttgttgctcttcattttccacgctatagtagcagagttcaattttctcagccttgtcacccggcgccatagatagcggggcatcaatgcatggcgttattctgttctacctccttcattccatcgtcctactgtgttatttagccattcgttggtgtataataacatcgatgagttgttttttcttcttcc

SEQ ID NO: 7059 - protein, 438 aa, Zea mays subsp. mays
  peptide (1)..(438): Ceres Seq. ID no. 13493332
  misc_feature (41)..(41): Xaa is any aa, unknown or other
  misc_feature (42)..(42): Xaa is any aa, unknown or other
  misc_feature (62)..(62): Xaa is any aa, unknown or other
  misc_feature (65)..(65): Xaa is any aa, unknown or other
  misc_feature (66)..(66): Xaa is any aa, unknown or other
  misc_feature (67)..(67): Xaa is any aa, unknown or other
  misc_feature (68)..(68): Xaa is any aa, unknown or other
  misc_feature (115)..(115): Xaa is any aa, unknown or other
LPTLSPLLPPRTDSIPGPISVASGRRFPSDTGAFADWVASXXAAARGDDLSLGFNASAAAAXAAXXXXASLGAGLWGPASSASAAMRQAAAMNYGMADVGMVVVAPAASFHHTHXHHHHHEAAAAAAAAAAAASGDPIFPLLSGGPCVLDPDKSASASAIQFWQQQPPPPSSPAAAAGANPNPSASPFAYLKKPLPMLDAGAGSSGSGATTCQDCGNQAKKDCGHNRCRTCCKSRGFDCSTHVKSTWVPAARRRERQQLAASGSASSSPATASAAAVAASASKKPRLLSSQTTTSHTSTSNATTPRSFDTTSSHQDASFRDSLPRQVRAPAVFKCVRVTSIEDGEDEYAYQATVTINGHLFKGFLYDQGPDDGRHAAHQQRRLHGPAGAQHLRAPSRSGVWFRRRHRHLDVDGSSHGAVRWGWRRTSSAHSRRVVELR

SEQ ID NO: 7060 - protein, 353 aa, Zea mays subsp. mays
  peptide (1)..(353): Ceres Seq. ID no. 13493333
  misc_feature (30)..(30): Xaa is any aa, unknown or other
MRQAAAMNYGMADVGMVVVAPAASFHHTHXHHHHHEAAAAAAAAAAAASGDPIFPLLSGGPCVLDPDKSASASAIQFWQQQPPPPSSPAAAAGANPNPSASPFAYLKKPLPMLDAGAGSSGSGATTCQDCGNQAKKDCGHNRCRTCCKSRGFDCSTHVKSTWVPAARRRERQQLAASGSASSSPATASAAAVAASASKKPRLLSSQTTTSHTSTSNATTPRSFDTTSSHQDASFRDSLPRQVRAPAVFKCVRVTSIEDGEDEYAYQATVTINGHLFKGFLYDQGPDDGRHAAHQQRRLHGPAGAQHLRAPSRSGVWFRRRHRHLDVDGSSHGAVRWGWRRTSSAHSRRVVELR

SEQ ID NO: 7061 - protein, 347 aa, Zea mays subsp. mays
  peptide (1)..(347): Ceres Seq. ID no. 13493334
  misc_feature (24)..(24): Xaa is any aa, unknown or other
MNYGMADVGMVVVAPAASFHHTHXHHHHHEAAAAAAAAAAAASGDPIFPLLSGGPCVLDPDKSASASAIQFWQQQPPPPSSPAAAAGANPNPSASPFAYLKKPLPMLDAGAGSSGSGATTCQDCGNQAKKDCGHNRCRTCCKSRGFDCSTHVKSTWVPAARRRERQQLAASGSASSSPATASAAAVAASASKKPRLLSSQTTTSHTSTSNATTPRSFDTTSSHQDASFRDSLPRQVRAPAVFKCVRVTSIEDGEDEYAYQATVTINGHLFKGFLYDQGPDDGRHAAHQQRRLHGPAGAQHLRAPSRSGVWFRRRHRHLDVDGSSHGAVRWGWRRTSSAHSRRVVELR

SEQ ID NO: 7062 - DNA, 1430 bp, Zea mays subsp. mays
  misc_feature (1)..(1430): Ceres Seq. ID no. 12408941
  misc_feature (1)..(1430): Ortholog of  Ceres SEQ ID NO 13596523 as cited in SEQ ID NO 62578
  misc_feature (1)..(1430): Ortholog of  Ceres SEQ ID NO 15169674 as cited in SEQ ID NO 64731
  misc_feature (1)..(1430): Ortholog of  Ceres SEQ ID NO 13597701 as cited in SEQ ID NO 65129
accatcatggcagaagcggccggcggcggacccctgctccccgaggaactcattatctgggagatcctaacccgtctgccggcgaagcccctcctccgatgccgcgctgtctgcctctcctggtgccgccgactcacctccgacgccaaattcctcctcgcccaccaccgtcgccagccctcgctcccgctcctcactgaaggggacaggagcaccgaggagaggaggatcgacgccctggactaccgcaccggcgagcggcgccccatcgcgcggacaacaggccggaccgccgccaacggggacgacctgaacgtgctggcttcctgcgaaggcctcctcatcctcctcgccaacggcggcctccagatctgcaacccggcgacccgccagcgcgcgccactcactcttctccacggcgcctattgcatctccgcgctttaccctcacatcccgtccaggtcgtaccgtgtgctctgctgcttcgagagagccgaggacggccacgccgtgtaccacgtgcacaccgtcgggtcgcgcgaactcaggtgcgtcggagaacctcccgcgccgtgggcgtccggggatatggtaatggcgatgccgatgatggtgtaccttcacccgcacgtcgtggcagacagcaggatctactggcagccggtaaagctgcccgtcggcaacggcaaggtcaacaacatgctcgtgttcgacacaatgaccgagtccttccagcaactgctgtcgcccgtggagggcccctttcttgaactgtttcagatgaacagcggcgcccttggattgtaccactgccgcagcggcaaggttgatctttgggtgttacaggatcacgggagctggtcctggtcgatgaaccaccggatcaaattggacgtgatgtttttctccctgctgccggtgctggacccggaaggagatgtgctagtgctttctaaaagaggggaaacaggcatcctgtggcaacatctgcatcacatttctggtgtcaatggcagtttgctgggccctgtatcaatggagcgcttatctgaagcttagcaggcataggctcaaagaaagtctagtccaccatgacttcttctcgatggtaggtaatgagggtggtgtggatgaaaaaccattgttcgatggcttgtcaactgtggcattgcttcgtgatgataattctgagccacattgagaaacaaaggtattactcaagctgtttcatctcatcaggatggagtcactcctgcctagtaataacagcactgcagattagtaataacctgaaactatacctcgagtctgatttttcccttttcacatgagtcataaacactgttatgactggtattttattttcccttttcacgtgagtcatgaacactgttattactggtattttattttccattttcacatgagcc

SEQ ID NO: 7063 - protein, 352 aa, Zea mays subsp. mays
  peptide (1)..(352): Ceres Seq. ID no. 12408942
TIMAEAAGGGPLLPEELIIWEILTRLPAKPLLRCRAVCLSWCRRLTSDAKFLLAHHRRQPSLPLLTEGDRSTEERRIDALDYRTGERRPIARTTGRTAANGDDLNVLASCEGLLILLANGGLQICNPATRQRAPLTLLHGAYCISALYPHIPSRSYRVLCCFERAEDGHAVYHVHTVGSRELRCVGEPPAPWASGDMVMAMPMMVYLHPHVVADSRIYWQPVKLPVGNGKVNNMLVFDTMTESFQQLLSPVEGPFLELFQMNSGALGLYHCRSGKVDLWVLQDHGSWSWSMNHRIKLDVMFFSLLPVLDPEGDVLVLSKRGETGILWQHLHHISGVNGSLLGPVSMERLSEA

SEQ ID NO: 7064 - protein, 350 aa, Zea mays subsp. mays
  peptide (1)..(350): Ceres Seq. ID no. 12408943
MAEAAGGGPLLPEELIIWEILTRLPAKPLLRCRAVCLSWCRRLTSDAKFLLAHHRRQPSLPLLTEGDRSTEERRIDALDYRTGERRPIARTTGRTAANGDDLNVLASCEGLLILLANGGLQICNPATRQRAPLTLLHGAYCISALYPHIPSRSYRVLCCFERAEDGHAVYHVHTVGSRELRCVGEPPAPWASGDMVMAMPMMVYLHPHVVADSRIYWQPVKLPVGNGKVNNMLVFDTMTESFQQLLSPVEGPFLELFQMNSGALGLYHCRSGKVDLWVLQDHGSWSWSMNHRIKLDVMFFSLLPVLDPEGDVLVLSKRGETGILWQHLHHISGVNGSLLGPVSMERLSEA

SEQ ID NO: 7065 - DNA, 1815 bp, Zea mays subsp. mays
  misc_feature (1)..(1815): Ceres Seq. ID no. 12408937
  misc_feature (1)..(1815): Ortholog of  Ceres SEQ ID NO 15173087 as cited in SEQ ID NO 67193
  misc_feature (1)..(1815): Ortholog of  Ceres SEQ ID NO 12613725 as cited in SEQ ID NO 68196
  misc_feature (1)..(1815): Ortholog of  Ceres SEQ ID NO 13598312 as cited in SEQ ID NO 68448
aagtatcaagctaggcaggcctggtcccgaagaacacccttctctggtcgtcgcatcgcagggcagctagctaggtagctaacatccgccatggcgcgcgggggagacggcctgcaggtgctgagcgcgctggacgcggcgaagacgcagtggtaccacttcacggccatcatcgtcgccggcatgggcttcttcacggacgcctacgacctcttctgcatctccctcgtcaccaagctgctgggccgcatctactacacggacaccagcaaggacagccccgggtcgctgccgcccaacgtcgcggcggcggtcaacggcgtggccttctgcggcacgctggccggccagctcttcttcggctggctgggcgacaagctggggcgcaagagcgtgtacgggatgacgctcatggtcatggtcatctgctccgtcgcgtcgggcctctcgttcggccacacccccacgggggtcatggccacgctctgcttcttccgcttctggctcggcttcggcatcggcggcgactacccgctgtcggccaccatcatgtccgagtacgccaacaagaggacccgcggcgccttcatcgccgccgtcttcgccatgcagggcttcggcatcctcgccggcggcatcgtcacgctcgtcatctccgccgccttccgcgcggcgtacccgtccccggcgtacagggacgaccacttcacctccaccgtgccgcaggccgacttcgtgtggcgggtcatcctcatgctcggcgccgcgccggcgctgctcacctactactggcggatgaagatgcccgagacggcgcggtacacggcgctggtggccaagaacgccaagcaggccgcggccgacatgtccaaggtgctgcagactgagatcgtggacgagcaggagaagctggacgccgccgagggcgccaacagcttcggcctcttctccagggagttcgcgcgccgccacggcctccacctcgtcggcaccgccaccacctggttcctgctcgacatcgccttctacagccagaacctgttccagaaggacatcttcaccagcatcaactggatccccaaggccaacaccatgagcgcgctggaggaggtgtaccgcatctcccgcgcgcagacgctcatcgcgctctgcggcacagtcccgggctactggttcaccgtcgcgctcatcgacgtcgtcggccgcttcgccatccagctgctgggcttcttcatgatgaccgtcttcatgctcggcctcgccatcccttaccaccactggaccacgccgggcaaccacatcggcttcgtcgtcatgtacgccttcaccttcttcttcgccaacttcgggcccaacagcaccaccttcatcgtgcccgccgagatcttcccggcgcgcctgcgctccacctgccacggcatctccgccgcctcggggaaggccggggccatcatcggcgcgttcggcttcctgtacgcggcgcagaaccaggacaggagcaagacggacgccggctaccccgcgggcatcggcgtgcgcaactcgctcttcgtcctcgccgccagcaacatgctcggcttcgtcctcacgttcctcgtgccggagtccaagggcaagtcgctcgaggagatgtccggtgaggctgaagactcagaggaggagcccgtcggcgcccgtgcggtgcggccgtcggagacccagatggtgtagagaatcgatcgatcgacgcgtgttccttcctgcactgcacatggtgggctatcatgtcctcaattgtttttttccacgttaaagtcaaccctggctgtgttttgc

SEQ ID NO: 7066 - protein, 539 aa, Zea mays subsp. mays
  peptide (1)..(539): Ceres Seq. ID no. 12408938
MARGGDGLQVLSALDAAKTQWYHFTAIIVAGMGFFTDAYDLFCISLVTKLLGRIYYTDTSKDSPGSLPPNVAAAVNGVAFCGTLAGQLFFGWLGDKLGRKSVYGMTLMVMVICSVASGLSFGHTPTGVMATLCFFRFWLGFGIGGDYPLSATIMSEYANKRTRGAFIAAVFAMQGFGILAGGIVTLVISAAFRAAYPSPAYRDDHFTSTVPQADFVWRVILMLGAAPALLTYYWRMKMPETARYTALVAKNAKQAAADMSKVLQTEIVDEQEKLDAAEGANSFGLFSREFARRHGLHLVGTATTWFLLDIAFYSQNLFQKDIFTSINWIPKANTMSALEEVYRISRAQTLIALCGTVPGYWFTVALIDVVGRFAIQLLGFFMMTVFMLGLAIPYHHWTTPGNHIGFVVMYAFTFFFANFGPNSTTFIVPAEIFPARLRSTCHGISAASGKAGAIIGAFGFLYAAQNQDRSKTDAGYPAGIGVRNSLFVLAASNMLGFVLTFLVPESKGKSLEEMSGEAEDSEEEPVGARAVRPSETQMV

SEQ ID NO: 7067 - protein, 508 aa, Zea mays subsp. mays
  peptide (1)..(508): Ceres Seq. ID no. 12408939
MGFFTDAYDLFCISLVTKLLGRIYYTDTSKDSPGSLPPNVAAAVNGVAFCGTLAGQLFFGWLGDKLGRKSVYGMTLMVMVICSVASGLSFGHTPTGVMATLCFFRFWLGFGIGGDYPLSATIMSEYANKRTRGAFIAAVFAMQGFGILAGGIVTLVISAAFRAAYPSPAYRDDHFTSTVPQADFVWRVILMLGAAPALLTYYWRMKMPETARYTALVAKNAKQAAADMSKVLQTEIVDEQEKLDAAEGANSFGLFSREFARRHGLHLVGTATTWFLLDIAFYSQNLFQKDIFTSINWIPKANTMSALEEVYRISRAQTLIALCGTVPGYWFTVALIDVVGRFAIQLLGFFMMTVFMLGLAIPYHHWTTPGNHIGFVVMYAFTFFFANFGPNSTTFIVPAEIFPARLRSTCHGISAASGKAGAIIGAFGFLYAAQNQDRSKTDAGYPAGIGVRNSLFVLAASNMLGFVLTFLVPESKGKSLEEMSGEAEDSEEEPVGARAVRPSETQMV

SEQ ID NO: 7068 - protein, 435 aa, Zea mays subsp. mays
  peptide (1)..(435): Ceres Seq. ID no. 12408940
MTLMVMVICSVASGLSFGHTPTGVMATLCFFRFWLGFGIGGDYPLSATIMSEYANKRTRGAFIAAVFAMQGFGILAGGIVTLVISAAFRAAYPSPAYRDDHFTSTVPQADFVWRVILMLGAAPALLTYYWRMKMPETARYTALVAKNAKQAAADMSKVLQTEIVDEQEKLDAAEGANSFGLFSREFARRHGLHLVGTATTWFLLDIAFYSQNLFQKDIFTSINWIPKANTMSALEEVYRISRAQTLIALCGTVPGYWFTVALIDVVGRFAIQLLGFFMMTVFMLGLAIPYHHWTTPGNHIGFVVMYAFTFFFANFGPNSTTFIVPAEIFPARLRSTCHGISAASGKAGAIIGAFGFLYAAQNQDRSKTDAGYPAGIGVRNSLFVLAASNMLGFVLTFLVPESKGKSLEEMSGEAEDSEEEPVGARAVRPSETQMV

SEQ ID NO: 7069 - DNA, 1448 bp, Zea mays subsp. mays
  misc_feature (1)..(1448): Ceres Seq. ID no. 13494789
  misc_feature (1)..(1448): Ortholog of  Ceres SEQ ID NO 15168525 as cited in SEQ ID NO 58192
gactcagtggcacggggcgcggacgctgccgctcgcgatatttgcgagagagagagagagagagagggcccgagagccgaggacgagtgcagtctggctggcgtgatgctgcttcggagcgcgtcctcgccgctgctcaactgcgggcgcgcgccggctgcggcggcgtcggtcgagncacctcgcggtggtttcgccgttgttatcaccggcagtggcggcgctaggcaggggccggtgctgtgccgcgccatntccgagggggacctcgccgcgccgctcgtgcccaagaaggatnatggacacggganggcgccgaggctatcggcgtccttgtcctcgtccgcctccatcttcgtcgaggaggacggcgagggcgaggaggaggaggaggacctggtcgcggtcgcggtcgcgggggccggcgtggacgtgccgctgccgctgcgtcggctgctgacgaacacggggctggacgtgtccgccgccgcggcgctggcgttcgtggagcagggcgtcggcggcagcggcgggggcgggaaggcgtgcggcagcagcggcggcaagggtggggtcggggacggcgacggtggcagcaaccgcgccgccacggacgcccactaccggcagatgatcgaggcggacccgggcaactcgctgctcctggtcaactacgccaggttcctcaaggaggtggcgggggacgcagcaagggcgcaggagtactgcgagcgcgccatcctcgccagtcccggcgacgccgaggcgctgtcgctctacgcgggcctcgtttgggagaccagccgcgacgctggccgcgccgaggactactacagccgcgccgtccaggccgcacccgacgactgctacgtcctgggntcttacgccgggttcctgtgggacgccgaggaggacgaggaagagaactccgagcccttgccacctccttcgctgttccagggggcagctcagcgtccttccatcacagcggcctcttagatgatcgtgaactcgatctagatctcaccaccgcctgtgaacgaagctgaatctggaaccctggagagtggagagtgactgggagtgggagataaccgtgcagaaacccccgacgagtgactcgcantcgccggccggctcctcgccgcttgtgaactgaatcacggcacatgtaaaactgaatctggcagagcacacacgcgccgcgcctaagcctattagcgtctatagactttgcagggctatgtatagtagatatgtagattgagaccctgctgagcttgtacgtgcagtatgttcctagtcacttgtgtatcattactagtaatgcagtatctctcgcaaaataaacgtcaaaaacccttcctgctgcttcatccgagcagagcatcttccaagaagagcagatatcgaactgcaagaactgatgcactgaatcacaaagcttt

SEQ ID NO: 7070 - protein, 332 aa, Zea mays subsp. mays
  peptide (1)..(332): Ceres Seq. ID no. 13494790
  misc_feature (60)..(60): Xaa is any aa, unknown or other
  misc_feature (85)..(85): Xaa is any aa, unknown or other
  misc_feature (100)..(100): Xaa is any aa, unknown or other
  misc_feature (104)..(104): Xaa is any aa, unknown or other
  misc_feature (293)..(293): Xaa is any aa, unknown or other
DSVARGADAAARDICEREREREGPRAEDECSLAGVMLLRSASSPLLNCGRAPAAAASVEXPRGGFAVVITGSGGARQGPVLCRAXSEGDLAAPLVPKKDXGHGXAPRLSASLSSSASIFVEEDGEGEEEEEDLVAVAVAGAGVDVPLPLRRLLTNTGLDVSAAAALAFVEQGVGGSGGGGKACGSSGGKGGVGDGDGGSNRAATDAHYRQMIEADPGNSLLLVNYARFLKEVAGDAARAQEYCERAILASPGDAEALSLYAGLVWETSRDAGRAEDYYSRAVQAAPDDCYVLXSYAGFLWDAEEDEEENSEPLPPPSLFQGAAQRPSITAAS

SEQ ID NO: 7071 - protein, 297 aa, Zea mays subsp. mays
  peptide (1)..(297): Ceres Seq. ID no. 13494791
  misc_feature (25)..(25): Xaa is any aa, unknown or other
  misc_feature (50)..(50): Xaa is any aa, unknown or other
  misc_feature (65)..(65): Xaa is any aa, unknown or other
  misc_feature (69)..(69): Xaa is any aa, unknown or other
  misc_feature (258)..(258): Xaa is any aa, unknown or other
MLLRSASSPLLNCGRAPAAAASVEXPRGGFAVVITGSGGARQGPVLCRAXSEGDLAAPLVPKKDXGHGXAPRLSASLSSSASIFVEEDGEGEEEEEDLVAVAVAGAGVDVPLPLRRLLTNTGLDVSAAAALAFVEQGVGGSGGGGKACGSSGGKGGVGDGDGGSNRAATDAHYRQMIEADPGNSLLLVNYARFLKEVAGDAARAQEYCERAILASPGDAEALSLYAGLVWETSRDAGRAEDYYSRAVQAAPDDCYVLXSYAGFLWDAEEDEEENSEPLPPPSLFQGAAQRPSITAAS

SEQ ID NO: 7072 - DNA, 1291 bp, Zea mays subsp. mays
  misc_feature (1)..(1291): Ceres Seq. ID no. 12346104
  misc_feature (1)..(1291): Ortholog of  Ceres SEQ ID NO 13581947 as cited in SEQ ID NO 51812
attggcgagcctgcacgcggccttgccctcccaggaagggaggccgaactgagcagttcgaccaggcagccatccacctccaaccccccttcgcctgcgcaaatcgttaccatcccagcgagaaagatggcgcgcgtctccaatgccaagaagcggcagggcgccaagcccgcctccgcgctcagcagcaccgacaccagcaccgccgcaaagaggaaggccgaggacgaccgccccgtgcgcgtctacgccgacggcatcttcgatctcttccacttcggccacgcccgcgccctcgagcaggccaagatgctgttccccaacacctatcttctcgtcggatgctgcaacgacgagctaacctaccgctacaagggcaagaccgtcatgacccaggaagagcgatacgaatccctgcggcactgcaagtgggttgatgaggtcattcctgatgcaccgtgggttctcacacaggagtttattgataagcatcagattgactatgttgctcatgatgcgctgccttatgctgatactagcggaacagcaaatgatgtctatgaatttgttaaaaagattggaaaattcaaggaaacaaaaaggacagacggggtttctacttcagatctcataatgaggatcttgaaggactataaccagtatgtcatgaggaatttagcacggggctactcgaggaaagatcttggtgtgagctatgtcaaggagaaacaattgcaagttaatatgaagatcaataaactgcgggagactgtgaaggcacatcaggaaaagttgcaaacagtggcaaagactgctggtttgaatcatgaagaatggcttgctaatgcggatcgctgggttgctggtttcctagagaagtttgagcaacactgccacaatatggaaactgcgatcaaggatcggatacaggagaggctagggaaacagttgagcaaaggaataatcgctggtcttgtgcaggaaccggtgacagcctaaaacaggtgatgctgtcaatgaaacgcactgatgcttttcagatcatcctcccgatgtggttctggtgcgaggcttgtaagggtgcaacgcggttgctgagacgttttaattttgtggtgcatgtgaactcttcccgtatacaaatgtctataggagaggcgtttggtgttttgggcatcgtcgtgggcgtgtttctttgtatctaacgggttagattaaccttttttttgtatcgagattgatgttctttcgtggttataataataataaataataataatattgtcaaagc

SEQ ID NO: 7073 - protein, 332 aa, Zea mays subsp. mays
  peptide (1)..(332): Ceres Seq. ID no. 12346105
IGEPARGLALPGREAELSSSTRQPSTSNPPSPAQIVTIPARKMARVSNAKKRQGAKPASALSSTDTSTAAKRKAEDDRPVRVYADGIFDLFHFGHARALEQAKMLFPNTYLLVGCCNDELTYRYKGKTVMTQEERYESLRHCKWVDEVIPDAPWVLTQEFIDKHQIDYVAHDALPYADTSGTANDVYEFVKKIGKFKETKRTDGVSTSDLIMRILKDYNQYVMRNLARGYSRKDLGVSYVKEKQLQVNMKINKLRETVKAHQEKLQTVAKTAGLNHEEWLANADRWVAGFLEKFEQHCHNMETAIKDRIQERLGKQLSKGIIAGLVQEPVTA

SEQ ID NO: 7074 - protein, 290 aa, Zea mays subsp. mays
  peptide (1)..(290): Ceres Seq. ID no. 12346106
MARVSNAKKRQGAKPASALSSTDTSTAAKRKAEDDRPVRVYADGIFDLFHFGHARALEQAKMLFPNTYLLVGCCNDELTYRYKGKTVMTQEERYESLRHCKWVDEVIPDAPWVLTQEFIDKHQIDYVAHDALPYADTSGTANDVYEFVKKIGKFKETKRTDGVSTSDLIMRILKDYNQYVMRNLARGYSRKDLGVSYVKEKQLQVNMKINKLRETVKAHQEKLQTVAKTAGLNHEEWLANADRWVAGFLEKFEQHCHNMETAIKDRIQERLGKQLSKGIIAGLVQEPVTA

SEQ ID NO: 7075 - protein, 229 aa, Zea mays subsp. mays
  peptide (1)..(229): Ceres Seq. ID no. 12346107
MLFPNTYLLVGCCNDELTYRYKGKTVMTQEERYESLRHCKWVDEVIPDAPWVLTQEFIDKHQIDYVAHDALPYADTSGTANDVYEFVKKIGKFKETKRTDGVSTSDLIMRILKDYNQYVMRNLARGYSRKDLGVSYVKEKQLQVNMKINKLRETVKAHQEKLQTVAKTAGLNHEEWLANADRWVAGFLEKFEQHCHNMETAIKDRIQERLGKQLSKGIIAGLVQEPVTA

SEQ ID NO: 7076 - DNA, 1600 bp, Zea mays subsp. mays
  misc_feature (1)..(1600): Ceres Seq. ID no. 12566193
  misc_feature (1)..(1600): Ortholog of  Ceres SEQ ID NO 15169515 as cited in SEQ ID NO 60939
  misc_feature (1)..(1600): Ortholog of  Ceres SEQ ID NO 13584665 as cited in SEQ ID NO 65545
acctgttctccacctcgcccccaccttcgtccttctccatctagggttctctctgtttcctcctcatcggaattggagcttcgcatagagtgtccctcgtcatcgccgccggcaccgacgccggcagccatgtccatgctccttatacagaaacaacccctccctctctccgttcgtccccgcacgactctccgccagtgccgtctccccacgactcgattctccgccgccgccgccgactcggctagccgcgctgcccccttcgccgtcgaggactacctcgtcgccgcatgccacctaaccccggcgcaggcgctcaaggcctccaaggtgctctcgcacctcaagtcaccctcccgacccgacgccgtgctagccttcctctcgggcctcggtctctccgacgccgacatcgccgccgccgtcgcctacgaccccaagcttctctgctccgaggtcgagcgcacgctggccccgcgtctcgcggagctccgggatctcggcctctctccgtctcagatcgcccgcctcgcactcgtcgaccccgcgcgcttccgccgccccaccgtcgtctccaagctgcagtattacgtccctctcttcggttccttcgagaacctgctccaggctctcaggaacaacgcctaccttctcagctccgacctcgagcgcgttgtgaagcccaacgtcgcgttcctggtggagtgcgggctagatgcttgtgatattgccaagctgtccatacccgtccctaggctgatcaccaccaacccagaacgcgtccgggcaatggtggagcgagctgaagctgtcggtgtgcctcgtggcactgggatgtttaggcacgcactgctggctgttgcattcctcagcgaggagaagatcaaagctaaggcagagtttttgaagacaacatttcggtggtcggatgctgaggtgggcgttgcggtttccaagctgccattggtgctcaagcactccaaggacaggctgcgccgcatgtcagagttcctgatcaccaaggttgggttggagccagagtacattgctcacaggcctgctctgcttacatatagcttggaacgccgcctcatgccccgacactatgttgtgaattacctgaaggaaaatggattgttggagcaggaccggagctactatactgctgtccagatgagtgagagtgccttcatggataagttcatatgcccctacaaggaagctgcaccaagcctcgccctagattatgctgctgcttgcagaggagaggtgcccactaccttcttggcaaatgtttaacccttcagtgtaaagcaatgttttgacacttagcagtgagctggtaattttgtttctttccttgcctaactgctacatcccgcagctgtgtctttagcaattggctctggtacataagatgtgagccatggttattaccagggctagatttatctttgctctctgttattcaagctgatcaagtattccaatttcacatgtcactgtatggtatggatttagtgggtgagtaccctgtatattgctctgcaactgttatcgatgcaatgtttctgaataaatatgcaggatgcacggttcc

SEQ ID NO: 7077 - protein, 432 aa, Zea mays subsp. mays
  peptide (1)..(432): Ceres Seq. ID no. 12566194
TCSPPRPHLRPSPSRVLSVSSSSELELRIECPSSSPPAPTPAAMSMLLIQKQPLPLSVRPRTTLRQCRLPTTRFSAAAADSASRAAPFAVEDYLVAACHLTPAQALKASKVLSHLKSPSRPDAVLAFLSGLGLSDADIAAAVAYDPKLLCSEVERTLAPRLAELRDLGLSPSQIARLALVDPARFRRPTVVSKLQYYVPLFGSFENLLQALRNNAYLLSSDLERVVKPNVAFLVECGLDACDIAKLSIPVPRLITTNPERVRAMVERAEAVGVPRGTGMFRHALLAVAFLSEEKIKAKAEFLKTTFRWSDAEVGVAVSKLPLVLKHSKDRLRRMSEFLITKVGLEPEYIAHRPALLTYSLERRLMPRHYVVNYLKENGLLEQDRSYYTAVQMSESAFMDKFICPYKEAAPSLALDYAAACRGEVPTTFLANV

SEQ ID NO: 7078 - protein, 389 aa, Zea mays subsp. mays
  peptide (1)..(389): Ceres Seq. ID no. 12566195
MSMLLIQKQPLPLSVRPRTTLRQCRLPTTRFSAAAADSASRAAPFAVEDYLVAACHLTPAQALKASKVLSHLKSPSRPDAVLAFLSGLGLSDADIAAAVAYDPKLLCSEVERTLAPRLAELRDLGLSPSQIARLALVDPARFRRPTVVSKLQYYVPLFGSFENLLQALRNNAYLLSSDLERVVKPNVAFLVECGLDACDIAKLSIPVPRLITTNPERVRAMVERAEAVGVPRGTGMFRHALLAVAFLSEEKIKAKAEFLKTTFRWSDAEVGVAVSKLPLVLKHSKDRLRRMSEFLITKVGLEPEYIAHRPALLTYSLERRLMPRHYVVNYLKENGLLEQDRSYYTAVQMSESAFMDKFICPYKEAAPSLALDYAAACRGEVPTTFLANV

SEQ ID NO: 7079 - protein, 387 aa, Zea mays subsp. mays
  peptide (1)..(387): Ceres Seq. ID no. 12566196
MLLIQKQPLPLSVRPRTTLRQCRLPTTRFSAAAADSASRAAPFAVEDYLVAACHLTPAQALKASKVLSHLKSPSRPDAVLAFLSGLGLSDADIAAAVAYDPKLLCSEVERTLAPRLAELRDLGLSPSQIARLALVDPARFRRPTVVSKLQYYVPLFGSFENLLQALRNNAYLLSSDLERVVKPNVAFLVECGLDACDIAKLSIPVPRLITTNPERVRAMVERAEAVGVPRGTGMFRHALLAVAFLSEEKIKAKAEFLKTTFRWSDAEVGVAVSKLPLVLKHSKDRLRRMSEFLITKVGLEPEYIAHRPALLTYSLERRLMPRHYVVNYLKENGLLEQDRSYYTAVQMSESAFMDKFICPYKEAAPSLALDYAAACRGEVPTTFLANV

SEQ ID NO: 7080 - DNA, 1639 bp, Zea mays subsp. mays
  misc_feature (1)..(1639): Ceres Seq. ID no. 12566830
  misc_feature (1)..(1639): Ortholog of  Ceres SEQ ID NO 13495070 as cited in SEQ ID NO 53216
  misc_feature (1)..(1639): Ortholog of  Ceres SEQ ID NO 15176717 as cited in SEQ ID NO 0
  misc_feature (1)..(1639): Ortholog of  Ceres SEQ ID NO 15179618 as cited in SEQ ID NO 0
gcacgagaccattacctagaacatcctaatcgaaaattcctcctgttcatttcctcctgctcccccctcctccctcccccccccctcctcgccgctcgccgttgaagaggtaggcccacgggccggcgagaatggaggcggcgacgatggcgtggacggcggcggtggtcggggcggggctggtgtactggttcgtctgggtgatgggcgcggcggaggtgaagggcaagcgggcggtggatctcaagatgggatccatcacgcgggacaaggtgcaggacaagtacacgcagtactggtccttcttccgccgccccaaggagacggccaccacggcggcgtcggcggagaaggtgccggccttcgtcgacaccttctacaacctcgtgaccgacatctacgagtgggggtggggccagtccttccacttctccccgtccctccccggccgctcccaccgcgacgccacgcgcgtccacgaggagcgcgtcgccgacctcctcggcgccaggccgggccaccgcctcctggacgtcggctgcggcgtcggcgggcccatgcgcgccatcgccgngcactcgggatccaacgtcgtcggcatcaccatcaacgagtaccaggtgaaccgcgcccgcgcgcacaaccgcaaggccggcctcgactccccgcgctgcgaggtcgtctgcggcaacttcctctccatgccgttcccggacgcctccttcgacggcgcctactccatcgaggccacctgccacgcgcccaggctgcaggacgtgtacggcgaggtctaccgcgtgctcaagccggggggactctacgtctcctacgagtgggtcaccaccccgctgtaccgcgccgaggacccggaccacgtcgagtgcatccacggcatcgagcgcggcgacgcgctaccggggctccgccgccaggacgagatcgcgtccatcgctaaggaggtcgggttcgaggtgctcaaggagcaggacctggcgctgccccccgcgctgccctggtggacgcgcctnaagatgggccgcatcgcctactggcgcaactccctcgtcgtccgcgtgctcaccatgcttccgggtcgcgcccaagggcgtctccgaggtgcacgagatgctgtacgagaccgcgcagcacctcacccgcggcggcgagaccggcatcttcacgcccatgcacatggtgctcctccgcaagcccgccgccgccgcctccaccgaggaggccaactagtgtaagactacacaccgccaccaatcagttactactcgcccaccgcaagggggagaaaatggggagggaggaaaaagatgcaagcagcagcagcaccagaggtaagaagagcaggctaatcggcgacttgaagaagttacaaattgatctattagagaagaagatactactaggaacgattcttctctccgtttactcttttccctgttcgtagctttgagttttaatttttgttttttggtggacggattgttccggggaggtcgaggttgggatctaaatttattttcaatcggtggagatccatctatctatcagcagcagcagcaggagcaaccatgttttctctccaacaatacattggaattgaattcctaacgggcagattggatcc

SEQ ID NO: 7081 - protein, 372 aa, Zea mays subsp. mays
  peptide (1)..(372): Ceres Seq. ID no. 12566831
  misc_feature (148)..(148): Xaa is any aa, unknown or other
  misc_feature (299)..(299): Xaa is any aa, unknown or other
MEAATMAWTAAVVGAGLVYWFVWVMGAAEVKGKRAVDLKMGSITRDKVQDKYTQYWSFFRRPKETATTAASAEKVPAFVDTFYNLVTDIYEWGWGQSFHFSPSLPGRSHRDATRVHEERVADLLGARPGHRLLDVGCGVGGPMRAIAXHSGSNVVGITINEYQVNRARAHNRKAGLDSPRCEVVCGNFLSMPFPDASFDGAYSIEATCHAPRLQDVYGEVYRVLKPGGLYVSYEWVTTPLYRAEDPDHVECIHGIERGDALPGLRRQDEIASIAKEVGFEVLKEQDLALPPALPWWTRXKMGRIAYWRNSLVVRVLTMLPGRAQGRLRGARDAVRDRAAPHPRRRDRHLHAHAHGAPPQARRRRLHRGGQLV

SEQ ID NO: 7082 - protein, 367 aa, Zea mays subsp. mays
  peptide (1)..(367): Ceres Seq. ID no. 12566832
  misc_feature (143)..(143): Xaa is any aa, unknown or other
  misc_feature (294)..(294): Xaa is any aa, unknown or other
MAWTAAVVGAGLVYWFVWVMGAAEVKGKRAVDLKMGSITRDKVQDKYTQYWSFFRRPKETATTAASAEKVPAFVDTFYNLVTDIYEWGWGQSFHFSPSLPGRSHRDATRVHEERVADLLGARPGHRLLDVGCGVGGPMRAIAXHSGSNVVGITINEYQVNRARAHNRKAGLDSPRCEVVCGNFLSMPFPDASFDGAYSIEATCHAPRLQDVYGEVYRVLKPGGLYVSYEWVTTPLYRAEDPDHVECIHGIERGDALPGLRRQDEIASIAKEVGFEVLKEQDLALPPALPWWTRXKMGRIAYWRNSLVVRVLTMLPGRAQGRLRGARDAVRDRAAPHPRRRDRHLHAHAHGAPPQARRRRLHRGGQLV

SEQ ID NO: 7083 - protein, 348 aa, Zea mays subsp. mays
  peptide (1)..(348): Ceres Seq. ID no. 12566833
  misc_feature (124)..(124): Xaa is any aa, unknown or other
  misc_feature (275)..(275): Xaa is any aa, unknown or other
MGAAEVKGKRAVDLKMGSITRDKVQDKYTQYWSFFRRPKETATTAASAEKVPAFVDTFYNLVTDIYEWGWGQSFHFSPSLPGRSHRDATRVHEERVADLLGARPGHRLLDVGCGVGGPMRAIAXHSGSNVVGITINEYQVNRARAHNRKAGLDSPRCEVVCGNFLSMPFPDASFDGAYSIEATCHAPRLQDVYGEVYRVLKPGGLYVSYEWVTTPLYRAEDPDHVECIHGIERGDALPGLRRQDEIASIAKEVGFEVLKEQDLALPPALPWWTRXKMGRIAYWRNSLVVRVLTMLPGRAQGRLRGARDAVRDRAAPHPRRRDRHLHAHAHGAPPQARRRRLHRGGQLV

SEQ ID NO: 7084 - DNA, 1899 bp, Zea mays subsp. mays
  misc_feature (1)..(1899): Ceres Seq. ID no. 12358625
  misc_feature (1)..(1899): Ortholog of  Ceres SEQ ID NO 14314404 as cited in SEQ ID NO 57421
  misc_feature (1)..(1899): Ortholog of  Ceres SEQ ID NO 13493536 as cited in SEQ ID NO 58515
  misc_feature (1)..(1899): Ortholog of  Ceres SEQ ID NO 15225741 as cited in SEQ ID NO 59606
  misc_feature (1)..(1899): Ortholog of  Ceres SEQ ID NO 12618461 as cited in SEQ ID NO 64349
ctccaccgcgcccacttcttatactgccagcgtctgctccctctcgcggaggcctcgctctggttggaaggtttggagaaactccccggctcgaggagatcgtgacattgagaggacgatgggagggcgcgcgctcctcctcctcctcctggtctcggcgttggtctttcagatccacgcctccgacccgctgctgtacgagccgttcgatgaggactttgaggggagatgggtcgtctccaagaaggatgaataccaaggtgtgtggaggcatgccaagagtgatggtcatgaggactatggcctccttgttagtgagaaggcaaggaaatacgccataatcaaggagcttgatgagccagttaccttgaaggatgggacagtggtcctgcagtttgaagtgagacttcagaatggccttgaatgcggaggtgcctacattaagtacatccgccctcaggatgctggatgggatgccaaggagtttgataatgagactccatacactattatgtttggtccagataagtgtggatcaaccaacaaggttcatttcatccttaagcacaagaatcctaagactggaaagtatgttgagcatcatctcaaattcccaccatctgtcccatatgacaagctctctcatgtctacacggctatcttgaagccagacaatgaggtcaaaattttggtagatggggaagaaaagaagaaggcgaacttcctttctgctgatgattttgagccagcacttatcccatccaagaccattcctgaccctgatgacaagaagccggaggactgggatgagagagctaaaattcctgatccagatgcagtaaagcctgatgactgggatgaggatgccccgatggaaattgtggatgatgaagccaccaagcctgagggatggttggatgatgaacctgaggagattgatgatcctgaggcagccaagcctgaggactgggacgatgaggaggatggtgaatgggaggcgccaaagattgacaaccccaagtgtgaagaggcacctggatgtggcgagtggaagaggccaatgaagcagaatcctgcttacaagggcaagtggcatgcacctatgattgacaaccccaactacaagggaatctggaagcctcaggagatccccaaccctgagtactttgagcttgacaagcctgactttgatccaattgctgctattgggattgagatctggacaatgcaggatggcatcctgtttgacaatatcttgattgctgacgatgagaaggttgccacctccattctggagaagacctggaagcccaagtatgatgttgagaaggaaaaggagaaggctgaggaggaggctgctgctggtgcagatggtctttctgagttccagaagaagatttttgacgtcctgtacaagattgctgatgttccgttcttggcaccctacaaaaccaagatcattgatgttatcgagaagggagagaagcagcccaacatcactattggcattctggtctccgttgtcgtcgtgttcgttaccgttctcttcaagatcctgtttggaggcaagaagccggtggcacctgtgaaacctgcagctgaggcgaagaagcccaaggccacagtgaccgacggtgctggaagcagtggcgacaaggatgagaaagaggacgaaaaggaggagacagcaggcccacgtcggaggacccgaagggagacatagagacctatttttgatgtgtttggatgttctggcgcctgcttattttgaggactcttaatatttctgagtgtataataggaacttgtgtcacctctgcggcttccctgctgcttatttgtttttacatggttagaccaggaaccttcacgagctgtagaatttagttcttgttggct

SEQ ID NO: 7085 - protein, 573 aa, Zea mays subsp. mays
  peptide (1)..(573): Ceres Seq. ID no. 12358626
STAPTSYTASVCSLSRRPRSGWKVWRNSPARGDRDIERTMGGRALLLLLLVSALVFQIHASDPLLYEPFDEDFEGRWVVSKKDEYQGVWRHAKSDGHEDYGLLVSEKARKYAIIKELDEPVTLKDGTVVLQFEVRLQNGLECGGAYIKYIRPQDAGWDAKEFDNETPYTIMFGPDKCGSTNKVHFILKHKNPKTGKYVEHHLKFPPSVPYDKLSHVYTAILKPDNEVKILVDGEEKKKANFLSADDFEPALIPSKTIPDPDDKKPEDWDERAKIPDPDAVKPDDWDEDAPMEIVDDEATKPEGWLDDEPEEIDDPEAAKPEDWDDEEDGEWEAPKIDNPKCEEAPGCGEWKRPMKQNPAYKGKWHAPMIDNPNYKGIWKPQEIPNPEYFELDKPDFDPIAAIGIEIWTMQDGILFDNILIADDEKVATSILEKTWKPKYDVEKEKEKAEEEAAAGADGLSEFQKKIFDVLYKIADVPFLAPYKTKIIDVIEKGEKQPNITIGILVSVVVVFVTVLFKILFGGKKPVAPVKPAAEAKKPKATVTDGAGSSGDKDEKEDEKEETAGPRRRTRRET

SEQ ID NO: 7086 - protein, 534 aa, Zea mays subsp. mays
  peptide (1)..(534): Ceres Seq. ID no. 12358627
MGGRALLLLLLVSALVFQIHASDPLLYEPFDEDFEGRWVVSKKDEYQGVWRHAKSDGHEDYGLLVSEKARKYAIIKELDEPVTLKDGTVVLQFEVRLQNGLECGGAYIKYIRPQDAGWDAKEFDNETPYTIMFGPDKCGSTNKVHFILKHKNPKTGKYVEHHLKFPPSVPYDKLSHVYTAILKPDNEVKILVDGEEKKKANFLSADDFEPALIPSKTIPDPDDKKPEDWDERAKIPDPDAVKPDDWDEDAPMEIVDDEATKPEGWLDDEPEEIDDPEAAKPEDWDDEEDGEWEAPKIDNPKCEEAPGCGEWKRPMKQNPAYKGKWHAPMIDNPNYKGIWKPQEIPNPEYFELDKPDFDPIAAIGIEIWTMQDGILFDNILIADDEKVATSILEKTWKPKYDVEKEKEKAEEEAAAGADGLSEFQKKIFDVLYKIADVPFLAPYKTKIIDVIEKGEKQPNITIGILVSVVVVFVTVLFKILFGGKKPVAPVKPAAEAKKPKATVTDGAGSSGDKDEKEDEKEETAGPRRRTRRET

SEQ ID NO: 7087 - protein, 403 aa, Zea mays subsp. mays
  peptide (1)..(403): Ceres Seq. ID no. 12358628
MFGPDKCGSTNKVHFILKHKNPKTGKYVEHHLKFPPSVPYDKLSHVYTAILKPDNEVKILVDGEEKKKANFLSADDFEPALIPSKTIPDPDDKKPEDWDERAKIPDPDAVKPDDWDEDAPMEIVDDEATKPEGWLDDEPEEIDDPEAAKPEDWDDEEDGEWEAPKIDNPKCEEAPGCGEWKRPMKQNPAYKGKWHAPMIDNPNYKGIWKPQEIPNPEYFELDKPDFDPIAAIGIEIWTMQDGILFDNILIADDEKVATSILEKTWKPKYDVEKEKEKAEEEAAAGADGLSEFQKKIFDVLYKIADVPFLAPYKTKIIDVIEKGEKQPNITIGILVSVVVVFVTVLFKILFGGKKPVAPVKPAAEAKKPKATVTDGAGSSGDKDEKEDEKEETAGPRRRTRRET

SEQ ID NO: 7088 - DNA, 1676 bp, Zea mays subsp. mays
  misc_feature (1)..(1676): Ceres Seq. ID no. 12344231
  misc_feature (1)..(1676): Ortholog of  Ceres SEQ ID NO 14315455 as cited in SEQ ID NO 56988
aggcgatgagcgcctctcgcgacgccagggcggagagctagccggccggagcccacacgcagctggaagcaccagatcaccgatcgtgccggccgagcggcggcgcaggcgcacaggcgcttacatgggagtagaggcgggcgggtgcgggcggagggcggtcgtcaccgggttctacgtctggggctgggagttcctcaccgccctccttctcttctcggccgccgtcgccgccgcagactcctactagcaagctacctaccttctttctttcattcccttaggtagctcagccgtacacacaacagcacacaagtcatcagttactagctagttagtagcctatacaacacatacatatatacatacaaaggtgagtgaggttcgcgtgcaagcagagccaatcgtgccgatcgagctatatacatagccggcggcgagagatgggagaagcggcctcggccgtggcggcgtcgaagaggggcggcggcgggccggcgccgttcctgaccaagacgcaccagatggtggaggagcggggcacggacgaggtgatctcgtgggcggagcagggccgctccttcgtggtgtggaagcccgttgagctggcgcgcgacctcctcccgctccacttcaagcactgcaacttctcctccttcgtccgccagctcaacacctacggtttccggaaggtggtgccggaccggtgggagttcgcgaacgacaacttccgtcgaggcgagcagggtctcctgtccggcatccgccgccgcaagtcaacggcgctgcagatgtccaagtccggatccggcggcagcggcggcgtgaacgccacgttccccccgcctctgccccctccacctcccgcgtcggccaccacgtccggcgtccacgagcgcagctcgtcgtcggcgtcgtcgccaccgcgggcgcccgacctggccagcgagaacgagcagctcaagaaggacaaccacacgctgtccgtcgagctggcgcaggcgcgccggcactgcgaggagctcctgggcttcctctcgcgcttcctcgacgtccggcagctcgacctccggctgctcatgcaggaggacgtgcgagcgggggcaagcgacgacggcgcacagcgccgcgcgcacgcagtggccagccagctggagcgcggcggcggcgaggaggggaagagcgtgaagctgttcggcgtactcttaaaggacgccgcgaggaagaggggccggtgcgaggaagcggcggccagcgagcggcccatcaagatgatcagggtcggcgagccgtgggtcggcgtcccgtcgtcgggcccgggccggtgcggcggcgagaattaactgtcatccaatgtgaggttgatgacaaggacagtttcatccatcatatcgagcaagtaacaaagccagtgctgtggtaaaactgcaaagacagaacacaggacacaggagaaatataggcgtaaggcatgttaattaagaattaattatatatgggatgcttttgaagtagcaagattggaagtagagataagtaaaacgggctagaagcagcgcccatgtgttcagaatggaaaattagcgtttccgtgtgtgtgttaagaaaaacttatatgcgctttctgcgagcacggttgattcttaagagcgacagcaaatgaaaggtgtattatt

SEQ ID NO: 7089 - protein, 299 aa, Zea mays subsp. mays
  peptide (1)..(299): Ceres Seq. ID no. 12344232
MGEAASAVAASKRGGGGPAPFLTKTHQMVEERGTDEVISWAEQGRSFVVWKPVELARDLLPLHFKHCNFSSFVRQLNTYGFRKVVPDRWEFANDNFRRGEQGLLSGIRRRKSTALQMSKSGSGGSGGVNATFPPPLPPPPPASATTSGVHERSSSSASSPPRAPDLASENEQLKKDNHTLSVELAQARRHCEELLGFLSRFLDVRQLDLRLLMQEDVRAGASDDGAQRRAHAVASQLERGGGEEGKSVKLFGVLLKDAARKRGRCEEAAASERPIKMIRVGEPWVGVPSSGPGRCGGEN

SEQ ID NO: 7090 - protein, 272 aa, Zea mays subsp. mays
  peptide (1)..(272): Ceres Seq. ID no. 12344233
MVEERGTDEVISWAEQGRSFVVWKPVELARDLLPLHFKHCNFSSFVRQLNTYGFRKVVPDRWEFANDNFRRGEQGLLSGIRRRKSTALQMSKSGSGGSGGVNATFPPPLPPPPPASATTSGVHERSSSSASSPPRAPDLASENEQLKKDNHTLSVELAQARRHCEELLGFLSRFLDVRQLDLRLLMQEDVRAGASDDGAQRRAHAVASQLERGGGEEGKSVKLFGVLLKDAARKRGRCEEAAASERPIKMIRVGEPWVGVPSSGPGRCGGEN

SEQ ID NO: 7091 - protein, 183 aa, Zea mays subsp. mays
  peptide (1)..(183): Ceres Seq. ID no. 12344234
MSKSGSGGSGGVNATFPPPLPPPPPASATTSGVHERSSSSASSPPRAPDLASENEQLKKDNHTLSVELAQARRHCEELLGFLSRFLDVRQLDLRLLMQEDVRAGASDDGAQRRAHAVASQLERGGGEEGKSVKLFGVLLKDAARKRGRCEEAAASERPIKMIRVGEPWVGVPSSGPGRCGGEN

SEQ ID NO: 7092 - DNA, 732 bp, Zea mays subsp. mays
  misc_feature (1)..(732): Ceres Seq. ID no. 12379156
  misc_feature (1)..(732): Ortholog of  Ceres SEQ ID NO 15172800 as cited in SEQ ID NO 60137
ggactgaggtgctcagctgacgccggtcgcctcgcagtggcaagtgcccgagcgatgcagcagataatcagcgcctgcaagctgcctcacacgcaacgggccgccgcgctcctgccgcagaggccatcgctcaggcgccttccagtcccaggaggtgcgccgccgccgcggcgattggtagtcaggaggagatgccaggaagaggataagcagcagcaagaggccgaggagggaagcggccctgacgagcaggagcaggagcagcagaagcgaacgttcctgagcctggaggaggccgggctggtggagatgtccggcctcagcacgcacgagcgtttcctctgccgcctcaccatatcgtctctgaacctgctgagagtgatctcggagcaggagggcgtcccgatagaggagctcaacgccggggcgcgtctgcgactggttcctcaaggacaagctcaagagagagcagaacgtcggcaccgccgtcttgcagtgggacgaccctgggcttctagctagttccagcttcgttctgagccaatgatcatgctattctacactgcagcgcacgcaggggctatatatttcagggcttcaggcccttcacgggatgagcaaccaatgccacattccatttatatatatctttcggtttggtttcatctttacaaattttctgtagcgacgaacatttttcctgtgcggaaaatgggaaaggaatttacgggc

SEQ ID NO: 7093 - protein, 173 aa, Zea mays subsp. mays
  peptide (1)..(173): Ceres Seq. ID no. 12379157
GLRCSADAGRLAVASARAMQQIISACKLPHTQRAAALLPQRPSLRRLPVPGGAPPPRRLVVRRRCQEEDKQQQEAEEGSGPDEQEQEQQKRTFLSLEEAGLVEMSGLSTHERFLCRLTISSLNLLRVISEQEGVPIEELNAGARLRLVPQGQAQERAERRHRRLAVGRPWASS

SEQ ID NO: 7094 - protein, 155 aa, Zea mays subsp. mays
  peptide (1)..(155): Ceres Seq. ID no. 12379158
MQQIISACKLPHTQRAAALLPQRPSLRRLPVPGGAPPPRRLVVRRRCQEEDKQQQEAEEGSGPDEQEQEQQKRTFLSLEEAGLVEMSGLSTHERFLCRLTISSLNLLRVISEQEGVPIEELNAGARLRLVPQGQAQERAERRHRRLAVGRPWASS

SEQ ID NO: 7095 - DNA, 840 bp, Zea mays subsp. mays
  misc_feature (1)..(840): Ceres Seq. ID no. 12341781
  misc_feature (1)..(840): Ortholog of  Ceres SEQ ID NO 13594705 as cited in SEQ ID NO 52034
aagcacttcccgagaaaaggaagacagagaaggaaactgcagtgaagtcgccggcgccgccgcgacaggaggaaggagcagcagcggcaggggaggcccggcgatctcttctgctgcgtgcggcgagggagtaaaaggagccgcgacaggatgcactcctttgggcaccgcgccaacgcggtggcaacgttcgcggtcaccatactggccgcgatttgcttcgccgcctccttctccgacaacttcaacaccccaacacccactgcctccgttaagatcttgaatctaaactggttccagaaggaggccaacggcaacgacgaggttagcatgacgctgaacatttcggccgacctttcgtctcttttcacgtggaacacaaaacaggtgtttgtttttgtggcagcagagtatgagactccacagaatgctttgaatcaagtttccctttgggatggcattatacctgcaaaggagcatgccaagtttttgatccataccacaaacaagtacagatttattgaccagggaagcaatctaaagggcaaggaattcaacttgacaatgcactggcacattatgccaaagactggcaaaatgtttgcagataagatagtaatgacaggctatcgtctccctgagctatacagatagtcagatagatcatggacaggactaagtggcctgcaagaagtgttagtggcagtggcataattgatcctgagcgttttgttctaatctaagtggagcatgtaaccttataagcttgtacttaagctgaaccaggcaaaacaaagttgtaatttgagaggatatgtatggttcaattttgatttgcct

SEQ ID NO: 7096 - protein, 167 aa, Zea mays subsp. mays
  peptide (1)..(167): Ceres Seq. ID no. 12341782
MHSFGHRANAVATFAVTILAAICFAASFSDNFNTPTPTASVKILNLNWFQKEANGNDEVSMTLNISADLSSLFTWNTKQVFVFVAAEYETPQNALNQVSLWDGIIPAKEHAKFLIHTTNKYRFIDQGSNLKGKEFNLTMHWHIMPKTGKMFADKIVMTGYRLPELYR

SEQ ID NO: 7097 - protein, 107 aa, Zea mays subsp. mays
  peptide (1)..(107): Ceres Seq. ID no. 12341783
MTLNISADLSSLFTWNTKQVFVFVAAEYETPQNALNQVSLWDGIIPAKEHAKFLIHTTNKYRFIDQGSNLKGKEFNLTMHWHIMPKTGKMFADKIVMTGYRLPELYR

SEQ ID NO: 7098 - protein, 93 aa, Zea mays subsp. mays
  peptide (1)..(93): Ceres Seq. ID no. 12341784
STSREKEDREGNCSEVAGAAATGGRSSSGRGGPAISSAACGEGVKGAATGCTPLGTAPTRWQRSRSPYWPRFASPPPSPTTSTPQHPLPPLRS

SEQ ID NO: 7099 - DNA, 1035 bp, Zea mays subsp. mays
  misc_feature (1)..(1035): Ceres Seq. ID no. 12386576
  misc_feature (1)..(1035): Ortholog of  Ceres SEQ ID NO 14303381 as cited in SEQ ID NO 53959
aggcctccgcagtccgcacacccctcctgtgctttgagattcgcgcgtcgcgcctgccgacctcgtgcctcccgcggactcgccggcgaacgcctcttggagatgccgcccgccgcggcggcgctcctccggtgcgctccggcggtcccattcgcggcccgcagtagcgctgtttcccgctcaggcatggcgcggcgtctggtggcagcgagcgctgcggccggcaggctggcaccggcgtaccgcgggctgctgctcgacgccggtggcacgctgctgcaggttgcgcggccggtagccgagacgtatgcctccatcggccgacgttacggtgtgacgaagactaagaagagaatcatggaggggttcaagcgggcattctccgcgccatggccgaagacactcaggtaccagggagatgggcggccattctggagaattgtcgtggcagaagcgaccgactgcactgatggtgattatttcgaagaagtgtatcagtattatgcgcatggagatgcttggcgattgcctactggagcagacgcagcactgcgtgagctgaaggatgctggagttaagctcgctgttgtatctaacttcgataccaggctacggaaattgcttaaagaccttaatgtctccgagatgtttgatgccattgtggtgtcatccgaggtcggatatgagaaaccttccccagagatcttcaatatagcattggatcaaattggcgtggaagccagcaaggcaatccatgttggagacgatgaaactgcagacatggcaggtgccaatgctacaggacttgagtgctggctgtggggtaaggatgtgacgacgttttcggaaatacaggagcggattctgacaacagatgatcctcaatgagtgaatttggaatgttgcaaaaaatgatagttgtttcttttttccctcagttccttctttttggtttccttccaactcgtgtgttggcattttcattgtgctttcgtgaaataagctcatgccatggctaggtactgatgttccttc

SEQ ID NO: 7100 - protein, 295 aa, Zea mays subsp. mays
  peptide (1)..(295): Ceres Seq. ID no. 12386577
RPPQSAHPSCALRFARRACRPRASRGLAGERLLEMPPAAAALLRCAPAVPFAARSSAVSRSGMARRLVAASAAAGRLAPAYRGLLLDAGGTLLQVARPVAETYASIGRRYGVTKTKKRIMEGFKRAFSAPWPKTLRYQGDGRPFWRIVVAEATDCTDGDYFEEVYQYYAHGDAWRLPTGADAALRELKDAGVKLAVVSNFDTRLRKLLKDLNVSEMFDAIVVSSEVGYEKPSPEIFNIALDQIGVEASKAIHVGDDETADMAGANATGLECWLWGKDVTTFSEIQERILTTDDPQ

SEQ ID NO: 7101 - protein, 261 aa, Zea mays subsp. mays
  peptide (1)..(261): Ceres Seq. ID no. 12386578
MPPAAAALLRCAPAVPFAARSSAVSRSGMARRLVAASAAAGRLAPAYRGLLLDAGGTLLQVARPVAETYASIGRRYGVTKTKKRIMEGFKRAFSAPWPKTLRYQGDGRPFWRIVVAEATDCTDGDYFEEVYQYYAHGDAWRLPTGADAALRELKDAGVKLAVVSNFDTRLRKLLKDLNVSEMFDAIVVSSEVGYEKPSPEIFNIALDQIGVEASKAIHVGDDETADMAGANATGLECWLWGKDVTTFSEIQERILTTDDPQ

SEQ ID NO: 7102 - protein, 233 aa, Zea mays subsp. mays
  peptide (1)..(233): Ceres Seq. ID no. 12386579
MARRLVAASAAAGRLAPAYRGLLLDAGGTLLQVARPVAETYASIGRRYGVTKTKKRIMEGFKRAFSAPWPKTLRYQGDGRPFWRIVVAEATDCTDGDYFEEVYQYYAHGDAWRLPTGADAALRELKDAGVKLAVVSNFDTRLRKLLKDLNVSEMFDAIVVSSEVGYEKPSPEIFNIALDQIGVEASKAIHVGDDETADMAGANATGLECWLWGKDVTTFSEIQERILTTDDPQ

SEQ ID NO: 7103 - DNA, 763 bp, Zea mays subsp. mays
  misc_feature (1)..(763): Ceres Seq. ID no. 12401201
  misc_feature (1)..(763): Ortholog of  Ceres SEQ ID NO 12585325 as cited in SEQ ID NO 63062
cattttcctcttctgacctccggcagcaccatggagaacgtcgccgcgaatccttccgctgcggccgccgccgcagggaatggcgtccaagcatcgggggccggaggggagcgcccggaggacgcgtcgaagcagaacctggcgcaggtgacgagctcgatccagaagacgctgggcctgctccaccagctcaacctcaccgtctcctccttcaactctgcctcccagcttcccctcctccagcgcctgaacgcgctcgtggcggagctcgacacgatgcagaaactagccgagggttgtaacatccaggtgccaatggaggtcgtcaatttgatcgacgatgggaagaaccccgacgagtttactagggatgtgctcaacagctgcattgccaagaaccagatcaccaagggcaagactgacgctttcaagagcctacggaagcatctccttgaggagcttgaacaagctttccctgaggacgtagaagcatacagggagatccgtgctacttctgctgctgaggcaaagcggttggctcagtcccatggcaatttgcttaatggagatgtcaaagtgaaagctgagcattgactgaagggtacgactacagagggcaagtttactatctctgtttagtttggggatggctttgttaacgtgaaacgtgcatatctttctagcgcactttcccttcatgtgattgatccgtgaatctgtacatattaatatattatcataacatgtgtggcaattttaatcc

SEQ ID NO: 7104 - protein, 197 aa, Zea mays subsp. mays
  peptide (1)..(197): Ceres Seq. ID no. 12401202
HFPLLTSGSTMENVAANPSAAAAAAGNGVQASGAGGERPEDASKQNLAQVTSSIQKTLGLLHQLNLTVSSFNSASQLPLLQRLNALVAELDTMQKLAEGCNIQVPMEVVNLIDDGKNPDEFTRDVLNSCIAKNQITKGKTDAFKSLRKHLLEELEQAFPEDVEAYREIRATSAAEAKRLAQSHGNLLNGDVKVKAEH

SEQ ID NO: 7105 - protein, 187 aa, Zea mays subsp. mays
  peptide (1)..(187): Ceres Seq. ID no. 12401203
MENVAANPSAAAAAAGNGVQASGAGGERPEDASKQNLAQVTSSIQKTLGLLHQLNLTVSSFNSASQLPLLQRLNALVAELDTMQKLAEGCNIQVPMEVVNLIDDGKNPDEFTRDVLNSCIAKNQITKGKTDAFKSLRKHLLEELEQAFPEDVEAYREIRATSAAEAKRLAQSHGNLLNGDVKVKAEH

SEQ ID NO: 7106 - protein, 105 aa, Zea mays subsp. mays
  peptide (1)..(105): Ceres Seq. ID no. 12401204
MQKLAEGCNIQVPMEVVNLIDDGKNPDEFTRDVLNSCIAKNQITKGKTDAFKSLRKHLLEELEQAFPEDVEAYREIRATSAAEAKRLAQSHGNLLNGDVKVKAEH

SEQ ID NO: 7107 - DNA, 1427 bp, Zea mays subsp. mays
  misc_feature (1)..(1427): Ceres Seq. ID no. 12365626
  misc_feature (1)..(1427): Ortholog of  Ceres SEQ ID NO 14301538 as cited in SEQ ID NO 62856
acaaccggcccccaaggccctctgtaggtgttcaattcctgccactccccgcttccactttggcatcttgctcgcaccggggcaaggcaatggcgccgccgcgtcgctacctggccgcgttgctcgccctgctatgcgcgtgcaccaccacgacggcgccggcgggctccgtcgtcgcggccgcgaacgtaccgatcactacgtgccggtcgttctgcggcaacatcacggtggactacccgttcgcgctgcacgaggggtgcggccacgcggggctgcgggacctgctcttctgcatcaacggcgcgctgatgctccacctcccctcgggctcctaccgcgtggtcgacgtcgactacgcgtaccggggcctgaccctgcacgacccggccatgtccgactgccgcgcgctggacctcgccccggctgggcggggcaacggcttcgtcatcgagccgtggcgggagccgtacctgtcgccggactcggacaacgtgttcctcctcctgggctgccgcgccacctcgccgctgttccagggcttccccgaccgccacctcccctgccggaacgtgtctgggatggggtgcggcgactacctcggctgcctcgcctgggacgactactacgccggcggaggcgggcggcggggcccgtcgtcgggcgacgccgcggggcaaccgcccgagtgctgcgcgctgccctggggtgccatccgggcggtgaacgtcagccggctcgagtgcgaggggtacagcagcgcgtacagcctcgcgcccgtgcgcgccgagggcgccgccgcgggctgggcgtacgggatccgggtgtcgtggacgctgcccgagtccaaccgcggattctgcggcgcgtgccgcgccacgggcggggcgtgtggccatgacacggagagccacgccgacctgtgcctctgcggggactggaactccacctccaactgcgactcctcggccgacgccagcacggtcggtcgccgccacgctgcccgctgtcgccgcgcttcgctgggccatcctcgcctcaggattgacgtcactatggtactacgcgtcgacgacatcaaatatgtgatggacggtggattcatgctgtgatcgacaactgcccttcaaacaacagtacacaccacctagagaaagacgatgcgtttcaggagcttgaaacgatcgaatttcagaacccacgatcactatccatactggtttatgtttacaatcactcgtaatggacaaaaggccaaagacgatcatgtttgttgtagcaaggatatttttcccgtttggatgtatccctttatgtcaacagactcgtttggatgtgagttttgtcgcacattagtagctgcacgatgttgtacgggtcagtcggctgtatactgacgatggtttgatggttgatggacatatggc

SEQ ID NO: 7108 - protein, 369 aa, Zea mays subsp. mays
  peptide (1)..(369): Ceres Seq. ID no. 12365627
NRPPRPSVGVQFLPLPASTLASCSHRGKAMAPPRRYLAALLALLCACTTTTAPAGSVVAAANVPITTCRSFCGNITVDYPFALHEGCGHAGLRDLLFCINGALMLHLPSGSYRVVDVDYAYRGLTLHDPAMSDCRALDLAPAGRGNGFVIEPWREPYLSPDSDNVFLLLGCRATSPLFQGFPDRHLPCRNVSGMGCGDYLGCLAWDDYYAGGGGRRGPSSGDAAGQPPECCALPWGAIRAVNVSRLECEGYSSAYSLAPVRAEGAAAGWAYGIRVSWTLPESNRGFCGACRATGGACGHDTESHADLCLCGDWNSTSNCDSSADASTVGRRHAARCRRASLGHPRLRIDVTMVLRVDDIKYVMDGGFML

SEQ ID NO: 7109 - protein, 340 aa, Zea mays subsp. mays
  peptide (1)..(340): Ceres Seq. ID no. 12365628
MAPPRRYLAALLALLCACTTTTAPAGSVVAAANVPITTCRSFCGNITVDYPFALHEGCGHAGLRDLLFCINGALMLHLPSGSYRVVDVDYAYRGLTLHDPAMSDCRALDLAPAGRGNGFVIEPWREPYLSPDSDNVFLLLGCRATSPLFQGFPDRHLPCRNVSGMGCGDYLGCLAWDDYYAGGGGRRGPSSGDAAGQPPECCALPWGAIRAVNVSRLECEGYSSAYSLAPVRAEGAAAGWAYGIRVSWTLPESNRGFCGACRATGGACGHDTESHADLCLCGDWNSTSNCDSSADASTVGRRHAARCRRASLGHPRLRIDVTMVLRVDDIKYVMDGGFML

SEQ ID NO: 7110 - protein, 299 aa, Zea mays subsp. mays
  peptide (1)..(299): Ceres Seq. ID no. 12365629
QPAPKALCRCSIPATPRFHFGILLAPGQGNGAAASLPGRVARPAMRVHHHDGAGGLRRRGRERTDHYVPVVLRQHHGGLPVRAARGVRPRGAAGPALLHQRRADAPPPLGLLPRGRRRLRVPGPDPARPGHVRLPRAGPRPGWAGQRLRHRAVAGAVPVAGLGQRVPPPGLPRHLAAVPGLPRPPPPLPERVWDGVRRLPRLPRLGRLLRRRRRAAGPVVGRRRGATARVLRAALGCHPGGERQPARVRGVQQRVQPRARARRGRRRGLGVRDPGVVDAARVQPRILRRVPRHGRGVWP

SEQ ID NO: 7111 - DNA, 1186 bp, Zea mays subsp. mays
  misc_feature (1)..(1186): Ceres Seq. ID no. 12408921
  misc_feature (1)..(1186): Ortholog of  Ceres SEQ ID NO 12472003 as cited in SEQ ID NO 143
ctcttcttctcgcgcagcatcgcctcccaagtccacaaaccacaacttacgccgccgctcgctccaccgcgcaagagtctgctgctgccgctcacccacccccgctcgcgcagaaggccgccgcagctctcactactggtgccctaaacgccgatatccctcttcgcctccctttccccacccaaaaccccggccttcagggttccggcaccatgccgcagggagatcacatcgagctgcaccagaagcgccatggcaagcgcctggaccacgaagagcgcaagcgcaagcgcgaggcccgcgaggtgcacaggcgctcgaaggatgcccgcaatttgattggtgctaagggcaagaggttcgccaagaaacgctatgctgagaaggcacagatgaagaagaccctgaaaatgcacgacgaatcaaataaacgacagaaggttgatgatgatgtccaagagggtgctcttcctccgtatctgctggatcgtgatcagacacagcgcgctaaggttctcagcaacacaataaagcaaaagaggaaggaaaaggctggcaaatgggatgttcctctgccaaaggtcaggcctgtagctgaagaagaaatgttcaaggttctacgaactggcaagcgaaaaaccaagcagtggaagagaatggttactaaagccacctttgttggagctggatttacaaggaaaccaccaaagtatgaacggttcattcggccaactggtctgcgtttcaccaaagctcatgtgactcacccagagctgaagtgcactttcaaccttgacataatttctgtgaagaaaaacccaaatggtccaatgtacacttctcttggtgttatgacaaggggaacgatcattgaggtaaatgtcagtgagcttggtctggtaactcccgctggaaaagttgtttgggggaaatatgctcaagttacaaacaacccggagaacgatggctgtatcaatgcagttttgctagtgtagagccatagtgagattttgttgatggtggttaatcgtcccatttgtatctgctccgatatgctattttttgaccatgtcatggctaatcccagtagtttgttgtgcaccatgggcataatgagcattctgtattctcgctgtgtgctacaaacatatatggagtaatataaattagcagtatttttttcgcg

SEQ ID NO: 7112 - protein, 330 aa, Zea mays subsp. mays
  peptide (1)..(330): Ceres Seq. ID no. 12408922
LLLAQHRLPSPQTTTYAAARSTAQESAAAAHPPPLAQKAAAALTTGALNADIPLRLPFPTQNPGLQGSGTMPQGDHIELHQKRHGKRLDHEERKRKREAREVHRRSKDARNLIGAKGKRFAKKRYAEKAQMKKTLKMHDESNKRQKVDDDVQEGALPPYLLDRDQTQRAKVLSNTIKQKRKEKAGKWDVPLPKVRPVAEEEMFKVLRTGKRKTKQWKRMVTKATFVGAGFTRKPPKYERFIRPTGLRFTKAHVTHPELKCTFNLDIISVKKNPNGPMYTSLGVMTRGTIIEVNVSELGLVTPAGKVVWGKYAQVTNNPENDGCINAVLLV

SEQ ID NO: 7113 - protein, 260 aa, Zea mays subsp. mays
  peptide (1)..(260): Ceres Seq. ID no. 12408923
MPQGDHIELHQKRHGKRLDHEERKRKREAREVHRRSKDARNLIGAKGKRFAKKRYAEKAQMKKTLKMHDESNKRQKVDDDVQEGALPPYLLDRDQTQRAKVLSNTIKQKRKEKAGKWDVPLPKVRPVAEEEMFKVLRTGKRKTKQWKRMVTKATFVGAGFTRKPPKYERFIRPTGLRFTKAHVTHPELKCTFNLDIISVKKNPNGPMYTSLGVMTRGTIIEVNVSELGLVTPAGKVVWGKYAQVTNNPENDGCINAVLLV

SEQ ID NO: 7114 - protein, 200 aa, Zea mays subsp. mays
  peptide (1)..(200): Ceres Seq. ID no. 12408924
MKKTLKMHDESNKRQKVDDDVQEGALPPYLLDRDQTQRAKVLSNTIKQKRKEKAGKWDVPLPKVRPVAEEEMFKVLRTGKRKTKQWKRMVTKATFVGAGFTRKPPKYERFIRPTGLRFTKAHVTHPELKCTFNLDIISVKKNPNGPMYTSLGVMTRGTIIEVNVSELGLVTPAGKVVWGKYAQVTNNPENDGCINAVLLV

SEQ ID NO: 7115 - DNA, 1319 bp, Zea mays subsp. mays
  misc_feature (1)..(1319): Ceres Seq. ID no. 12435002
  misc_feature (1)..(1319): Ortholog of  Ceres SEQ ID NO 14307288 as cited in SEQ ID NO 54318
agcgccaccgccgttcgcctcctctccacactccgccagatcccatccctctcgcccaccgcgcgggtatcggagtcggagcatggcgtctgcagtggtggtggacgccggcgacgcgccggagcccacggttcgtaacctcctggaccaggagtccctcaagtgggtcttcgtcggcgggaagggcggcgtcggcaagactacctgcagctccatcctctccgtcctcctcgccggggtccgcccgtccgtgctcgtcatctccaccgaccccgcgcacaacctcagcgacgccttccagcagcgcttcaccaagttccccactctcgtccgcggattcaccaacctctacgccatggaaattgacccaaaggtagaaaatgatgatttatccaatgaaggaatggaaggattcctgtcagaactgacaaatgcgattccaggagtagatgaagctatgagttttgctgaaatgctaaaattagtccaaacaatggattactctgttgttgtttttgatactgctcctacagggcatacattacggttgcttcagttcccagcaaccctagagaagggtcttgagaaaatgatggagttgaaaaatagatttggcggtctgttgaatcaggccagtcgcttgtttggtcttggtgatgagctgaacgaggatgcaatgcttgggaaacttgagggtatgaaggatgtgatcgaacaagtgaacaggcaatttaaagatccagacttgacaacttttgtatgtgtttgtatcccggaatttctttcattgtatgaaacagaaagattggtgcaagagttagcgaagtttgagattgattcacacaatattattattaatcaagttatatttgatgaggaagctgtcgagtcaaaactgctaaaagcacggatgaaaatgcaacaaaaatacattgatcagttccatatgttatacgatgacttcaacatcaccaagcttcccttgctttcagaagaggtttgtggtgttcaagctctccaaaacttttcccagcacttccttacaccatacaagtctactcttaaaaggggcaccgtcgaggagctcgaacagagaataactatattaaaatctgcactgcaagaagctgagacagagttagatagggttaggaaagggaagcagtcagtgtgattttttttccacaggtcaagtgtgtaaaaccagagagacgatcaattttttcgtgtcattacactcttgttgatttcactatcatgtttcctcatcgaggagtttagacttgtaatagctatcggtagagaagtgtttgattcac

SEQ ID NO: 7116 - protein, 390 aa, Zea mays subsp. mays
  peptide (1)..(390): Ceres Seq. ID no. 12435003
APPPFASSPHSARSHPSRPPRGYRSRSMASAVVVDAGDAPEPTVRNLLDQESLKWVFVGGKGGVGKTTCSSILSVLLAGVRPSVLVISTDPAHNLSDAFQQRFTKFPTLVRGFTNLYAMEIDPKVENDDLSNEGMEGFLSELTNAIPGVDEAMSFAEMLKLVQTMDYSVVVFDTAPTGHTLRLLQFPATLEKGLEKMMELKNRFGGLLNQASRLFGLGDELNEDAMLGKLEGMKDVIEQVNRQFKDPDLTTFVCVCIPEFLSLYETERLVQELAKFEIDSHNIIINQVIFDEEAVESKLLKARMKMQQKYIDQFHMLYDDFNITKLPLLSEEVCGVQALQNFSQHFLTPYKSTLKRGTVEELEQRITILKSALQEAETELDRVRKGKQSV

SEQ ID NO: 7117 - protein, 363 aa, Zea mays subsp. mays
  peptide (1)..(363): Ceres Seq. ID no. 12435004
MASAVVVDAGDAPEPTVRNLLDQESLKWVFVGGKGGVGKTTCSSILSVLLAGVRPSVLVISTDPAHNLSDAFQQRFTKFPTLVRGFTNLYAMEIDPKVENDDLSNEGMEGFLSELTNAIPGVDEAMSFAEMLKLVQTMDYSVVVFDTAPTGHTLRLLQFPATLEKGLEKMMELKNRFGGLLNQASRLFGLGDELNEDAMLGKLEGMKDVIEQVNRQFKDPDLTTFVCVCIPEFLSLYETERLVQELAKFEIDSHNIIINQVIFDEEAVESKLLKARMKMQQKYIDQFHMLYDDFNITKLPLLSEEVCGVQALQNFSQHFLTPYKSTLKRGTVEELEQRITILKSALQEAETELDRVRKGKQSV

SEQ ID NO: 7118 - protein, 272 aa, Zea mays subsp. mays
  peptide (1)..(272): Ceres Seq. ID no. 12435005
MEIDPKVENDDLSNEGMEGFLSELTNAIPGVDEAMSFAEMLKLVQTMDYSVVVFDTAPTGHTLRLLQFPATLEKGLEKMMELKNRFGGLLNQASRLFGLGDELNEDAMLGKLEGMKDVIEQVNRQFKDPDLTTFVCVCIPEFLSLYETERLVQELAKFEIDSHNIIINQVIFDEEAVESKLLKARMKMQQKYIDQFHMLYDDFNITKLPLLSEEVCGVQALQNFSQHFLTPYKSTLKRGTVEELEQRITILKSALQEAETELDRVRKGKQSV

SEQ ID NO: 7119 - DNA, 1153 bp, Zea mays subsp. mays
  misc_feature (1)..(1153): Ceres Seq. ID no. 12408917
  misc_feature (1)..(1153): Ortholog of  Ceres SEQ ID NO 13589868 as cited in SEQ ID NO 55521
  misc_feature (1)..(1153): Ortholog of  Ceres SEQ ID NO 14312250 as cited in SEQ ID NO 59168
  misc_feature (1)..(1153): Ortholog of  Ceres SEQ ID NO 15173326 as cited in SEQ ID NO 63793
  misc_feature (1)..(1153): Ortholog of  Ceres SEQ ID NO 12617659 as cited in SEQ ID NO 65286
  misc_feature (1)..(1153): Ortholog of  Ceres SEQ ID NO 12780566 as cited in SEQ ID NO 65822
  misc_feature (1)..(1153): Ortholog of  Ceres SEQ ID NO 15179979 as cited in SEQ ID NO 0
gaccaaccccacccactggaccggcccgcgcccgcttggtccagcgccggccctgcctgcagccagccaccgttgtccgttccctcccgcgatccactcctctcgagctctaggggacggaaggaatccggcgggggtggggtgcgagcagggggagggagaagagcagccgcccgccccgcgagggggcaacagctgcccaagaacctgaccggaagagttgtgggagcggcggcggaaagatggggcaggccctgcgcaggctcttcgactccttcttctccaccagggagatgagggttgtgatgcttggtctggatgcagctggtaaaacaacaatactgtacaggcttcacatgggagaggttctttcaacagtccctacagtcggttttaatgtcgagaaggttcagtataagaatgtggcattcactgtgtgggatgtgggtgggcaagaaaaactcaggtcactgtggaagatgtacctgagtaattctgatgcactgatctatgtcgttgattctctggacagagaaaggatcagagacgcgaggcaagagttccagaccattatcaaggaccctttgatggcaaacagcataatcttggtatttgcaaacaaacaggacctgagaggcacgatgagcacggacgaggtcagcgaagggctggggctgcacgacctcaggaacaggatctggcacatacaggggacctgcgcgctccgcggcgagggcctctacgacgggctcgactggcttgcgtccaccctgaagcagctgcaagaatcgggccacgcgacttcggtcgctggcccttccatctgatccagcgcaagtgagctcagtgcctcagccaactgacagcaagcccacaagaatatgctccagcgcgagcgcattcctttggtgggtgtggctgcccgctggtggtggtggagttccttcggtcggtgttgccgtgttggtatcatatgagccagttgttcatccggcagggactcgcgtacttttttttctctcctgagattgtttgtaaattgttgaacggatgcaatgccggcgatgttgatcttgtgtgctggtggtgcacgtggttgttttgtctacttttttttacaataaaaaagagatcgtctgcggttctggtgatt

SEQ ID NO: 7120 - protein, 194 aa, Zea mays subsp. mays
  peptide (1)..(194): Ceres Seq. ID no. 12408918
MGQALRRLFDSFFSTREMRVVMLGLDAAGKTTILYRLHMGEVLSTVPTVGFNVEKVQYKNVAFTVWDVGGQEKLRSLWKMYLSNSDALIYVVDSLDRERIRDARQEFQTIIKDPLMANSIILVFANKQDLRGTMSTDEVSEGLGLHDLRNRIWHIQGTCALRGEGLYDGLDWLASTLKQLQESGHATSVAGPSI

SEQ ID NO: 7121 - protein, 177 aa, Zea mays subsp. mays
  peptide (1)..(177): Ceres Seq. ID no. 12408919
MRVVMLGLDAAGKTTILYRLHMGEVLSTVPTVGFNVEKVQYKNVAFTVWDVGGQEKLRSLWKMYLSNSDALIYVVDSLDRERIRDARQEFQTIIKDPLMANSIILVFANKQDLRGTMSTDEVSEGLGLHDLRNRIWHIQGTCALRGEGLYDGLDWLASTLKQLQESGHATSVAGPSI

SEQ ID NO: 7122 - protein, 173 aa, Zea mays subsp. mays
  peptide (1)..(173): Ceres Seq. ID no. 12408920
MLGLDAAGKTTILYRLHMGEVLSTVPTVGFNVEKVQYKNVAFTVWDVGGQEKLRSLWKMYLSNSDALIYVVDSLDRERIRDARQEFQTIIKDPLMANSIILVFANKQDLRGTMSTDEVSEGLGLHDLRNRIWHIQGTCALRGEGLYDGLDWLASTLKQLQESGHATSVAGPSI

SEQ ID NO: 7123 - DNA, 1315 bp, Zea mays subsp. mays
  misc_feature (1)..(1315): Ceres Seq. ID no. 12408914
  misc_feature (1)..(1315): Ortholog of  Ceres SEQ ID NO 13594037 as cited in SEQ ID NO 55666
  misc_feature (1)..(1315): Ortholog of  Ceres SEQ ID NO 15171501 as cited in SEQ ID NO 58322
gtatagccagcggttgacctggcttcttcacatacactattatacgtacattgatatatacgaaccgtcctggttcttgcaccaccgccgcaccgattcgcgcgaaagcgaactccgtgccttagggccgaatcatcaccgtcgtccgatcgatccgggaccgggactcgggaagcatgttgttaaatggcgacagcaggcgggccgcggcgacagcagcagcgctgctggctctcgccgcctgcttctgcgcagctactggagacggggatatggcgggcctgcggccgctcgtcctcgtggttgaccagtccggcaagggcgaccacaggaggattcaggacgccatcgatgcggcgccggcgagcaaccgctccgccggcggccgcggcagcgtcgtcatccggatcaagcccggagtgtacagagagaaagtggtggtggacaagccttgcataactctcgtcggcgcgaccgccgccagctcgaccgtcgtcatcacctggaacgagtcctgggtcgccgccgacagcccgacagtctccgtgctggcctccgacttcgtcgcgaagcgcatagcgttccagaacacgttcgggactagcgggccggcggtcgccgtgagggtggccggagacagggcggcgttctacgggtgcaggttcacgtcgttccaggacacgctcctggacgacacgggtcgccactactaccgtggctgctacgtccagggaggcaccgacttcgtcttcggcaatggcaaggctctgttcgataagtgccacctccactccgtctcgccggccggcggcgcgttcacggcgcacagacggtcgtcggagtcggaggacactgggttcagcttcgtcgggtgcaagctgacggggctcggggccggcacgtccgtcctcgggagaccctggggtccctactcccgcgtcgtctttgcgctcagctacatgtccggcacggtgaggccccagggctggggacgactgggagcgactcctccagacagagcaggagcaggacagcgttctacgggcagtaccagtgctacggggaaggctccagaactgacgggagagttgcgtggtctcacgacctgtcgcaggctgaagccgcgccgttcatcaccaaagtttgggtcgggggacaggagtggcttcggtaggaaacactagctagctgtgtgtgctctgtttggttcgtcaacagtgacgctgggaataataagctagagctgcagacgcgttatggccggttggtgccgagaatacgcttgccctgaaaaaggcgagcaatgcaagcaatg

SEQ ID NO: 7124 - protein, 335 aa, Zea mays subsp. mays
  peptide (1)..(335): Ceres Seq. ID no. 12408915
MLLNGDSRRAAATAAALLALAACFCAATGDGDMAGLRPLVLVVDQSGKGDHRRIQDAIDAAPASNRSAGGRGSVVIRIKPGVYREKVVVDKPCITLVGATAASSTVVITWNESWVAADSPTVSVLASDFVAKRIAFQNTFGTSGPAVAVRVAGDRAAFYGCRFTSFQDTLLDDTGRHYYRGCYVQGGTDFVFGNGKALFDKCHLHSVSPAGGAFTAHRRSSESEDTGFSFVGCKLTGLGAGTSVLGRPWGPYSRVVFALSYMSGTVRPQGWGRLGATPPDRAGAGQRSTGSTSATGKAPELTGELRGLTTCRRLKPRRSSPKFGSGDRSGFGRKH

SEQ ID NO: 7125 - protein, 303 aa, Zea mays subsp. mays
  peptide (1)..(303): Ceres Seq. ID no. 12408916
MAGLRPLVLVVDQSGKGDHRRIQDAIDAAPASNRSAGGRGSVVIRIKPGVYREKVVVDKPCITLVGATAASSTVVITWNESWVAADSPTVSVLASDFVAKRIAFQNTFGTSGPAVAVRVAGDRAAFYGCRFTSFQDTLLDDTGRHYYRGCYVQGGTDFVFGNGKALFDKCHLHSVSPAGGAFTAHRRSSESEDTGFSFVGCKLTGLGAGTSVLGRPWGPYSRVVFALSYMSGTVRPQGWGRLGATPPDRAGAGQRSTGSTSATGKAPELTGELRGLTTCRRLKPRRSSPKFGSGDRSGFGRKH

SEQ ID NO: 7126 - DNA, 1037 bp, Zea mays subsp. mays
  misc_feature (1)..(1037): Ceres Seq. ID no. 12357350
  misc_feature (1)..(1037): Ortholog of  Ceres SEQ ID NO 13494980 as cited in SEQ ID NO 51049
ccccgttcccctcgtcgacacctgcagtgccaagttgcatcgactcctccccggtcctccaccgcccgccgccgatggatgtggatgtggacgaggccaccgccacccctgcctccgcctctgccaagcccgcttccaacggcgaggccccctccggcgcccgcgaggtggatgtcggcgaggagtacacgctcgccggcgttctgcgcagcttcgtcgacggcgtctggtacccggacgagccgctgctccggcggctccgggcggcgtcctgcgaggccgcgccgcggctgaagggggcgtctcggaactcagcgcgggatctgctcgagtggacaaggcagggcagcggcctccgcgccatcctcgtcatctcggtcgggacaatcatgcctatagcattgactggccttttaatcttcatgttctttctgctaattgccactgctaatgcgatcatcgtctcagccctgatgtcactggccgctgctggcggattcttggctatcttctttgcttgcttggttgcagtgtatattggagcagtaggagttgctatctttgccatttctgccattgtcatctcatcagttgttggagttatgattactactggttgggttgggttcttctggatgatctggttcaccgcaaggaagagcatggacctgacgaagcattccatcagcatgacgagctcggcagtccaatcctattccgcgtcccgccaagtgaagcagaagcatgtcgactgaggctagttggttgcgtcttgcgtcctgtatgaagaagccctcgggtcgatctgggtgaattacggtagacgacatgcttgttttggcagttctgtttttcacggacactaggtgcataaatactagctctgaacttcggcagcgtgtacgtttgtcacggcggccaatgctgttctgtatggtatagtgatcagatgattgtacattgtgcaggtatgcagtatgtacatgccgattcatgagttgataataaaactatcactatattttttttccttttcc

SEQ ID NO: 7127 - protein, 250 aa, Zea mays subsp. mays
  peptide (1)..(250): Ceres Seq. ID no. 12357351
PFPSSTPAVPSCIDSSPVLHRPPPMDVDVDEATATPASASAKPASNGEAPSGAREVDVGEEYTLAGVLRSFVDGVWYPDEPLLRRLRAASCEAAPRLKGASRNSARDLLEWTRQGSGLRAILVISVGTIMPIALTGLLIFMFFLLIATANAIIVSALMSLAAAGGFLAIFFACLVAVYIGAVGVAIFAISAIVISSVVGVMITTGWVGFFWMIWFTARKSMDLTKHSISMTSSAVQSYSASRQVKQKHVD

SEQ ID NO: 7128 - protein, 226 aa, Zea mays subsp. mays
  peptide (1)..(226): Ceres Seq. ID no. 12357352
MDVDVDEATATPASASAKPASNGEAPSGAREVDVGEEYTLAGVLRSFVDGVWYPDEPLLRRLRAASCEAAPRLKGASRNSARDLLEWTRQGSGLRAILVISVGTIMPIALTGLLIFMFFLLIATANAIIVSALMSLAAAGGFLAIFFACLVAVYIGAVGVAIFAISAIVISSVVGVMITTGWVGFFWMIWFTARKSMDLTKHSISMTSSAVQSYSASRQVKQKHVD

SEQ ID NO: 7129 - protein, 149 aa, Zea mays subsp. mays
  peptide (1)..(149): Ceres Seq. ID no. 12357353
PVPLVDTCSAKLHRLLPGPPPPAADGCGCGRGHRHPCLRLCQARFQRRGPLRRPRGGCRRGVHARRRSAQLRRRRLVPGRAAAPAAPGGVLRGRAAAEGGVSELSAGSARVDKAGQRPPRHPRHLGRDNHAYSIDWPFNLHVLSANCHC

SEQ ID NO: 7130 - DNA, 990 bp, Zea mays subsp. mays
  misc_feature (1)..(990): Ceres Seq. ID no. 12350350
  misc_feature (1)..(990): Ortholog of  Ceres SEQ ID NO 12609177 as cited in SEQ ID NO 55753
  misc_feature (1)..(990): Ortholog of  Ceres SEQ ID NO 12609935 as cited in SEQ ID NO 55757
  misc_feature (1)..(990): Ortholog of  Ceres SEQ ID NO 13594206 as cited in SEQ ID NO 59075
  misc_feature (1)..(990): Ortholog of  Ceres SEQ ID NO 13654038 as cited in SEQ ID NO 69261
  misc_feature (1)..(990): Ortholog of  Ceres SEQ ID NO 14309346 as cited in SEQ ID NO 0
aaaaatcgaatcgagcccatccatctccatttccgccgccgccgccgccgagagaccccaaccccacccatccaccaccatgtggcgccgcctccacaccctagcccccgccttgcgcagggctaccgccgccgccgccggggcccctgcggcgtccgcctcctctgcagcccgcgccgccccgctctcctcggcggccgccgctttccgccgcaccagcccgctcctctcaggggacaagccggcgagtgtggaggacgtcatgcccatcgccacggggctcgagcgggaggagctggaggccgagctcaaggggaagaagcggtttgacatggatcccctggtcggccccttcggtaccaaggaggaaccatctgtagttgagtcctactataacaagcggatagtcggctgccctggtggtgagggagaggatgaacacgatgttgtatggttctggttgaaaaaagatgagccgcatgagtgtccagtctgctcgcaatactttgtgcttaaggtcattggtgatggtggtgatccagatggtcatgacgatgaagatgatggacatcactaaggatgccttgtggttctgaaaataagaatttggtgaggcagatgaatccaatacacttctttttctagaaccagactgctccacggcatccttgtttatgaaaagacagttggccatcaagcaggtggtagttttcacctaggtattttgtccaaacaaaagctgtttgagatttgacccttgcgtttctttaagagcatcgtcgaataaaagatgactgcagtcagattgctttcttttgatacctcatattggcccatcgggtgtgatggacatgtaatattcagtaatggaacagccccatttctatgcttagcgtgctgggaattttgcaaaaggcctcctatatcattgacgagttttaagccagagtttgatgatccaacatgtttatgaccattgttttaatagcc

SEQ ID NO: 7131 - protein, 191 aa, Zea mays subsp. mays
  peptide (1)..(191): Ceres Seq. ID no. 12350351
KIESSPSISISAAAAAERPQPHPSTTMWRRLHTLAPALRRATAAAAGAPAASASSAARAAPLSSAAAAFRRTSPLLSGDKPASVEDVMPIATGLEREELEAELKGKKRFDMDPLVGPFGTKEEPSVVESYYNKRIVGCPGGEGEDEHDVVWFWLKKDEPHECPVCSQYFVLKVIGDGGDPDGHDDEDDGHH

SEQ ID NO: 7132 - protein, 165 aa, Zea mays subsp. mays
  peptide (1)..(165): Ceres Seq. ID no. 12350352
MWRRLHTLAPALRRATAAAAGAPAASASSAARAAPLSSAAAAFRRTSPLLSGDKPASVEDVMPIATGLEREELEAELKGKKRFDMDPLVGPFGTKEEPSVVESYYNKRIVGCPGGEGEDEHDVVWFWLKKDEPHECPVCSQYFVLKVIGDGGDPDGHDDEDDGHH

SEQ ID NO: 7133 - protein, 109 aa, Zea mays subsp. mays
  peptide (1)..(109): Ceres Seq. ID no. 12350353
KNRIEPIHLHFRRRRRRETPTPPIHHHVAPPPHPSPRLAQGYRRRRRGPCGVRLLCSPRRPALLGGRRFPPHQPAPLRGQAGECGGRHAHRHGARAGGAGGRAQGEEAV

SEQ ID NO: 7134 - DNA, 1706 bp, Zea mays subsp. mays
  misc_feature (1)..(1706): Ceres Seq. ID no. 13498597
  misc_feature (1)..(1706): Ortholog of  Ceres SEQ ID NO 13590904 as cited in SEQ ID NO 66072
agccagacgcagaccccctgcctgttgccctgtcgcagtctagcatcaggcatccatcggcgagagcgagagcgagagcgtttcgcagcaagcctacctcacctcaccttgcctgcctgtctgtctgtctccagagctgctcttgtccggagacggagccgactgaacatggccggagacccgggggacgcgccggaggtgggaggcggcggcatacgctccgtgctcaccacggcctcgctcgtcgctccctccggggacgaggttcagtttcgggagatcgacggcaagatcatcggcctctacttcgcggcaaactggtatccgaaatgcgaggctttcaccccggtgctggccgcggcgtacgagcagctcaaggagcgcggcgccggcttcgaggtcgtgctggtgtcgtgcgacgaggaccggccgtcgttcgagcggttccacggaaccatgccgtggccagcggtgcctttcggcgacctcagctgcaagaagcgcctcagcgagaggttccaggtggagggcatcccgcgcctggtggtgctcgctccggacggcggcgcggtggtacacccggacgccgccgacctcgtgcaccgctacggcgagagggcgttcccgttcacggccgcgagggtggcggagctggaggcggatgaccagcgcaagtacgcgtcccagacgctggagaagctcttctccgtcagcgggaaagagtacgtgatgaacagtggtaataatgaaaaggttccggtctcgagcctggtggggaagacggtggggctctacttctcggctaaccattgcgcgccgtgtatcaagttcacgacgaagctggcggccatctacagcagcctcaggggcaaggcggaggacttcgagatcgtgtacgtccccatggacagggaggaggacgggtacctgcgctcctgcggcgacatgccgtggctggcgctcccctacgacggcgcgccgtcgcgcgcgctggcgaggtacttcgacgtgcgggagatcccgacgctggtggtggtcgggcccgacggcaggacggtgacgcgggacggccggaacctggtgaacctctacttcgacatggccttcccgttcacggacgcgcagatcaggctgctgcaggaggcggaggacgaggcggccaaggagtacccgcggtcgctgcgccaccggggccaccgccacgagctcagcatcgtgtcggagaagtccgggggagggccctacatctgctgcgagtgcgaggagcagggactcggctgggcgtaccagtgcatcgcctgcggctacgagatacacctcaggtgcggccagaatgcggagggcggcagcgcaggaactgcttagctagctaggcgacggcagcataacagcatcactggagtactggtgtctacctactagactgctgcatgcgtattggacttgtgcatggtctgtgtttgatcccaacaaacgtcagcttgctaagtctgatgctaaagtagtcaaatagatagatgagaaatgcatggccttccttgtaaggcttagtaggtggttagatgagtgaacaacaaaatgaagctgcagcaatcaatctactgtggcaggtgttatgcaaatcttgctgcactgcccaaccaaactactgcattttccagtgcgccttcttcgagcctaatttgacaccactgaaattaggcttt

SEQ ID NO: 7135 - protein, 454 aa, Zea mays subsp. mays
  peptide (1)..(454): Ceres Seq. ID no. 13498598
SQTQTPCLLPCRSLASGIHRRERERERFAASLPHLTLPACLSVSRAALVRRRSRLNMAGDPGDAPEVGGGGIRSVLTTASLVAPSGDEVQFREIDGKIIGLYFAANWYPKCEAFTPVLAAAYEQLKERGAGFEVVLVSCDEDRPSFERFHGTMPWPAVPFGDLSCKKRLSERFQVEGIPRLVVLAPDGGAVVHPDAADLVHRYGERAFPFTAARVAELEADDQRKYASQTLEKLFSVSGKEYVMNSGNNEKVPVSSLVGKTVGLYFSANHCAPCIKFTTKLAAIYSSLRGKAEDFEIVYVPMDREEDGYLRSCGDMPWLALPYDGAPSRALARYFDVREIPTLVVVGPDGRTVTRDGRNLVNLYFDMAFPFTDAQIRLLQEAEDEAAKEYPRSLRHRGHRHELSIVSEKSGGGPYICCECEEQGLGWAYQCIACGYEIHLRCGQNAEGGSAGTA

SEQ ID NO: 7136 - protein, 398 aa, Zea mays subsp. mays
  peptide (1)..(398): Ceres Seq. ID no. 13498599
MAGDPGDAPEVGGGGIRSVLTTASLVAPSGDEVQFREIDGKIIGLYFAANWYPKCEAFTPVLAAAYEQLKERGAGFEVVLVSCDEDRPSFERFHGTMPWPAVPFGDLSCKKRLSERFQVEGIPRLVVLAPDGGAVVHPDAADLVHRYGERAFPFTAARVAELEADDQRKYASQTLEKLFSVSGKEYVMNSGNNEKVPVSSLVGKTVGLYFSANHCAPCIKFTTKLAAIYSSLRGKAEDFEIVYVPMDREEDGYLRSCGDMPWLALPYDGAPSRALARYFDVREIPTLVVVGPDGRTVTRDGRNLVNLYFDMAFPFTDAQIRLLQEAEDEAAKEYPRSLRHRGHRHELSIVSEKSGGGPYICCECEEQGLGWAYQCIACGYEIHLRCGQNAEGGSAGTA

SEQ ID NO: 7137 - protein, 302 aa, Zea mays subsp. mays
  peptide (1)..(302): Ceres Seq. ID no. 13498600
MPWPAVPFGDLSCKKRLSERFQVEGIPRLVVLAPDGGAVVHPDAADLVHRYGERAFPFTAARVAELEADDQRKYASQTLEKLFSVSGKEYVMNSGNNEKVPVSSLVGKTVGLYFSANHCAPCIKFTTKLAAIYSSLRGKAEDFEIVYVPMDREEDGYLRSCGDMPWLALPYDGAPSRALARYFDVREIPTLVVVGPDGRTVTRDGRNLVNLYFDMAFPFTDAQIRLLQEAEDEAAKEYPRSLRHRGHRHELSIVSEKSGGGPYICCECEEQGLGWAYQCIACGYEIHLRCGQNAEGGSAGTA

SEQ ID NO: 7138 - DNA, 929 bp, Zea mays subsp. mays
  misc_feature (1)..(929): Ceres Seq. ID no. 12345359
  misc_feature (1)..(929): Ortholog of  Ceres SEQ ID NO 12609339 as cited in SEQ ID NO 51780
atactcaaggcaaggaattaggagcagaccggagacttgggggcttcacctgctgtatctcattaccatctgcatctggttgcccgttgattgagaaggaggagctgagggccatggcgaccgagaagcccatcctgtacaacgcctggatcagctcctgctcccaccgtgttcgcatcgcactcaacctcaaaggtgtggattacgagtacaagtcggtaaaccctaggacagatccagattatgaaaaaatcaatccaatcaaatatattccagcattagtagatggggacatagtcgtttctgattctcttgccatctcattgtatttggaagataagtatcctgagcatccactcctgcctaaagatctcaagaggaaagctcttaatcttcagattgcaaacattgtttgttcaagcattcaacctcttcaaggctatgctgttattggtctgcacgagggtaggatgagcccagatgagggccttcatattgttcaaagttatattgacaagggattcagagcgatcgaaaagctgttggaaggatgtgagagtaaatatgctactggagatgatgtccaattggcagatgtgttccttgaaccacagatacatgccggcataaatcgcttccaaatcgatatgtcgatgtacccaatcttggagaggctccatgatgcatacatgcaaattcccgcattccaagccgcgcttcctaaaaatcaaccagacgcaccttcatcataatcatcaagattatctcaataatttgcatgtcattttgtaataatttggatagggagccactgcttcctccatcccgttgtggatcaaaagggtgaacgattggcacttacctgcatggtccaatacctattatatttcttaaacagatactatttacggctattgtaatttaagccc

SEQ ID NO: 7139 - protein, 249 aa, Zea mays subsp. mays
  peptide (1)..(249): Ceres Seq. ID no. 12345360
TQGKELGADRRLGGFTCCISLPSASGCPLIEKEELRAMATEKPILYNAWISSCSHRVRIALNLKGVDYEYKSVNPRTDPDYEKINPIKYIPALVDGDIVVSDSLAISLYLEDKYPEHPLLPKDLKRKALNLQIANIVCSSIQPLQGYAVIGLHEGRMSPDEGLHIVQSYIDKGFRAIEKLLEGCESKYATGDDVQLADVFLEPQIHAGINRFQIDMSMYPILERLHDAYMQIPAFQAALPKNQPDAPSS

SEQ ID NO: 7140 - protein, 212 aa, Zea mays subsp. mays
  peptide (1)..(212): Ceres Seq. ID no. 12345361
MATEKPILYNAWISSCSHRVRIALNLKGVDYEYKSVNPRTDPDYEKINPIKYIPALVDGDIVVSDSLAISLYLEDKYPEHPLLPKDLKRKALNLQIANIVCSSIQPLQGYAVIGLHEGRMSPDEGLHIVQSYIDKGFRAIEKLLEGCESKYATGDDVQLADVFLEPQIHAGINRFQIDMSMYPILERLHDAYMQIPAFQAALPKNQPDAPSS

SEQ ID NO: 7141 - DNA, 994 bp, Zea mays subsp. mays
  misc_feature (1)..(994): Ceres Seq. ID no. 12435085
  misc_feature (1)..(994): Ortholog of  Ceres SEQ ID NO 14316436 as cited in SEQ ID NO 59213
atctacacacgccgttcccaagtcccaaccgaacacacacagcaacagcggccacctgccgctcagtgcgtgcgccgtgccatgaccatgaagctcgatgccccggcgaggcagaagagccaggacgcagagcagaacggcaggacagcggccgcgggcgtcctcggcattgacgagccgtggagccagccgaaactccgtctcaccggccacgcgcaggccgacgccgacgccctggtgccgccgctcaacttcgccatggtcgacgacggcatcttccgctcgggcctcccggacgccggcagcttccgcttcctgctctccctcaatctgcgctccgtcgtgtacctgtgcccggagccgtacccggaggagaacgcgcggttcctgcagcagaacgggatccagcttcaccagttcggcatcgaagggagcaagagtggttcgacagtgccggatgccatggtggtgcaggaaccattcgtctacatccctgaagagaccatccgagaggcgctcaaagttattcttgacgcaagaaaccagccggtgctcatccactgcaagagaggcaagcatcgcactggctgcgtcgtcgggtgcctgaggaagctgcagaagtggtgcctgtcttcggtgttcgacgagtacctgcacttcgcggcggcgaaggcgaggagcactgaccagaggttcatggagctgttcgacgcttcgagcttgacgcacctggcggcctcacagtattgagcgctgaccagagcgagtggctcccgaccggtcccgatcctgcaaccatgctgcatcaagcaagcgattttcccctgctgtttccgaagcaactcggccgagaataatgctgctggaaccatgagtgtgtccgcgagaattgataggcaatggccttaggttttgttgtgtgagtgctgtggttgcttcgtgtgcaactgatttcagattctgaattggtgatggctgtgattggtgatggccg

SEQ ID NO: 7142 - protein, 249 aa, Zea mays subsp. mays
  peptide (1)..(249): Ceres Seq. ID no. 12435086
IYTRRSQVPTEHTQQQRPPAAQCVRRAMTMKLDAPARQKSQDAEQNGRTAAAGVLGIDEPWSQPKLRLTGHAQADADALVPPLNFAMVDDGIFRSGLPDAGSFRFLLSLNLRSVVYLCPEPYPEENARFLQQNGIQLHQFGIEGSKSGSTVPDAMVVQEPFVYIPEETIREALKVILDARNQPVLIHCKRGKHRTGCVVGCLRKLQKWCLSSVFDEYLHFAAAKARSTDQRFMELFDASSLTHLAASQY

SEQ ID NO: 7143 - protein, 222 aa, Zea mays subsp. mays
  peptide (1)..(222): Ceres Seq. ID no. 12435087
MTMKLDAPARQKSQDAEQNGRTAAAGVLGIDEPWSQPKLRLTGHAQADADALVPPLNFAMVDDGIFRSGLPDAGSFRFLLSLNLRSVVYLCPEPYPEENARFLQQNGIQLHQFGIEGSKSGSTVPDAMVVQEPFVYIPEETIREALKVILDARNQPVLIHCKRGKHRTGCVVGCLRKLQKWCLSSVFDEYLHFAAAKARSTDQRFMELFDASSLTHLAASQY

SEQ ID NO: 7144 - protein, 220 aa, Zea mays subsp. mays
  peptide (1)..(220): Ceres Seq. ID no. 12435088
MKLDAPARQKSQDAEQNGRTAAAGVLGIDEPWSQPKLRLTGHAQADADALVPPLNFAMVDDGIFRSGLPDAGSFRFLLSLNLRSVVYLCPEPYPEENARFLQQNGIQLHQFGIEGSKSGSTVPDAMVVQEPFVYIPEETIREALKVILDARNQPVLIHCKRGKHRTGCVVGCLRKLQKWCLSSVFDEYLHFAAAKARSTDQRFMELFDASSLTHLAASQY

SEQ ID NO: 7145 - DNA, 1453 bp, Zea mays subsp. mays
  misc_feature (1)..(1453): Ceres Seq. ID no. 12407236
  misc_feature (1)..(1453): Ortholog of  Ceres SEQ ID NO 15173795 as cited in SEQ ID NO 61763
gcacgagaccattacctagaacatcctaatcgaaaaaagaaacattgagaacaacgagctgccctctctgcctgcagctacacgcactggaatcatcgtgcggcgcagcgagcgagaggagtggagaggatgacggcgcccaagcctggcgggggagcggcggccgcggcgagggcggcggcggcggggcccaggacggtgctcatcacgggggtcagcagggggctgggccgggccctggcgctcgagctcgcgcgtcgcgggcactcggtggtcggctgcggccgctccgccgagcacctccgctcccttgaggaagagatcacgtcgccatcgcgccacttcttcaccgtcgccgacgttaggtctgacagcagtgtggccgagctggcaaagactgttgtagaaaagaagcaagttccagatattatagtaaacaacgctggtacgataaacaagaataacaagacatggaatgttccagcggaagattttgatatggtggtcgatacaaatatcaagggaacagcaaatgtgcttcgccattttgtaccacttatgatagagaagagacatgggattataatcaatctatcctctggttggggaagatctgctgctgcagaggttgctccatattgtgcttcgaagtgggcgattgagggcttgacacgctcgttagctaaagagctacctcctggattggcagccattgctcttagccctggtgttgtgaatactgacatgcttaattcatgctttggaagctctgccgcattatatcaaacaactgaaacatgggcacccaaggcagctacaatgatactaagcctttcactggacgataacggtgcttccttgactgtatgaagtcgtgaaattctgtgctcaactgattgctgatgggttatcttcatctcttgtagcctgatgtgtagatttttgcgagattatggtgatgtaaaatagtactgataatgcgtgcctgcactctgatgtccctagctgctgtctgaacgttgttgtttagcattacctctatggcctattcatatgctcatatggtgagaactgaggagtgaggacaggagcggtaggtatgccatccgctgagcagtagaaattaaaaggttggctgcaccagaatcagcatgcgcggcggtggagatagagcagaggcaatgcatttgttgaaggttaaatggtggactggacacagagctgtcacgtcagattttgaataagtttaggttaggagcagtcgtggtcgaggatggtgtgaaagcgacaatgacgcatcgggagccgagaagggtgggtgccagtggcgaaaggccgcagcgaagatgagagggggagaagactaggcacgtggagagaaaaggaaacatgtactacccattgtctagtaatatactttttactgatatttatttaaaacaatattattatt

SEQ ID NO: 7146 - protein, 246 aa, Zea mays subsp. mays
  peptide (1)..(246): Ceres Seq. ID no. 12407237
MTAPKPGGGAAAAARAAAAGPRTVLITGVSRGLGRALALELARRGHSVVGCGRSAEHLRSLEEEITSPSRHFFTVADVRSDSSVAELAKTVVEKKQVPDIIVNNAGTINKNNKTWNVPAEDFDMVVDTNIKGTANVLRHFVPLMIEKRHGIIINLSSGWGRSAAAEVAPYCASKWAIEGLTRSLAKELPPGLAAIALSPGVVNTDMLNSCFGSSAALYQTTETWAPKAATMILSLSLDDNGASLTV

SEQ ID NO: 7147 - protein, 123 aa, Zea mays subsp. mays
  peptide (1)..(123): Ceres Seq. ID no. 12407238
MVVDTNIKGTANVLRHFVPLMIEKRHGIIINLSSGWGRSAAAEVAPYCASKWAIEGLTRSLAKELPPGLAAIALSPGVVNTDMLNSCFGSSAALYQTTETWAPKAATMILSLSLDDNGASLTV

SEQ ID NO: 7148 - DNA, 1482 bp, Zea mays subsp. mays
  misc_feature (1)..(1482): Ceres Seq. ID no. 12408899
  misc_feature (1)..(1482): Ortholog of  Ceres SEQ ID NO 14311203 as cited in SEQ ID NO 53639
  misc_feature (1)..(1482): Ortholog of  Ceres SEQ ID NO 15176053 as cited in SEQ ID NO 57792
  misc_feature (1)..(1482): Ortholog of  Ceres SEQ ID NO 14311175 as cited in SEQ ID NO 60223
  misc_feature (1)..(1482): Ortholog of  Ceres SEQ ID NO 15224727 as cited in SEQ ID NO 64990
  misc_feature (1)..(1482): Ortholog of  Ceres SEQ ID NO 14308023 as cited in SEQ ID NO 65865
  misc_feature (1)..(1482): Ortholog of  Ceres SEQ ID NO 14307972 as cited in SEQ ID NO 66436
  misc_feature (1)..(1482): Ortholog of  Ceres SEQ ID NO 15170175 as cited in SEQ ID NO 67138
  misc_feature (1)..(1482): Ortholog of  Ceres SEQ ID NO 12614670 as cited in SEQ ID NO 68565
gctccttgctcgcctccacccgcggccaccaccgccctgcggcccccgccgcttgctagcctccaccgcgccgcgagtcacaccgttcatgcaccggctggtcctggagcacgggaggacgagcatgtcctggttcggccccagccccaaggtgaccatcgtcgacccggacctggccaaggacgtgctgtccaacaagttcggccacttcgagaagctcaaggtcccggcgctgtccaagatgctgggctccggcgtggccagccacgagggcgagaagtgggtcaagcaccggaggatcctcaaccatgcgttccatcttgagaagctcaagcgcatgctgccggcgttttctacgtgctgcgaggagctggtgagcaggtgggcggcggagtcccttggctccgacggctcgtgcgagctggacgtctggccggagctgcagaacctgacgggagacatcatttctcgcaccgcgttcagcagcagctacagcgaagggagaaggatcttccagctacaggtcgagcaagcttcgcttgtcatgaccaacattcggaagatcatgatccccggctacatgtacttgcctaccgcgaacaacaggaagatgcgcaggaacaacagggaggtggagtcaatcctgcgagagataatcgggaagaggatccaggcgatggaacaaggcgagggcaccaaagacgacctggtgggtctactgctggagacaaacatgagagacgacatggggatgacgatcgaagacatgatcgaggagtgcaaggtgttctacttcgtcgggatggagaccacgttggtgctgctcatgtggacgatggtggtgctcagcatgcacccggagtggcaggaccgcgcgagggaggaggtgacggctctgttcggcagggacggcaagcccgagtatgacggcctaagccacctcaaagttgtgaccatggtgctctacgaggtgctccgactgtacccgccggccacctccgtcgtccgacaaacgtacaaggagatggaggtcggaggcgtcacctaccccgccggcgtgatcctggagctgcccgtgctgctcatccaccacgacccggacatctggggaggcgacgcgcgtgagtttaggcccgataggttctccgagggcgtgtccagggcctccaaggaccccggcgcgttcctcccgttcggttggggcccgcgcatctgcatcggccagaacttcgcgctgctggaggccaagatggcgctctgcatgatcctccagcggtttgagttcgggctcgcgccatcctatgctcatgcgccgcataccgtgataaccttgcatcctatgcacggtgcgcagcttaagctcagagcaatatgatctcgacatgatgggtgtcccatcgttgatgccattgttatgtataaccttacaattcagataggcattcggccctgttaatgtctgaaataagtatcttcgcgttg

SEQ ID NO: 7149 - protein, 457 aa, Zea mays subsp. mays
  peptide (1)..(457): Ceres Seq. ID no. 12408900
LLARLHPRPPPPCGPRRLLASTAPRVTPFMHRLVLEHGRTSMSWFGPSPKVTIVDPDLAKDVLSNKFGHFEKLKVPALSKMLGSGVASHEGEKWVKHRRILNHAFHLEKLKRMLPAFSTCCEELVSRWAAESLGSDGSCELDVWPELQNLTGDIISRTAFSSSYSEGRRIFQLQVEQASLVMTNIRKIMIPGYMYLPTANNRKMRRNNREVESILREIIGKRIQAMEQGEGTKDDLVGLLLETNMRDDMGMTIEDMIEECKVFYFVGMETTLVLLMWTMVVLSMHPEWQDRAREEVTALFGRDGKPEYDGLSHLKVVTMVLYEVLRLYPPATSVVRQTYKEMEVGGVTYPAGVILELPVLLIHHDPDIWGGDAREFRPDRFSEGVSRASKDPGAFLPFGWGPRICIGQNFALLEAKMALCMILQRFEFGLAPSYAHAPHTVITLHPMHGAQLKLRAI

SEQ ID NO: 7150 - protein, 428 aa, Zea mays subsp. mays
  peptide (1)..(428): Ceres Seq. ID no. 12408901
MHRLVLEHGRTSMSWFGPSPKVTIVDPDLAKDVLSNKFGHFEKLKVPALSKMLGSGVASHEGEKWVKHRRILNHAFHLEKLKRMLPAFSTCCEELVSRWAAESLGSDGSCELDVWPELQNLTGDIISRTAFSSSYSEGRRIFQLQVEQASLVMTNIRKIMIPGYMYLPTANNRKMRRNNREVESILREIIGKRIQAMEQGEGTKDDLVGLLLETNMRDDMGMTIEDMIEECKVFYFVGMETTLVLLMWTMVVLSMHPEWQDRAREEVTALFGRDGKPEYDGLSHLKVVTMVLYEVLRLYPPATSVVRQTYKEMEVGGVTYPAGVILELPVLLIHHDPDIWGGDAREFRPDRFSEGVSRASKDPGAFLPFGWGPRICIGQNFALLEAKMALCMILQRFEFGLAPSYAHAPHTVITLHPMHGAQLKLRAI

SEQ ID NO: 7151 - protein, 416 aa, Zea mays subsp. mays
  peptide (1)..(416): Ceres Seq. ID no. 12408902
MSWFGPSPKVTIVDPDLAKDVLSNKFGHFEKLKVPALSKMLGSGVASHEGEKWVKHRRILNHAFHLEKLKRMLPAFSTCCEELVSRWAAESLGSDGSCELDVWPELQNLTGDIISRTAFSSSYSEGRRIFQLQVEQASLVMTNIRKIMIPGYMYLPTANNRKMRRNNREVESILREIIGKRIQAMEQGEGTKDDLVGLLLETNMRDDMGMTIEDMIEECKVFYFVGMETTLVLLMWTMVVLSMHPEWQDRAREEVTALFGRDGKPEYDGLSHLKVVTMVLYEVLRLYPPATSVVRQTYKEMEVGGVTYPAGVILELPVLLIHHDPDIWGGDAREFRPDRFSEGVSRASKDPGAFLPFGWGPRICIGQNFALLEAKMALCMILQRFEFGLAPSYAHAPHTVITLHPMHGAQLKLRAI

SEQ ID NO: 7152 - DNA, 1422 bp, Zea mays subsp. mays
  misc_feature (1)..(1422): Ceres Seq. ID no. 13493622
  misc_feature (1)..(1422): Ortholog of  Ceres SEQ ID NO 15172426 as cited in SEQ ID NO 59156
agaccattacctagaacatcctaatcgaaaaagaatctctctttaagagggatacagagtaggaaagagacagagggggcaaagagcgatggacgccgcggtgcggaaggccgcgggcgccggcatcgcgcgcgcgccggcgctggtgctagcgctggtggcggcgggggcgttcctgatctcctacaacttcttcaccatgctgttccacggcggcggcggaataggcgcggcggccgaccgctgggacgagggaccctgtggtggccatgccagcgtggatgcgcgcggcggcggacaccgaggcgcggcggcggcccgttccatgtggcgctcacggccacggacgcgccctacagccggtggcagtgccgggtcatgtacttctggtacaagcggatgcaggcgcggccgggcggagaggccatgggcgggttcacgcgcgtgctgcactcggggaagcccgacgggctcatggacgagatccccaccttcgtcgtcgacccgctgcccgctggcaaggaccacggatatgtggtcctaaataggccgtgggcatttgtgcagtggcttcagaaagcaaagattgaagaagagtatatactaatggcagaaccagaccatatatttgtgaaacctctaccaaatttggcccatgacgatgatccggcagcatttcccttcttttacattacaccatcagaacatgaaaaaattatcaggaaatactatgctaaagaaagaggtcctgtcacagatatcgatccgattgggaattctcctgtgataattaagaagacaattcttgagaagattgcccccacatggatgaatgtgtcaattcaaatgaaagaggatgaagaaacagataaagtttttggatgggtgttggaaatgtatgcatacgctgttgctagcgcattgcatggagttcatcatatccttcgtaaagatttcatgatccagccaccttttgatacaaagctccagaatacatttataatccacttcacttatggatgtgactactcactaaagggtgaactgacctatggtaaagttggtgaatggcgatttgacaaaagatcattcccagataggccaccaccaagaaatcttacattgccccctcctggagtaccagaaagtgtggttactctagtgaaaatggtcaatgaagctagtgcaaaccttcctcggtgggatgatggaatataaactttggatgatatcaattatatcttaggttcctttgatctgcccttgtatatggggaatatcaaagtatcaggtgcagtcggttgtttggtttacatccaaaatagctgcttgcacttgcacaccatacctgatagaagaagatacataattttctcagtgtactttttatgaaaagaaaagaaatgaaagtaaaagttagct

SEQ ID NO: 7153 - protein, 279 aa, Zea mays subsp. mays
  peptide (1)..(279): Ceres Seq. ID no. 13493623
MYFWYKRMQARPGGEAMGGFTRVLHSGKPDGLMDEIPTFVVDPLPAGKDHGYVVLNRPWAFVQWLQKAKIEEEYILMAEPDHIFVKPLPNLAHDDDPAAFPFFYITPSEHEKIIRKYYAKERGPVTDIDPIGNSPVIIKKTILEKIAPTWMNVSIQMKEDEETDKVFGWVLEMYAYAVASALHGVHHILRKDFMIQPPFDTKLQNTFIIHFTYGCDYSLKGELTYGKVGEWRFDKRSFPDRPPPRNLTLPPPGVPESVVTLVKMVNEASANLPRWDDGI

SEQ ID NO: 7154 - protein, 272 aa, Zea mays subsp. mays
  peptide (1)..(272): Ceres Seq. ID no. 13493624
MQARPGGEAMGGFTRVLHSGKPDGLMDEIPTFVVDPLPAGKDHGYVVLNRPWAFVQWLQKAKIEEEYILMAEPDHIFVKPLPNLAHDDDPAAFPFFYITPSEHEKIIRKYYAKERGPVTDIDPIGNSPVIIKKTILEKIAPTWMNVSIQMKEDEETDKVFGWVLEMYAYAVASALHGVHHILRKDFMIQPPFDTKLQNTFIIHFTYGCDYSLKGELTYGKVGEWRFDKRSFPDRPPPRNLTLPPPGVPESVVTLVKMVNEASANLPRWDDGI

SEQ ID NO: 7155 - protein, 263 aa, Zea mays subsp. mays
  peptide (1)..(263): Ceres Seq. ID no. 13493625
MGGFTRVLHSGKPDGLMDEIPTFVVDPLPAGKDHGYVVLNRPWAFVQWLQKAKIEEEYILMAEPDHIFVKPLPNLAHDDDPAAFPFFYITPSEHEKIIRKYYAKERGPVTDIDPIGNSPVIIKKTILEKIAPTWMNVSIQMKEDEETDKVFGWVLEMYAYAVASALHGVHHILRKDFMIQPPFDTKLQNTFIIHFTYGCDYSLKGELTYGKVGEWRFDKRSFPDRPPPRNLTLPPPGVPESVVTLVKMVNEASANLPRWDDGI

SEQ ID NO: 7156 - DNA, 1749 bp, Zea mays subsp. mays
  misc_feature (1)..(1749): Ceres Seq. ID no. 12484025
  misc_feature (1)..(1749): Ortholog of  Ceres SEQ ID NO 14307863 as cited in SEQ ID NO 20504
gcacgagaccattacctagaacatcctaatcgaaaactgttctataaagcgagacgagtgggagcaggcgtaaccctaattgagcatcgcagagataggcgtcttcgtactcgcctacctccgcggctcaaacctttcccccttctcccaattccttccgccggccgccgctccacccgtacgacgacaccatgagggagtgcatttcgatccacatcggccaggccggtatccatgtcggaaacgcgtgctgggagctgtactgccttgagcatggcattcaggctgacggtcagatcccggtgacaagaccattgggggaggtgatgatgctttcaacaccttcttcagtgagactggtgctgggaagcacgtgccccgtgctgtttttgttgaccttgaacccactgtcatcgatgaggtgagaactggcacctaccgccagctcttccaccctgagcagctcatcagtgggaaggaggatgcagccaacaactttgcccgtggtcactacaccattggcaaggagattgttgacctgtgccttgatcgcatcaggaagcttgccgacaactgcactggtctccagggcttcctcgtcttcaacgctgttggtggaggaacgggctctggccttggttccctcctcctagagcgcctgtctgttgactacggcaagaaatccaagcttgggttcactgtgtacccttccccccaagtttctacttcggtagttgagccatacaacagtgtactgtccacccactccctcctcgagcacactgatgtggctatactgctggacaatgaggccatctacgacatctgccgccgatcccttgacattgagcgcccaacctacaccaacctcaacaggcttgtgtcccaggtcatctcatcccttactgcctccctgaggttcgatggtgctctgaacgtggatgttaacgagttccagaccaacctggtaccctacccgaggatccacttcatgctttcttcgtacgctccagtcatctctgctgagaaggcctaccacgagcagctctctgtggctgagatcaccaacagtgccttcgagccatcttccatgatggccaagtgcgacccacgccatggcaagtacatggcctgctgcctcatgtaccgtggtgatgtggtccccaaggatgtgaatgctgctgtggccaccatcaagaccaaacgcaccatccagttcgtggattggtgcccgactggcttcaagtgcggcatcaactaccagcctcctagcgttgtgcctggtggcgacctggccaaggtgcagcgtgccgtgtgcatgatctccaactccaccagtgttgtggaggtgttctcccgcatcgaccacaagttcgacctcatgtacgccaagcgtgccttcgtgcactggtacgtcggtgagggtatggaggaaggtgagttctctgaggcccgtgaggacctggcggcgctcgagaaggactacgaggaggtcggtgctgagttcgatgagggcgaggatggcgacgagggtgacgagtactagagaagtttgctgatgacgcagcatcaggccagtgtgctgcccttatcccgtgatctgccgagagttgctcctgctatcgtgttatgtgtgtctgttctgaagtattgtgtggtttacaacacctgatgttgtaagagttgttaattcccctgcattgctaccgggttattgagaataattatggctgtttacgttgttgcttc

SEQ ID NO: 7157 - protein, 184 aa, Zea mays subsp. mays
  peptide (1)..(184): Ceres Seq. ID no. 12484026
MLSSYAPVISAEKAYHEQLSVAEITNSAFEPSSMMAKCDPRHGKYMACCLMYRGDVVPKDVNAAVATIKTKRTIQFVDWCPTGFKCGINYQPPSVVPGGDLAKVQRAVCMISNSTSVVEVFSRIDHKFDLMYAKRAFVHWYVGEGMEEGEFSEAREDLAALEKDYEEVGAEFDEGEDGDEGDEY

SEQ ID NO: 7158 - protein, 151 aa, Zea mays subsp. mays
  peptide (1)..(151): Ceres Seq. ID no. 12484027
MMAKCDPRHGKYMACCLMYRGDVVPKDVNAAVATIKTKRTIQFVDWCPTGFKCGINYQPPSVVPGGDLAKVQRAVCMISNSTSVVEVFSRIDHKFDLMYAKRAFVHWYVGEGMEEGEFSEAREDLAALEKDYEEVGAEFDEGEDGDEGDEY

SEQ ID NO: 7159 - protein, 150 aa, Zea mays subsp. mays
  peptide (1)..(150): Ceres Seq. ID no. 12484028
MAKCDPRHGKYMACCLMYRGDVVPKDVNAAVATIKTKRTIQFVDWCPTGFKCGINYQPPSVVPGGDLAKVQRAVCMISNSTSVVEVFSRIDHKFDLMYAKRAFVHWYVGEGMEEGEFSEAREDLAALEKDYEEVGAEFDEGEDGDEGDEY

SEQ ID NO: 7160 - DNA, 1676 bp, Zea mays subsp. mays
  misc_feature (1)..(1676): Ceres Seq. ID no. 12352494
  misc_feature (1)..(1676): Ortholog of  Ceres SEQ ID NO 15177320 as cited in SEQ ID NO 52645
  misc_feature (1)..(1676): Ortholog of  Ceres SEQ ID NO 15171359 as cited in SEQ ID NO 57279
  misc_feature (1)..(1676): Ortholog of  Ceres SEQ ID NO 14313840 as cited in SEQ ID NO 59568
  misc_feature (1)..(1676): Ortholog of  Ceres SEQ ID NO 15168502 as cited in SEQ ID NO 60095
  misc_feature (1)..(1676): Ortholog of  Ceres SEQ ID NO 14314084 as cited in SEQ ID NO 63256
  misc_feature (1)..(1676): Ortholog of  Ceres SEQ ID NO 14303091 as cited in SEQ ID NO 66369
aactcactgcatatctgacatctcagttgctgaacgcctgaaccgcaagtcatccatgacctcttctattccgaagctgcttctcctcctcttctttctcagccatcgctctcccattgctcgcgcaggcgatgatggcagctacaaggttctgtccatgggctctccgagaactgactccgtctgttcccagtccaaagcggttccttcgtcgtccgccggtgccgccacggtgcccttgcatcaccgtcacggcccatgctcgccgttgccgaccaagaagatgccgacgttggaggagacgctccaccgcgatcagctccgagctgcctacatccagcggaagttctcaggcggcggtggcgctggtggtgacgtccagcgatcggacgccaccgtgccgacggccctgggcacctccctgaacacgctggagtacctgatcaccgtaggcctgggctcgccggccacgtcccagaccatgctcatccgacaccggcagcgacgtgtcgtgggtgcagtgcaagccgtgctcgcagtgccactcccaggcggacccactcttcgaccccagctcgtcgagcacgtactccccgttctcctgcggctccgccgcctgcgcgcagctcggccaggaaggcaacggctgctcctccagctcccagtgccagtacattgtcacgtacggcgacggctccagcaccacggggacctacagctccgacacgctcgcgctgggctccagcgccgtcaagagcttccagttcgggtgcagcaacgtggagtcgggcttcaacgaccagaccgacgggctcatggggctcggcggcggcgcgcagtcgctggtgtcacagacggcggggacgctcggcagggccttctcgtactgcctcccgccgacgccgagctcctccgggttcctcacgctcggcgctgctggcggtagcggaacctcgggcttcgtcaagacgccgatgctcaggagcagccaggtccccacgttctacggcgtgcgcctccaggccatccgggtgggcgggaggcagctcagcatacccgcctcggtcttctccgctgggacggtcatggactcgggcacggtcatcacgcggctgccgccgaccgcctactcggcgctgtcgtcggcgttcaaggccgggatgaagcagtacccgccggcgcagccgagcggcatcctcgacacctgctttgacttcagcggccagtccagcgtcagcataccgtccgtcgcgctagtcttctccgggggcgccgttgtcagcctcgacgccagcggcatcatcctcagcaactgcctcgccttcgcggccaacagcgacgacagctccttgggcatcatcggcaacgtgcagcagcggacgttcgaggtgctgtacgacgttggccggggcgtcgtggggttcagggctggggcgtgctgatcgatcgtgatcggcgcaaggacattgacaataccggccgggagtacgtactgtgctcgtttgggttgcgagtgcaacgtaaatggaagaagtgcaaaacatatacatactacttcgattttaattatctttgcgatagcatgcaataacgtcatgcatgcaagtgtgcaaactactaaaagctaaaagataatcttaatgtcacctgattgatgactataaaagattaatgat

SEQ ID NO: 7161 - protein, 314 aa, Zea mays subsp. mays
  peptide (1)..(314): Ceres Seq. ID no. 12352495
THCISDISVAERLNRKSSMTSSIPKLLLLLFFLSHRSPIARAGDDGSYKVLSMGSPRTDSVCSQSKAVPSSSAGAATVPLHHRHGPCSPLPTKKMPTLEETLHRDQLRAAYIQRKFSGGGGAGGDVQRSDATVPTALGTSLNTLEYLITVGLGSPATSQTMLIRHRQRRVVGAVQAVLAVPLPGGPTLRPQLVEHVLPVLLRLRRLRAARPGRQRLLLQLPVPVHCHVRRRLQHHGDLQLRHARAGLQRRQELPVRVQQRGVGLQRPDRRAHGARRRRAVAGVTDGGDARQGLLVLPPADAELLRVPHARRCWR

SEQ ID NO: 7162 - protein, 296 aa, Zea mays subsp. mays
  peptide (1)..(296): Ceres Seq. ID no. 12352496
MTSSIPKLLLLLFFLSHRSPIARAGDDGSYKVLSMGSPRTDSVCSQSKAVPSSSAGAATVPLHHRHGPCSPLPTKKMPTLEETLHRDQLRAAYIQRKFSGGGGAGGDVQRSDATVPTALGTSLNTLEYLITVGLGSPATSQTMLIRHRQRRVVGAVQAVLAVPLPGGPTLRPQLVEHVLPVLLRLRRLRAARPGRQRLLLQLPVPVHCHVRRRLQHHGDLQLRHARAGLQRRQELPVRVQQRGVGLQRPDRRAHGARRRRAVAGVTDGGDARQGLLVLPPADAELLRVPHARRCWR

SEQ ID NO: 7163 - protein, 262 aa, Zea mays subsp. mays
  peptide (1)..(262): Ceres Seq. ID no. 12352497
MGSPRTDSVCSQSKAVPSSSAGAATVPLHHRHGPCSPLPTKKMPTLEETLHRDQLRAAYIQRKFSGGGGAGGDVQRSDATVPTALGTSLNTLEYLITVGLGSPATSQTMLIRHRQRRVVGAVQAVLAVPLPGGPTLRPQLVEHVLPVLLRLRRLRAARPGRQRLLLQLPVPVHCHVRRRLQHHGDLQLRHARAGLQRRQELPVRVQQRGVGLQRPDRRAHGARRRRAVAGVTDGGDARQGLLVLPPADAELLRVPHARRCWR

SEQ ID NO: 7164 - DNA, 1650 bp, Zea mays subsp. mays
  misc_feature (1)..(1650): Ceres Seq. ID no. 12373548
  misc_feature (1)..(1650): Ortholog of  Ceres SEQ ID NO 13654273 as cited in SEQ ID NO 68551
aaagaaaaattagaaaccctagcgatgctgcagatccgcctgagcaagattggctcgtcggactccggcgctgccgccaccggctcggcagccgccgccggtgccgccgccgctgtggggtcggctgcggcgctgggcggcggcatcccggaatcggtcaccgtggcatgccccgaccacctggtgatcgcggacctacccgtcgcgaagagcctcggtgccgtcacgacctccgctgccgccgccacgcgcgccatcggccgtcgctcccgtcgcccgctcggggagcgcgtccacatctgctcccgctgcgagttccccatcgccatctacggccgcctcatcccttgtgaacatgccttttgtttaacctgtgcaagaagtgattccagctgctatctttgtgatgagcgcattcagaagatacaaagtgtgaaaatgatggaggggattttcatctgtgctgcaccgatgtgtctcaagtcattccttaagaaagcagattttgagtttcatgttcccgatgtccatgccaacctcctgcaaactaatctagagaaggaagaagaacgcaatgagccagatgctcctaacatctcccgtgcttctgcaggggatacacaaagacaatctcaaatgcctgaaatgtctactgcacgggctccttcaaggccaggtgtttcacaagatcgtgatgaacgctctcgctaccaccagtccagggagcaaacaccactgaggcccccaaccctttcaaaaccaccttcattccatggtcggcattcgtacccaccaggggatactcaggccgagaacaatccacctcaaggattcgaccgggcctacaactgggcttctcaatcacggcaagagagcccaggtgcggcgactccacttcgccaagaatctgaccaaagtattcaggacaagcagcaattgatggctaatgcaccttttatgtttccgccgattcctcctcaccagggaaactttatgatgcctatgaatatgaatcagcctttgattcctaatgcaccattcaattatcctctccagcaagatggaaaccctcagtacttctctgcccctttccagatgcagctaccagatactggatcagaacaaggttccatgtcaaatgtcccagcctccagctggtcctatgagtttccctgaggggcctcagcgcccatggggtatgaggctgatgagtaatccatttcaatcgatggcccttggtcagggaatgattgatggtgcgggtgatcctcaaggtggtggtggccttgccttcatgcaagctggttttgggggcatgcctgatggctccatgaatacaggcatgcccgatagaggtgatggaaggggtattctagcacagatgcatatgcaaatgcagatgtcacttcccccacctccgcctacacaacctcctccaggttcacagcaaacgtttaacaggacttgatatttttttttgtacgaattgatggcaactcccagaattgcatgtcaattcattgagcaaattgtaattttgtcgtttttggcatgtaacctgtggactagatggctcagttctgttccctggttggataggagcctgtattatgctataactcctgtttgaatgaaatgttccgaaatttc

SEQ ID NO: 7165 - protein, 391 aa, Zea mays subsp. mays
  peptide (1)..(391): Ceres Seq. ID no. 12373549
KEKLETLAMLQIRLSKIGSSDSGAAATGSAAAAGAAAAVGSAAALGGGIPESVTVACPDHLVIADLPVAKSLGAVTTSAAAATRAIGRRSRRPLGERVHICSRCEFPIAIYGRLIPCEHAFCLTCARSDSSCYLCDERIQKIQSVKMMEGIFICAAPMCLKSFLKKADFEFHVPDVHANLLQTNLEKEEERNEPDAPNISRASAGDTQRQSQMPEMSTARAPSRPGVSQDRDERSRYHQSREQTPLRPPTLSKPPSFHGRHSYPPGDTQAENNPPQGFDRAYNWASQSRQESPGAATPLRQESDQSIQDKQQLMANAPFMFPPIPPHQGNFMMPMNMNQPLIPNAPFNYPLQQDGNPQYFSAPFQMQLPDTGSEQGSMSNVPASSWSYEFP

SEQ ID NO: 7166 - protein, 383 aa, Zea mays subsp. mays
  peptide (1)..(383): Ceres Seq. ID no. 12373550
MLQIRLSKIGSSDSGAAATGSAAAAGAAAAVGSAAALGGGIPESVTVACPDHLVIADLPVAKSLGAVTTSAAAATRAIGRRSRRPLGERVHICSRCEFPIAIYGRLIPCEHAFCLTCARSDSSCYLCDERIQKIQSVKMMEGIFICAAPMCLKSFLKKADFEFHVPDVHANLLQTNLEKEEERNEPDAPNISRASAGDTQRQSQMPEMSTARAPSRPGVSQDRDERSRYHQSREQTPLRPPTLSKPPSFHGRHSYPPGDTQAENNPPQGFDRAYNWASQSRQESPGAATPLRQESDQSIQDKQQLMANAPFMFPPIPPHQGNFMMPMNMNQPLIPNAPFNYPLQQDGNPQYFSAPFQMQLPDTGSEQGSMSNVPASSWSYEFP

SEQ ID NO: 7167 - protein, 245 aa, Zea mays subsp. mays
  peptide (1)..(245): Ceres Seq. ID no. 12373551
MMEGIFICAAPMCLKSFLKKADFEFHVPDVHANLLQTNLEKEEERNEPDAPNISRASAGDTQRQSQMPEMSTARAPSRPGVSQDRDERSRYHQSREQTPLRPPTLSKPPSFHGRHSYPPGDTQAENNPPQGFDRAYNWASQSRQESPGAATPLRQESDQSIQDKQQLMANAPFMFPPIPPHQGNFMMPMNMNQPLIPNAPFNYPLQQDGNPQYFSAPFQMQLPDTGSEQGSMSNVPASSWSYEFP

SEQ ID NO: 7168 - DNA, 1346 bp, Zea mays subsp. mays
  misc_feature (1)..(1346): Ceres Seq. ID no. 12412964
  misc_feature (1)..(1346): Ortholog of  Ceres SEQ ID NO 15227018 as cited in SEQ ID NO 0
agcgccggcgctgtagtgtgcagccctcgctccttctggatctctgcacccttcgccacacttcgggggcgcgcgcgcggacatggaggtcgaataccacgaggagtacgtgcggagctcgagaggcgtgcagctcttcacctgcggctggctgcccgctgccgcatcgcccaaggcgctcgtcttcctctgccacggctacggcatggagtgcagtggcttcatgagagaatgcggcgtgcggctggcggcggccgggtacggcgtgttcgggatggactacgagggccacggcaagtcgatgggcgcgcgctgctacatccgcagtttccgccgcctcgtcgacgactgcggccatttcttcaagtccgtctgcgagcttgaggagtaccggggcaagagccggttcctgtacggcgagtccatgggtggcgcggtggcgctggctgctgcacaccgaggaccccgccttctgggacggcgccgtcctcgtggcgcccatgtgcaagatatcggagaaggtgaagccgcaccctctggtgatcacgctcctgacgcaggtggaggacgtgatccccaggtggaagatcgtgcccaccaagcaggacgtcatcgacgccgccttcaaggaccccgtcaagcgtgaaaagatcaggaggaaccagctgatctaccaggacaagccgcggctcaagactgcgttggagatgctcaggaccagcatgtacatagaagacagcttgtcacaggtgacgctgccgttcttcgtcctgcacggcgaggccgacacggtgacggacccggaggtgagccgcgcgctgtacgagcgttcggccagcgccgacaagaccatcaagctgtacccggggatgtggcacggcctcaccgccggggagcccgacgagaacgtggaggccatcttctccgacatcgtgtcctggctcaaccaccgcagccggagctgggccgtggaggaacgccatatgaccaggaagctggcgccagctccggccaagtccatcgaaggccacggcaccgtggacggcaaagtgcacacacaacaagggcgccctcggcggcgccagggcttcctctgcgggcttgccggccggacgcatcaccacgcggagatgtgaaagatagaatcgccgtctcggtcccggatcagatgggcgcctgctttcttcaaccatggcaaataaaggaatgatgacctgcggtttgtaatatagaggtcttattatgcttgtcaaagttatgtatgaccaatcattcccgtctggtgcagattcgaactcatgctcagatatatgtaatgtaagattataacgctattagcattctgg

SEQ ID NO: 7169 - protein, 211 aa, Zea mays subsp. mays
  peptide (1)..(211): Ceres Seq. ID no. 12412965
MCKISEKVKPHPLVITLLTQVEDVIPRWKIVPTKQDVIDAAFKDPVKREKIRRNQLIYQDKPRLKTALEMLRTSMYIEDSLSQVTLPFFVLHGEADTVTDPEVSRALYERSASADKTIKLYPGMWHGLTAGEPDENVEAIFSDIVSWLNHRSRSWAVEERHMTRKLAPAPAKSIEGHGTVDGKVHTQQGRPRRRQGFLCGLAGRTHHHAEM

SEQ ID NO: 7170 - protein, 187 aa, Zea mays subsp. mays
  peptide (1)..(187): Ceres Seq. ID no. 12412966
MEVEYHEEYVRSSRGVQLFTCGWLPAAASPKALVFLCHGYGMECSGFMRECGVRLAAAGYGVFGMDYEGHGKSMGARCYIRSFRRLVDDCGHFFKSVCELEEYRGKSRFLYGESMGGAVALAAAHRGPRLLGRRRPRGAHVQDIGEGEAAPSGDHAPDAGGGRDPQVEDRAHQAGRHRRRLQGPRQA

SEQ ID NO: 7171 - protein, 146 aa, Zea mays subsp. mays
  peptide (1)..(146): Ceres Seq. ID no. 12412967
MECSGFMRECGVRLAAAGYGVFGMDYEGHGKSMGARCYIRSFRRLVDDCGHFFKSVCELEEYRGKSRFLYGESMGGAVALAAAHRGPRLLGRRRPRGAHVQDIGEGEAAPSGDHAPDAGGGRDPQVEDRAHQAGRHRRRLQGPRQA

SEQ ID NO: 7172 - DNA, 1463 bp, Zea mays subsp. mays
  misc_feature (1)..(1463): Ceres Seq. ID no. 12405475
  misc_feature (1)..(1463): Ortholog of  Ceres SEQ ID NO 14305022 as cited in SEQ ID NO 53586
  misc_feature (1)..(1463): Ortholog of  Ceres SEQ ID NO 12506279 as cited in SEQ ID NO 55440
  misc_feature (1)..(1463): Ortholog of  Ceres SEQ ID NO 13654847 as cited in SEQ ID NO 62459
  misc_feature (1)..(1463): Ortholog of  Ceres SEQ ID NO 15174357 as cited in SEQ ID NO 0
agcgtgaggagttcgaaagaaagggagaaaatgttatgcttgcttgccttgagggaagcgtcgccgtctgcccacacccgcaccgcacccaaccgcagcggagccgggagccgaaggccgagggtattcttccttcgccgctaagcacgcctcctctccacaggcagccgacccaggggaagcgtcgccgtctgcccccaccccgaatctgatgcttcatcgattggttctaatcctcactacctccatattcatgcacgagattgcgggtgattaggagcagggaccaatcatattgaactcagatttggagcggagcaggaggggagccattgcccgtgttctgattgctgctagaggtcgagggatggtaggggtgctgtcgaatcgcgtggatcgggacgacctcaaggccggggatcacatctacacttggcgggccgcctacatctacgcccaccacggaatatatgctggagatggcatggttatccattttacaagggcagctggacatgagattggaacaggaacattcttggactggttcctttatagctcctctccggcagcaactgagggtcctccctgccagaaatgtgggcacctagtcaagtccgatggggtcatcacctcttgcctcgattgcttcttagatgggggcagcctgtacctctttgactacgctgtgtcgcctgctttcttcctcgccaaagcacggggaggaacgtgcaccctggctgcctctgaccccagtgacgttgtgatccaccgtgcacggtacctcctggacaatgggtttggcatgtactccctgttcaagaacaactgcgaggacttcgccatatactgcaagactgggctgcttgtggagaccgctttcagtgttggccgtagcgggcaactttcgtctctgactgctgccttcagcgccgtggcctcgtcccccttgcgtttcctgacaaccagtgctggtggcctggcaattgtgaccagcggcatgtactgtttcgggcggtatgtgtcggatattggtgtccggcgtgatgttgtcaaggtccctgtcgaaaggcttgtggagcagaatgttacttggattcctcagtgtgtggctacagagacagatatcgcggcaggagcaccgcagcagcagttggaggttccttgtgcggttgccgaggaagcatccgttatacagcccgcggcaccgtgatccattgctgaaatgtcatcatgtaccaggtgttggcatgagacaggacaactggaactacgtacttgtgtggaattacatgtaatgatgtatctggtggtgttatgcaatccattgctgctgctgctgctaatggtgcaagcaatgatgatgatgatggatgtggttccatgaccactattaattattacagaattgagaagacctgtatttgcccttgatgattaatgatttctgttataccgttgcc

SEQ ID NO: 7173 - protein, 281 aa, Zea mays subsp. mays
  peptide (1)..(281): Ceres Seq. ID no. 12405476
MVGVLSNRVDRDDLKAGDHIYTWRAAYIYAHHGIYAGDGMVIHFTRAAGHEIGTGTFLDWFLYSSSPAATEGPPCQKCGHLVKSDGVITSCLDCFLDGGSLYLFDYAVSPAFFLAKARGGTCTLAASDPSDVVIHRARYLLDNGFGMYSLFKNNCEDFAIYCKTGLLVETAFSVGRSGQLSSLTAAFSAVASSPLRFLTTSAGGLAIVTSGMYCFGRYVSDIGVRRDVVKVPVERLVEQNVTWIPQCVATETDIAAGAPQQQLEVPCAVAEEASVIQPAAP

SEQ ID NO: 7174 - protein, 242 aa, Zea mays subsp. mays
  peptide (1)..(242): Ceres Seq. ID no. 12405477
MVIHFTRAAGHEIGTGTFLDWFLYSSSPAATEGPPCQKCGHLVKSDGVITSCLDCFLDGGSLYLFDYAVSPAFFLAKARGGTCTLAASDPSDVVIHRARYLLDNGFGMYSLFKNNCEDFAIYCKTGLLVETAFSVGRSGQLSSLTAAFSAVASSPLRFLTTSAGGLAIVTSGMYCFGRYVSDIGVRRDVVKVPVERLVEQNVTWIPQCVATETDIAAGAPQQQLEVPCAVAEEASVIQPAAP

SEQ ID NO: 7175 - DNA, 1428 bp, Zea mays subsp. mays
  misc_feature (1)..(1428): Ceres Seq. ID no. 12356422
  misc_feature (1)..(1428): Ortholog of  Ceres SEQ ID NO 14304689 as cited in SEQ ID NO 53265
  misc_feature (1)..(1428): Ortholog of  Ceres SEQ ID NO 14307820 as cited in SEQ ID NO 53938
  misc_feature (1)..(1428): Ortholog of  Ceres SEQ ID NO 15177137 as cited in SEQ ID NO 55030
  misc_feature (1)..(1428): Ortholog of  Ceres SEQ ID NO 14302407 as cited in SEQ ID NO 66891
  misc_feature (1)..(1428): Ortholog of  Ceres SEQ ID NO 13599557 as cited in SEQ ID NO 0
acgcagggtggctaggagttgagtcgtgcagaagagacaaaggtcctcacttggctaagctagacacgtacgagtgcaggaaacaagataagtcgcggtttgcgacggcgagaagcgccggatgagtgtccactgtccacaagtccagattccaattccagtccgatcgtgagctcagctcagctccgctagtcctctccccgcacgcaccaccaccagcagcagtccagcaccatgggcggcgccctgctcctcacgctgctcctcgcggccgtgcccctctccttgggcggcggcggcggcgcgcacccgggctactccgacgacgacgagagcgcctgcacggtggacgcgggcgcggagctgctgcggcggatggaggagcgcgggcccgacaggcgcatcatcgacatcacgcacgcggtcgtgccggacctgccggcgttcgccacgggggcggtcgcggggcccatgctgcgcctcagggagtccatggcggacgggtccgagtacaacctgtcggagctgcggatggagtgccacaccggcacgcacgtcgacgcgcctggccacatcaaccaggcccacttcgccgcctgcctcgacgtcgacacgctcgacctccacgtcctcaacggacctgcattgctagttgatgtgccaagaaacacaaatataacagctgaagcgatggaattcctaaacatcccgagaggggttcgccgagttctgttcagaacactgaacactgacaggaagttgatgtggaggaagggaggtgacatgagctacgttgggtttacagaggatggcgcgcagtggttagtcgacaacaccgacataaagctagttggagttgacggtctgtcagtggcatcatttgatcacctgatctctgcccacgtggtctttttcaaaaccccggatataatccctgttgagagcctgaatctggacgacatcgaggcggggatatacatgctgcactgtctacctctcaggctggtcggagccgagggtgcaccgaccagatgcatcctcatcaagtgatcgttcctcggccggcctgctcttgctgccttgctggaggtggcgacactggaccatgccagctgagctggtgctccgtcgtgggtcgcgtggccaatatttggctcgcatgcagtcgtcgatctatatggaacagaacactgcatgcctatgtagatacgcttgtatggacaataaaggaaccgcagtacttctgtcgatgaaatacttttgggtgagccggtaatctaaaacaccaggcctacaggttaagctgggaggccctggaaggctgaggctagcggctggggatggatccagatttttattcgaatgctatttttttggtcatatttctttgattgtaaacaaataacatatatgattttctatatctct

SEQ ID NO: 7176 - protein, 271 aa, Zea mays subsp. mays
  peptide (1)..(271): Ceres Seq. ID no. 12356423
MGGALLLTLLLAAVPLSLGGGGGAHPGYSDDDESACTVDAGAELLRRMEERGPDRRIIDITHAVVPDLPAFATGAVAGPMLRLRESMADGSEYNLSELRMECHTGTHVDAPGHINQAHFAACLDVDTLDLHVLNGPALLVDVPRNTNITAEAMEFLNIPRGVRRVLFRTLNTDRKLMWRKGGDMSYVGFTEDGAQWLVDNTDIKLVGVDGLSVASFDHLISAHVVFFKTPDIIPVESLNLDDIEAGIYMLHCLPLRLVGAEGAPTRCILIK

SEQ ID NO: 7177 - protein, 224 aa, Zea mays subsp. mays
  peptide (1)..(224): Ceres Seq. ID no. 12356424
MEERGPDRRIIDITHAVVPDLPAFATGAVAGPMLRLRESMADGSEYNLSELRMECHTGTHVDAPGHINQAHFAACLDVDTLDLHVLNGPALLVDVPRNTNITAEAMEFLNIPRGVRRVLFRTLNTDRKLMWRKGGDMSYVGFTEDGAQWLVDNTDIKLVGVDGLSVASFDHLISAHVVFFKTPDIIPVESLNLDDIEAGIYMLHCLPLRLVGAEGAPTRCILIK

SEQ ID NO: 7178 - protein, 192 aa, Zea mays subsp. mays
  peptide (1)..(192): Ceres Seq. ID no. 12356425
MLRLRESMADGSEYNLSELRMECHTGTHVDAPGHINQAHFAACLDVDTLDLHVLNGPALLVDVPRNTNITAEAMEFLNIPRGVRRVLFRTLNTDRKLMWRKGGDMSYVGFTEDGAQWLVDNTDIKLVGVDGLSVASFDHLISAHVVFFKTPDIIPVESLNLDDIEAGIYMLHCLPLRLVGAEGAPTRCILIK

SEQ ID NO: 7179 - DNA, 1811 bp, Zea mays subsp. mays
  misc_feature (1)..(1811): Ceres Seq. ID no. 12379731
  misc_feature (1)..(1811): Ortholog of  Ceres SEQ ID NO 12612314 as cited in SEQ ID NO 51420
  misc_feature (1)..(1811): Ortholog of  Ceres SEQ ID NO 14306493 as cited in SEQ ID NO 53170
  misc_feature (1)..(1811): Ortholog of  Ceres SEQ ID NO 14311095 as cited in SEQ ID NO 53197
gataataaagccctacctctcacatcggcaacaggacgaggccagggcatccacgaccacgacacggacacagggagccgcccgccatgccaccgcacggcggcatgctcgcgtacgccgccctcgcgctcgcggcgctgcggctgctgctgtcctacaagtcggcgctctacgcgctgcgccgcctgtggcggtgcgccgacgagtgggcgcaggcgtaccagtaccacgaggtgccgcgcttcgccggggcccagtgcgggtgcgacggcgcagagaacccgctgttccgcaaggtcgccgcgtacgtggcggcgctgccgtcgctggaggacgccgacgctgcgtgcgtggtgtcgtcggcgtcaaggaccaacggcgggctgtccctgcagctcggcccgggccacaccgcgagggacacgtaccttggcgcgcgcctcgcgtggaccagcgcgggcggcgagcgcctggtgctgcgcgtgcgccgccacgaccgctcccgcgtgctgcgaccttacctgcagcacgtggagtccgtggcagaggagatggagcagcgccgccgcgagctgcgcctcttcgccaacaccgccgtggacgcgaccacgggcgcgccgcgctgggcgtcggcgcccttcacccacccggccacgctcgacgccgtggccatggacccggacctcaaggcccgcgtccgcgccgacctcgagagcttcctcaagggccgcgcctactaccaccgcctcggccgcgtctggcgccggagctacctcctctacggcccgccgggcaccggcaagtccacgttcgcggcggccatggccaggttcctgggctacgacgtctacgacgtcgacctgtctcgcgccgacgccgccggcgacgacctccgcgcgctgctcctgcacaccaccccgcgctcgctcgtcctcgtcgaggacctggaccggtacctgcagggcggcggcggggacgcggaggcgcgcgcggccagggtgctgagcttcatggacggcatcgcgtcgtgctgcggcgaggagcgtgtcatggtgttcaccatgcgcgggggcaaggacgccgtggacgccgcggtggtgcgcccgggccggctggacgtgcacatccagttcacgctctgcgacttcgaggccttcaaggcgctggccagcaactacctggggctcaaggaccacaagctgtacccgcaggtggaggaggggttccacgccgccggcgcccgcctcagcccgggccgagcttggcgagatcatgctggccaaccgcgcgtccccgagccgcgcgctccgcagcgtgatcaccaagctccagcgcgtcgcgtccggaggcgccgcgccgccgcggaacccggcgcacaggcggaacacgagctggtccggcgcctggaccggacagcagtgggaggaccaggcccagccggcgcgagccagcgcggtctccgtggaggtcgacgagacggccgccggggcaccggcgacgtgcggcggggtgttcggaaaggaggcgcccatgagggagttcaagaagctgtacgggctgatcaaggtcaggagccggagggagggcgccggcgccgtgccactggaaggcgacgcgcacgggccgccgacgccgggcaaccatgacagggagcggtgatcgccgtggatggtagaattgtagtggtgtgcaaaaagaaagcatttttatttctttctctttttttttcttgttattgttacagtttatcacactactctactaatgtgtcagtgactgcaagtaggaatggcaatagatgaattggatgg

SEQ ID NO: 7180 - protein, 519 aa, Zea mays subsp. mays
  peptide (1)..(519): Ceres Seq. ID no. 12379732
MPPHGGMLAYAALALAALRLLLSYKSALYALRRLWRCADEWAQAYQYHEVPRFAGAQCGCDGAENPLFRKVAAYVAALPSLEDADAACVVSSASRTNGGLSLQLGPGHTARDTYLGARLAWTSAGGERLVLRVRRHDRSRVLRPYLQHVESVAEEMEQRRRELRLFANTAVDATTGAPRWASAPFTHPATLDAVAMDPDLKARVRADLESFLKGRAYYHRLGRVWRRSYLLYGPPGTGKSTFAAAMARFLGYDVYDVDLSRADAAGDDLRALLLHTTPRSLVLVEDLDRYLQGGGGDAEARAARVLSFMDGIASCCGEERVMVFTMRGGKDAVDAAVVRPGRLDVHIQFTLCDFEAFKALASNYLGLKDHKLYPQVEEGFHAAGARLSPGRAWRDHAGQPRVPEPRAPQRDHQAPARRVRRRRAAAEPGAQAEHELVRRLDRTAVGGPGPAGASQRGLRGGRRDGRRGTGDVRRGVRKGGAHEGVQEAVRADQGQEPEGGRRRRATGRRRARAADAGQP

SEQ ID NO: 7181 - protein, 513 aa, Zea mays subsp. mays
  peptide (1)..(513): Ceres Seq. ID no. 12379733
MLAYAALALAALRLLLSYKSALYALRRLWRCADEWAQAYQYHEVPRFAGAQCGCDGAENPLFRKVAAYVAALPSLEDADAACVVSSASRTNGGLSLQLGPGHTARDTYLGARLAWTSAGGERLVLRVRRHDRSRVLRPYLQHVESVAEEMEQRRRELRLFANTAVDATTGAPRWASAPFTHPATLDAVAMDPDLKARVRADLESFLKGRAYYHRLGRVWRRSYLLYGPPGTGKSTFAAAMARFLGYDVYDVDLSRADAAGDDLRALLLHTTPRSLVLVEDLDRYLQGGGGDAEARAARVLSFMDGIASCCGEERVMVFTMRGGKDAVDAAVVRPGRLDVHIQFTLCDFEAFKALASNYLGLKDHKLYPQVEEGFHAAGARLSPGRAWRDHAGQPRVPEPRAPQRDHQAPARRVRRRRAAAEPGAQAEHELVRRLDRTAVGGPGPAGASQRGLRGGRRDGRRGTGDVRRGVRKGGAHEGVQEAVRADQGQEPEGGRRRRATGRRRARAADAGQP

SEQ ID NO: 7182 - protein, 438 aa, Zea mays subsp. mays
  peptide (1)..(438): Ceres Seq. ID no. 12379734
IIKPYLSHRQQDEARASTTTTRTQGAARHATARRHARVRRPRARGAAAAAVLQVGALRAAPPVAVRRRVGAGVPVPRGAALRRGPVRVRRRREPAVPQGRRVRGGAAVAGGRRRCVRGVVGVKDQRRAVPAARPGPHREGHVPWRAPRVDQRGRRAPGAARAPPRPLPRAATLPAARGVRGRGDGAAPPRAAPLRQHRRGRDHGRAALGVGALHPPGHARRRGHGPGPQGPRPRRPRELPQGPRLLPPPRPRLAPELPPLRPAGHRQVHVRGGHGQVPGLRRLRRRPVSRRRRRRRPPRAAPAHHPALARPRRGPGPVPAGRRRGRGGARGQGAELHGRHRVVLRRGACHGVHHARGQGRRGRRGGAPGPAGRAHPVHALRLRGLQGAGQQLPGAQGPQAVPAGGGGVPRRRRPPQPGPSLARSCWPTARPRAARSAA

SEQ ID NO: 7183 - DNA, 1412 bp, Zea mays subsp. mays
  misc_feature (1)..(1412): Ceres Seq. ID no. 12556700
  misc_feature (1)..(1412): Ortholog of  Ceres SEQ ID NO 15177654 as cited in SEQ ID NO 59933
  misc_feature (1)..(1412): Ortholog of  Ceres SEQ ID NO 14303600 as cited in SEQ ID NO 64632
  misc_feature (1)..(1412): Ortholog of  Ceres SEQ ID NO 14302776 as cited in SEQ ID NO 66919
cgaaaaaaccatttcttcttcctttttctatatcgcgttacgtccctacccagcgatctaggccgccgcctctcctactgcatctccctcgctctcgtcgcctcgttcgcttcgcctccgccccgccccgccccgagcagagcgcagccctatccggagctgggatggcggacgcgaagcagccagcagcagcagcagcagccacagcaggcggcagcggcagccaccggcgtgtggaagacggtcaagcccttcgttaacggcggggcctctgggatgctcgcgacctgcgtcatccagcctatcgacatggtcaaggtgaggatccagttgggtgagggctctgctggtcaggtcacaaggaacatgcttgcaaatgagggtgtccgttctttctacaagggtttgtccgccggattgctgaggcaagcgacgtacacgactgctcgtcttggatcctttagggttctaactaacaaagcagttgaaaagaatgaagggaagccattgcctctatttcagaaagcttttattggtctgactgctggtgcaattggtgcttgtgttggtagtcctgctgatctggcactcattagaatgcaagccgattcgaccctgccagttgcacaacgacgcaactataagaatgctttccatgcactctaccgtatcagtggtgatgagggagtccttgcgctttggaagggtgcaggtccaactgtggtgagagctatggcactcaatatgggtatgcttgcttcctatgaccagagtgtcgagctatttagggacaaatttggcgcaggagaaatttctactgttgttggagccagcgctgtttctggattctttgcctcagcatgcagtttgccctttgactatgtgaagacacagattcagaagatgcaacctgatgcgaatggcaagtacccatacacagggtctttggactgtgctgtgaagaccttcaagagcggtggcccattcaagttctacactggtttcccggtgtactgcgtcaggattgcaccccatgtcatgatgacctggatattcttgaatcagatccagaagtttgagaagaagatcggcatataggattcccatgggacggatacagggttgacagttctatgctattactgcttgactctgtaataacattccagctgctttcgcaccatggtagttggttttggtagagacaagtctgttacaattttttaccttagctttccaattattgtgttgcaataatcgaattaattgttgctgggggatttttttggggggttgggagggtggcatgcttttgttggctgggatgtagccataaggagagggggatactgcctagttatgtcattgaatggaattggaccatattttatacagatttttaccttcagttc

SEQ ID NO: 7184 - protein, 365 aa, Zea mays subsp. mays
  peptide (1)..(365): Ceres Seq. ID no. 12556701
RKNHFFFLFLYRVTSLPSDLGRRLSYCISLALVASFASPPPRPAPSRAQPYPELGWRTRSSQQQQQQPQQAAAAATGVWKTVKPFVNGGASGMLATCVIQPIDMVKVRIQLGEGSAGQVTRNMLANEGVRSFYKGLSAGLLRQATYTTARLGSFRVLTNKAVEKNEGKPLPLFQKAFIGLTAGAIGACVGSPADLALIRMQADSTLPVAQRRNYKNAFHALYRISGDEGVLALWKGAGPTVVRAMALNMGMLASYDQSVELFRDKFGAGEISTVVGASAVSGFFASACSLPFDYVKTQIQKMQPDANGKYPYTGSLDCAVKTFKSGGPFKFYTGFPVYCVRIAPHVMMTWIFLNQIQKFEKKIGI

SEQ ID NO: 7185 - protein, 273 aa, Zea mays subsp. mays
  peptide (1)..(273): Ceres Seq. ID no. 12556702
MLATCVIQPIDMVKVRIQLGEGSAGQVTRNMLANEGVRSFYKGLSAGLLRQATYTTARLGSFRVLTNKAVEKNEGKPLPLFQKAFIGLTAGAIGACVGSPADLALIRMQADSTLPVAQRRNYKNAFHALYRISGDEGVLALWKGAGPTVVRAMALNMGMLASYDQSVELFRDKFGAGEISTVVGASAVSGFFASACSLPFDYVKTQIQKMQPDANGKYPYTGSLDCAVKTFKSGGPFKFYTGFPVYCVRIAPHVMMTWIFLNQIQKFEKKIGI

SEQ ID NO: 7186 - protein, 262 aa, Zea mays subsp. mays
  peptide (1)..(262): Ceres Seq. ID no. 12556703
MVKVRIQLGEGSAGQVTRNMLANEGVRSFYKGLSAGLLRQATYTTARLGSFRVLTNKAVEKNEGKPLPLFQKAFIGLTAGAIGACVGSPADLALIRMQADSTLPVAQRRNYKNAFHALYRISGDEGVLALWKGAGPTVVRAMALNMGMLASYDQSVELFRDKFGAGEISTVVGASAVSGFFASACSLPFDYVKTQIQKMQPDANGKYPYTGSLDCAVKTFKSGGPFKFYTGFPVYCVRIAPHVMMTWIFLNQIQKFEKKIGI

SEQ ID NO: 7187 - DNA, 1521 bp, Zea mays subsp. mays
  misc_feature (1)..(1521): Ceres Seq. ID no. 12367423
  misc_feature (1)..(1521): Ortholog of  Ceres SEQ ID NO 12617080 as cited in SEQ ID NO 63943
  misc_feature (1)..(1521): Ortholog of  Ceres SEQ ID NO 13657621 as cited in SEQ ID NO 65802
aattggccgttattattgtactccccttctccattccactcgtccccttcctccccttccgtctcgcaacaggcgaggcgagagaactcgtcgtcgaagcgaaatatagccagcgcaccaatcccaattcccaacccgacgcaacgcaacgcaacgcaacgcacctcatcccggttgcttgcgccaacgtaggggatcgcctcgccccgccccgccccgccccgccccgcttcgcgctcctccttcctgcctgccgtaaccgcgccgtgcagctgtgcaagggcatttctgcattcatgtgggcaagctggatgattcaaagttgttgatatgtggtggttcagtaggttgttgagtctagataccagatgatggacctgtccacgacttcagtgctggcagctaaagcttacaaatacaaagcagaatcacttgttaaggagtaccttcttgcagattcgtatgtttcatacactgctgtacttggtgggatcctgatgtgcaagatggcttatgacataacaagcataatcagctcattgtactacaagggttatggttcacttacaaaaacccaaaagcttgagtggaacaacaggggcatgtccactatccatgcgatattcatcacagtggtgtcagtgtacctggttttcttctccaacctattctctgatgagctggatggactagtaacttatcggagttcaaatctatccaatttcactttgggggtttctgttgggtatttcatcactgaccttgctatgatattatgggcttatccttctcttggtggaatggagtatgtccttcaccatatgctgtcgcttatttctatagtctatgctatgtattctggggaaggacagttgtacacatacatggttctcatctctgaaacaaccacacctggaatcaacctccgatggttccttgataccgctggactgaaaaaatccaaggcctatcttgtcaatggtgttacgatgtttattgcatggctggtggcacggatcattttgttcgtctacttgttttaccacatttacttccactatgatcaggtcaagcagatgcatacgtttagctgcattctgatatttgctgtgcctacaatactgctcgtcatgaacacaatgtggtttgccaagatcttgagaggccttaaaaagacgctagccaagaggcagtgaaaagaagaatggtaaaacaagctcaaggacatcgatagccaaaatccatcccctcgtacagtcactttacagttacatgcacttcccgagtaaagccgtcagtgcagctcgccgtcagtaaagcccttgtacatgatcctgaaatacgctaaacacagctcatttttttccctggatgctctgccttgtacatacggccgtctgtattgggtgcttacaccttgagggatcatttggtgaccagaaaaatagatgggaaagaaatccctttgttacggcctcgttcgtaatatttttttctgaataataattcacatttttttct

SEQ ID NO: 7188 - protein, 275 aa, Zea mays subsp. mays
  peptide (1)..(275): Ceres Seq. ID no. 12367424
MMDLSTTSVLAAKAYKYKAESLVKEYLLADSYVSYTAVLGGILMCKMAYDITSIISSLYYKGYGSLTKTQKLEWNNRGMSTIHAIFITVVSVYLVFFSNLFSDELDGLVTYRSSNLSNFTLGVSVGYFITDLAMILWAYPSLGGMEYVLHHMLSLISIVYAMYSGEGQLYTYMVLISETTTPGINLRWFLDTAGLKKSKAYLVNGVTMFIAWLVARIILFVYLFYHIYFHYDQVKQMHTFSCILIFAVPTILLVMNTMWFAKILRGLKKTLAKRQ

SEQ ID NO: 7189 - protein, 274 aa, Zea mays subsp. mays
  peptide (1)..(274): Ceres Seq. ID no. 12367425
MDLSTTSVLAAKAYKYKAESLVKEYLLADSYVSYTAVLGGILMCKMAYDITSIISSLYYKGYGSLTKTQKLEWNNRGMSTIHAIFITVVSVYLVFFSNLFSDELDGLVTYRSSNLSNFTLGVSVGYFITDLAMILWAYPSLGGMEYVLHHMLSLISIVYAMYSGEGQLYTYMVLISETTTPGINLRWFLDTAGLKKSKAYLVNGVTMFIAWLVARIILFVYLFYHIYFHYDQVKQMHTFSCILIFAVPTILLVMNTMWFAKILRGLKKTLAKRQ

SEQ ID NO: 7190 - protein, 232 aa, Zea mays subsp. mays
  peptide (1)..(232): Ceres Seq. ID no. 12367426
MCKMAYDITSIISSLYYKGYGSLTKTQKLEWNNRGMSTIHAIFITVVSVYLVFFSNLFSDELDGLVTYRSSNLSNFTLGVSVGYFITDLAMILWAYPSLGGMEYVLHHMLSLISIVYAMYSGEGQLYTYMVLISETTTPGINLRWFLDTAGLKKSKAYLVNGVTMFIAWLVARIILFVYLFYHIYFHYDQVKQMHTFSCILIFAVPTILLVMNTMWFAKILRGLKKTLAKRQ

SEQ ID NO: 7191 - DNA, 1965 bp, Zea mays subsp. mays
  misc_feature (1)..(1965): Ceres Seq. ID no. 12406856
  misc_feature (1)..(1965): Ortholog of  Ceres SEQ ID NO 14312989 as cited in SEQ ID NO 59121
  misc_feature (1)..(1965): Ortholog of  Ceres SEQ ID NO 12586556 as cited in SEQ ID NO 64667
  misc_feature (1)..(1965): Ortholog of  Ceres SEQ ID NO 13660894 as cited in SEQ ID NO 67475
gtaggatcgtcacatgtttaccaactaataactagttaactactctcggtaccacgggtccacggcgggccgaactcgagcccctacgccgatcttatggagcttctctaatctaaaatatatacgatgtaaccttttctaatctaaaatatatacaatgtaacgtagaagtagattacatactgcagagtttagttcaattcctcgtaaactttttttatgcctccatccctgtttgcaaaaggtgcatcacttcgatcggcttcaagctccatgtctaagattcatggacatggatgaacatgaacgtgagatgacagatgaggtagaggcgtagggctcatgtgcgcacgcacgacaaccaccagctcatggatgaagcagctgatgaacgcttcccggcaaggccgccacggccgcgtcctccaccttctcttcacccacctacgacgcggcgacagaggggcgtggtagagctgcaccgcgcggccgtccccacggcactccgcgcctgcgcgcgcctcggaaacgcctcttccggccgcctaatccacgcgctcgtcctcacccggttcccgtccctcgcctccgacgccgtcgccgccaccgcgcttctcgacatgtacgccaaatgtggccttgtcgcgagtgcccagagggtgttcgacgaaatgccgagtagggatgacctcgtcgcctggaacgcgctggtcgcatgctacgcgcgccacgccctcccggagcgcgcactggtgctggctatcaaaatgcggggccagtgcctgtgccccgacctggtgacatggaacgccgtcgtctccggttttgcactggccggcgacgaccaaatggccacaaaattggtcggcgccatggaggtggacgggttccagccggacgtggtcacttggacatcgcttgtatccggctcggtgctgaacttccagtatgccagggcgcgcgtgctgttccggagaatgatgaccactgccaaccctgtcctgccgagctcggccacgattgccagcatcctgcctgcgttcgccaatgttgctgacgtgaagcgtggcaaggaagtccacgcctacgccgtggtgaccggcgtcgaacaggagctcaatgtgagcagtgctctagtagatatgtacacgaagagcgggtttgtggtcgaagcccgcaggctgtttgacaagatgtcggaaagaagcacggtgacatggaattccatgatcttcgggctggcgaattccggtcactgccaagaagccatcggtctcttcaaccggatgctgtgcgacggagcaaggccggatcacctgacgttcaccgccgctctgacggtttgcagctacgccggcatggtggagctcgggaagggcctgtaccgcgccatgcaggaagaacacggcatcgagccgaggctggagcattgtgcatgcatggtgcatttgcttggccgagccggctggctcgccgaggcttatgatttcatcaaagccatgcccctggggcctgactgcttcgtttggggggcgttgctgggggcatgccggagccatggcgacatcaagcttgccgagctggctgcgtcccacctgctaaccgtcgagccggccaatgcagcaagttgcctcctactctcggactcgctggcaagtgtaggcagacaagatgatgttatgaagatgaagaggctggcaaagagacggcgcatgaagaagctgcatggctgcagctggttagagtgagtctacataatcgagagcgatatatggtctgagatcaaaggaacagaattgattgatcacagattcatagttgcccagatttgcagaagcaaacatccaagagtttcctacaaatgcatgtgttggtctatttgatgctaccatgaaagtagaaatgttgtgctacttagatttaatggatgtaatgtttagcattcacactgtttactcaacgtcg

SEQ ID NO: 7192 - protein, 458 aa, Zea mays subsp. mays
  peptide (1)..(458): Ceres Seq. ID no. 12406857
MDEAADERFPARPPRPRPPPSLHPPTTRRQRGVVELHRAAVPTALRACARLGNASSGRLIHALVLTRFPSLASDAVAATALLDMYAKCGLVASAQRVFDEMPSRDDLVAWNALVACYARHALPERALVLAIKMRGQCLCPDLVTWNAVVSGFALAGDDQMATKLVGAMEVDGFQPDVVTWTSLVSGSVLNFQYARARVLFRRMMTTANPVLPSSATIASILPAFANVADVKRGKEVHAYAVVTGVEQELNVSSALVDMYTKSGFVVEARRLFDKMSERSTVTWNSMIFGLANSGHCQEAIGLFNRMLCDGARPDHLTFTAALTVCSYAGMVELGKGLYRAMQEEHGIEPRLEHCACMVHLLGRAGWLAEAYDFIKAMPLGPDCFVWGALLGACRSHGDIKLAELAASHLLTVEPANAASCLLLSDSLASVGRQDDVMKMKRLAKRRRMKKLHGCSWLE

SEQ ID NO: 7193 - protein, 375 aa, Zea mays subsp. mays
  peptide (1)..(375): Ceres Seq. ID no. 12406858
MYAKCGLVASAQRVFDEMPSRDDLVAWNALVACYARHALPERALVLAIKMRGQCLCPDLVTWNAVVSGFALAGDDQMATKLVGAMEVDGFQPDVVTWTSLVSGSVLNFQYARARVLFRRMMTTANPVLPSSATIASILPAFANVADVKRGKEVHAYAVVTGVEQELNVSSALVDMYTKSGFVVEARRLFDKMSERSTVTWNSMIFGLANSGHCQEAIGLFNRMLCDGARPDHLTFTAALTVCSYAGMVELGKGLYRAMQEEHGIEPRLEHCACMVHLLGRAGWLAEAYDFIKAMPLGPDCFVWGALLGACRSHGDIKLAELAASHLLTVEPANAASCLLLSDSLASVGRQDDVMKMKRLAKRRRMKKLHGCSWLE

SEQ ID NO: 7194 - protein, 358 aa, Zea mays subsp. mays
  peptide (1)..(358): Ceres Seq. ID no. 12406859
MPSRDDLVAWNALVACYARHALPERALVLAIKMRGQCLCPDLVTWNAVVSGFALAGDDQMATKLVGAMEVDGFQPDVVTWTSLVSGSVLNFQYARARVLFRRMMTTANPVLPSSATIASILPAFANVADVKRGKEVHAYAVVTGVEQELNVSSALVDMYTKSGFVVEARRLFDKMSERSTVTWNSMIFGLANSGHCQEAIGLFNRMLCDGARPDHLTFTAALTVCSYAGMVELGKGLYRAMQEEHGIEPRLEHCACMVHLLGRAGWLAEAYDFIKAMPLGPDCFVWGALLGACRSHGDIKLAELAASHLLTVEPANAASCLLLSDSLASVGRQDDVMKMKRLAKRRRMKKLHGCSWLE

SEQ ID NO: 7195 - DNA, 1868 bp, Zea mays subsp. mays
  misc_feature (1)..(1868): Ceres Seq. ID no. 12404960
  misc_feature (1)..(1868): Ortholog of  Ceres SEQ ID NO 15169670 as cited in SEQ ID NO 62085
  misc_feature (1)..(1868): Ortholog of  Ceres SEQ ID NO 13599262 as cited in SEQ ID NO 0
cccgtcactcttgtgtcctcctaaaaccctaaccctccgccgcccctcggacccccaaccagcagctgccgcggccatccgccggcgagatggcgctgtacctgctgttcgagtcggcgtccggctacggtctattccacgcgtacggcatcgatgagatcgggcagagcgtggaggccgttcgctcctccgtgctggacctcgatcgcttcggcaaggccgtcaagctcaccgccttcaaccctttctcctctgccgtcgatgcactcaatcagtgcaacgcttatatccgaaggatcatgaccgatgaactgaggagtttcctggagctgaacctgccgaagcccaaggaggggaagaaggccaaatacagcctcggggtcgtcgagcccaaggtcggttctcacatctccgaggtcaccggcattccctgccagagcaacgaattcgtccaggagctgctccgcggtgtccgcctccacttcgaccgtttcatcaacgagcttaaggattctgacttggagaaggcccagcttggcctggggcatagctacagcagggccaaggtgaagttcaatgtgaatcgtgttgacaacatggtgatccaggcaatctttctattggatacgcttgacaaggacatcaattccttctccatgagagtcagggaatggttctcatggcacttccctgagcttgtcaagattgtgaacgacaattacctatatgccaagcttgctaagtttatcgtgaacaaatctgatttgacggaaaaagatattcctgctttggctgatatagttggcgacgaggacaaggctaaagaaattgttgaagcagcaaaggcttcaatgggccaggatctgtcaccagttgatttgatcaatgtccagcaatttgcccaaagggttatgaatctctctgagtatcgcaaaaacctttatgagtatcttgtgactaagatgaatgatattgcacccaacctgacatcgttgattggtgaagtagttggagctcgcctaatctctcatgctggcagtctttcaaaccttgctaagtgtgcagcctccacccttcaaatacttggtgctgagaaggccctattcagagcactgaaaactcgagggaacacaccaaagtatgggcttatattccactcctcctttattggccgtgcttcaactaagaacaagggcagaatggctcgttacctggcaaacaaatgctcgattgcttcacgcattgactgctactcggaggctagcacctctgtctttgggcaaaagttgcgtgagcaagtcgaggagagactggaattctatgacaagggtgttgcgcctcgtaaaaaccttgatgtgatgaaagccgctattgacagcatggtcaatggcacctcaatggatgatgatgatatcgagaagaccgatgcatctcccaagaaaagcaagaaaaagaagaccaaaaccaaggctgatggtgatgcaatggacgtggataaaccctccaacgttgctggtggagaagctgagcctggaactgagaagaagaagaagaaaaagaagcataagctggaggaggaggcacaggaggagaacggtgcagcagatactacccctaagaaaaagaaaaagaagagccgtgaagcttccgaagaagctgaacctaagaccgccaccgatggtaagaagaagaaaaagaaggctaaggccgaggatgatgagtagccaagttatttgttgtatggcgtatgaatccgagagtatttgttgaaaaacagagatgaacgcctgcctaactcaactagcttgtagttcatgaggcgtttgatgcaaacccaactcaaagtacgaagttttcctatcgtcttt

SEQ ID NO: 7196 - protein, 544 aa, Zea mays subsp. mays
  peptide (1)..(544): Ceres Seq. ID no. 12404961
MALYLLFESASGYGLFHAYGIDEIGQSVEAVRSSVLDLDRFGKAVKLTAFNPFSSAVDALNQCNAYIRRIMTDELRSFLELNLPKPKEGKKAKYSLGVVEPKVGSHISEVTGIPCQSNEFVQELLRGVRLHFDRFINELKDSDLEKAQLGLGHSYSRAKVKFNVNRVDNMVIQAIFLLDTLDKDINSFSMRVREWFSWHFPELVKIVNDNYLYAKLAKFIVNKSDLTEKDIPALADIVGDEDKAKEIVEAAKASMGQDLSPVDLINVQQFAQRVMNLSEYRKNLYEYLVTKMNDIAPNLTSLIGEVVGARLISHAGSLSNLAKCAASTLQILGAEKALFRALKTRGNTPKYGLIFHSSFIGRASTKNKGRMARYLANKCSIASRIDCYSEASTSVFGQKLREQVEERLEFYDKGVAPRKNLDVMKAAIDSMVNGTSMDDDDIEKTDASPKKSKKKKTKTKADGDAMDVDKPSNVAGGEAEPGTEKKKKKKKHKLEEEAQEENGAADTTPKKKKKKSREASEEAEPKTATDGKKKKKKAKAEDDE

SEQ ID NO: 7197 - protein, 474 aa, Zea mays subsp. mays
  peptide (1)..(474): Ceres Seq. ID no. 12404962
MTDELRSFLELNLPKPKEGKKAKYSLGVVEPKVGSHISEVTGIPCQSNEFVQELLRGVRLHFDRFINELKDSDLEKAQLGLGHSYSRAKVKFNVNRVDNMVIQAIFLLDTLDKDINSFSMRVREWFSWHFPELVKIVNDNYLYAKLAKFIVNKSDLTEKDIPALADIVGDEDKAKEIVEAAKASMGQDLSPVDLINVQQFAQRVMNLSEYRKNLYEYLVTKMNDIAPNLTSLIGEVVGARLISHAGSLSNLAKCAASTLQILGAEKALFRALKTRGNTPKYGLIFHSSFIGRASTKNKGRMARYLANKCSIASRIDCYSEASTSVFGQKLREQVEERLEFYDKGVAPRKNLDVMKAAIDSMVNGTSMDDDDIEKTDASPKKSKKKKTKTKADGDAMDVDKPSNVAGGEAEPGTEKKKKKKKHKLEEEAQEENGAADTTPKKKKKKSREASEEAEPKTATDGKKKKKKAKAEDDE

SEQ ID NO: 7198 - protein, 375 aa, Zea mays subsp. mays
  peptide (1)..(375): Ceres Seq. ID no. 12404963
MVIQAIFLLDTLDKDINSFSMRVREWFSWHFPELVKIVNDNYLYAKLAKFIVNKSDLTEKDIPALADIVGDEDKAKEIVEAAKASMGQDLSPVDLINVQQFAQRVMNLSEYRKNLYEYLVTKMNDIAPNLTSLIGEVVGARLISHAGSLSNLAKCAASTLQILGAEKALFRALKTRGNTPKYGLIFHSSFIGRASTKNKGRMARYLANKCSIASRIDCYSEASTSVFGQKLREQVEERLEFYDKGVAPRKNLDVMKAAIDSMVNGTSMDDDDIEKTDASPKKSKKKKTKTKADGDAMDVDKPSNVAGGEAEPGTEKKKKKKKHKLEEEAQEENGAADTTPKKKKKKSREASEEAEPKTATDGKKKKKKAKAEDDE

SEQ ID NO: 7199 - DNA, 1275 bp, Zea mays subsp. mays
  misc_feature (1)..(1275): Ceres Seq. ID no. 12366288
  misc_feature (1)..(1275): Ortholog of  Ceres SEQ ID NO 13659644 as cited in SEQ ID NO 67118
  misc_feature (1)..(1275): Ortholog of  Ceres SEQ ID NO 14302856 as cited in SEQ ID NO 68824
aaactatccgctgctgtagtagagatgctctcgatgcggccacccagcaccaccttgtcgcgccccttgatttggccgagacggggtcgcctcgggggagccgccgcgccgcaatatgttagcgccgcggcaccggcgcccgctctggagccagctgcgcctccggagagcgtctcctttccgattctggtgaatggctgcactggtaacatggggttatctgtcgctgaggctgctgctctgaggggccttcacctagtccctgtttcattcagtagtagagagaaggttgaaaaaacaatacaagttggacaaacagacattcaaatatatggtccttctaaaagagaagatgttgtttcatctattgctgatgaattcccagatgtcattgttgtggactacacaggacccaattctgtgaactctaatgctgagctctattgcaagcttggcttgccatttgtgatgggcacaactggtgggaacaagcatttgctctacaagtcagtgcaagattcaaaaaattatgcactaatatctccacagatgggcaaacaagtggttgcatttgttgctgctatgaaaatcatggctgagcagtttccaggggccttttcaggttatcatttagaggttttagaatcccatcaagctggcaagctggatacatctggtacagctaaagacgtgattgcttgttttgagaaactaggtgtgtcatatgatatgaaccggatggttaagattagagatccagaacagcagcttgagatggtgggtgtccctgaagaacacatccaagggcatgcattccatctgtatcatctcacttctcctgatgacagtgtttcatttgagttccagcacaatgtttgtggccgttcaatctatgccgaaggaactattgacgcggcaatgtttctgcataggaaggtgcaatcaaaggattctaagagaatatataatatggatgatgtcctgcgagaagaaacttgccataaagcctactgattagctgctgataaataatactccctccgttcttttttatttttcgctgtttagttcaaaaataaactagcgagcgacaaatattcaaggatggaggcaatattaagcacagcgctgttgtttttaccgttttttgttagaataatgcactgcgcaccttcacccattttagacttttgtgtaattgggttgaatatgagaggttcaataggaaaaaaatgacatgcttctagtgatggcaatcataatttaatattctcg

SEQ ID NO: 7200 - protein, 337 aa, Zea mays subsp. mays
  peptide (1)..(337): Ceres Seq. ID no. 12366289
KLSAAVVEMLSMRPPSTTLSRPLIWPRRGRLGGAAAPQYVSAAAPAPALEPAAPPESVSFPILVNGCTGNMGLSVAEAAALRGLHLVPVSFSSREKVEKTIQVGQTDIQIYGPSKREDVVSSIADEFPDVIVVDYTGPNSVNSNAELYCKLGLPFVMGTTGGNKHLLYKSVQDSKNYALISPQMGKQVVAFVAAMKIMAEQFPGAFSGYHLEVLESHQAGKLDTSGTAKDVIACFEKLGVSYDMNRMVKIRDPEQQLEMVGVPEEHIQGHAFHLYHLTSPDDSVSFEFQHNVCGRSIYAEGTIDAAMFLHRKVQSKDSKRIYNMDDVLREETCHKAY

SEQ ID NO: 7201 - protein, 329 aa, Zea mays subsp. mays
  peptide (1)..(329): Ceres Seq. ID no. 12366290
MLSMRPPSTTLSRPLIWPRRGRLGGAAAPQYVSAAAPAPALEPAAPPESVSFPILVNGCTGNMGLSVAEAAALRGLHLVPVSFSSREKVEKTIQVGQTDIQIYGPSKREDVVSSIADEFPDVIVVDYTGPNSVNSNAELYCKLGLPFVMGTTGGNKHLLYKSVQDSKNYALISPQMGKQVVAFVAAMKIMAEQFPGAFSGYHLEVLESHQAGKLDTSGTAKDVIACFEKLGVSYDMNRMVKIRDPEQQLEMVGVPEEHIQGHAFHLYHLTSPDDSVSFEFQHNVCGRSIYAEGTIDAAMFLHRKVQSKDSKRIYNMDDVLREETCHKAY

SEQ ID NO: 7202 - protein, 326 aa, Zea mays subsp. mays
  peptide (1)..(326): Ceres Seq. ID no. 12366291
MRPPSTTLSRPLIWPRRGRLGGAAAPQYVSAAAPAPALEPAAPPESVSFPILVNGCTGNMGLSVAEAAALRGLHLVPVSFSSREKVEKTIQVGQTDIQIYGPSKREDVVSSIADEFPDVIVVDYTGPNSVNSNAELYCKLGLPFVMGTTGGNKHLLYKSVQDSKNYALISPQMGKQVVAFVAAMKIMAEQFPGAFSGYHLEVLESHQAGKLDTSGTAKDVIACFEKLGVSYDMNRMVKIRDPEQQLEMVGVPEEHIQGHAFHLYHLTSPDDSVSFEFQHNVCGRSIYAEGTIDAAMFLHRKVQSKDSKRIYNMDDVLREETCHKAY

SEQ ID NO: 7203 - DNA, 1706 bp, Zea mays subsp. mays
  misc_feature (1)..(1706): Ceres Seq. ID no. 12386684
  misc_feature (1)..(1706): Ortholog of  Ceres SEQ ID NO 15169316 as cited in SEQ ID NO 54821
  misc_feature (1)..(1706): Ortholog of  Ceres SEQ ID NO 13598294 as cited in SEQ ID NO 61982
agtcggtctctctcactctctcttgtctccaagtttgtaaccctagccgccaagcttgaagctccagccgtgctcgtgtagggccgcaggccatccgggctccggcttccagcatctaccaggcgtccttagaatacggtgcagcgagcagcaagtcgccgagcagccgagccaccgccgaacacagggcgccgccgagcagccgagccgccgccgagcgccgagtcttctctgagtgacttcggtacagacgacaaactttctccacacataccgcgccactccgccactcactgtgctgacggatggggtggtgctccccgtccacttcccggcagcttctctccacgacctcactcttcaccttcggcgcgggtctccttaccttcggcatccacctctcctacgtccacatcgagccccagcgcgctcgcacgctcgctcgggaccaattcgtccgtgactacctccgcaagaagcacgacaagtagcccgccttctgcggtccccaggtgattgcttggtagtcggagacgatggccctggtcccatcgaggtccgacagcgaggccttgatcccggaggtggagatgaatgccggcgccgaccagaccgcaacaacggcgcgggtcaccgtcgttcaggcgtcgtccgtgttctacgacacccctgcgactctcgataaagcggagaaattggtagcagaagcagctgggtatggttcacagttggttttgtttccggaagtctttgttggtggctacccacatggatctacctttggactggttgtcggcaatcgcactgccaagggaaaggaagactttcagaagtatcacgcatctgccatagatgtgcctggtccagaagtgtcccgcttatctgcattagctggaaaatataaggtgtttctggtgataggggtggttgagagggcaggatatacactttacaacacggtgctctccttcgatccactgggaaaatacctagggaagcaccgcaaggtcatgcctactgcactagaacgtgtattctgggggtttggagatggatctacaatacctgtctacgatactccgattggaaaaatgggtgctctcatttgctgggaaaacagaatgccacttctcaggacggccatgtatgccaaaggtattgagatatattgtgctcccacggttgattgcatgccaacttggctgtcttctatgacacatatcgcccttgaagggggatgctttgtgctgtcagcgtgccagttctgtcgtagaaagaactaccctccccctcccgagtacacattttgtggcctagaggaagagccatccccggaatccgttgtttgttctggagggagtgtcatcatctcaccattgggaacagtgttggcgggtcccaactacgaaagtgaggcccttctcactgctgacctggaccttggagagattgttcgagccaagtttgattttgacgtggtgggccactactcgcgacctgaggtgctgagtttagtggtgaagagcgatccaaagcccgccgtctctttcatctcagccgctggtagggatgatgactatgtgcagacctaatgacaaacatatctttggtctttagcttccttatacggcaatcgcatgcatctgtataattgtgggtttccggaacgttgcacgttccgtcagaataataataaactgttatgt

SEQ ID NO: 7204 - protein, 351 aa, Zea mays subsp. mays
  peptide (1)..(351): Ceres Seq. ID no. 12386685
MALVPSRSDSEALIPEVEMNAGADQTATTARVTVVQASSVFYDTPATLDKAEKLVAEAAGYGSQLVLFPEVFVGGYPHGSTFGLVVGNRTAKGKEDFQKYHASAIDVPGPEVSRLSALAGKYKVFLVIGVVERAGYTLYNTVLSFDPLGKYLGKHRKVMPTALERVFWGFGDGSTIPVYDTPIGKMGALICWENRMPLLRTAMYAKGIEIYCAPTVDCMPTWLSSMTHIALEGGCFVLSACQFCRRKNYPPPPEYTFCGLEEEPSPESVVCSGGSVIISPLGTVLAGPNYESEALLTADLDLGEIVRAKFDFDVVGHYSRPEVLSLVVKSDPKPAVSFISAAGRDDDYVQT

SEQ ID NO: 7205 - protein, 333 aa, Zea mays subsp. mays
  peptide (1)..(333): Ceres Seq. ID no. 12386686
MNAGADQTATTARVTVVQASSVFYDTPATLDKAEKLVAEAAGYGSQLVLFPEVFVGGYPHGSTFGLVVGNRTAKGKEDFQKYHASAIDVPGPEVSRLSALAGKYKVFLVIGVVERAGYTLYNTVLSFDPLGKYLGKHRKVMPTALERVFWGFGDGSTIPVYDTPIGKMGALICWENRMPLLRTAMYAKGIEIYCAPTVDCMPTWLSSMTHIALEGGCFVLSACQFCRRKNYPPPPEYTFCGLEEEPSPESVVCSGGSVIISPLGTVLAGPNYESEALLTADLDLGEIVRAKFDFDVVGHYSRPEVLSLVVKSDPKPAVSFISAAGRDDDYVQT

SEQ ID NO: 7206 - protein, 193 aa, Zea mays subsp. mays
  peptide (1)..(193): Ceres Seq. ID no. 12386687
MPTALERVFWGFGDGSTIPVYDTPIGKMGALICWENRMPLLRTAMYAKGIEIYCAPTVDCMPTWLSSMTHIALEGGCFVLSACQFCRRKNYPPPPEYTFCGLEEEPSPESVVCSGGSVIISPLGTVLAGPNYESEALLTADLDLGEIVRAKFDFDVVGHYSRPEVLSLVVKSDPKPAVSFISAAGRDDDYVQT

SEQ ID NO: 7207 - DNA, 1437 bp, Zea mays subsp. mays
  misc_feature (1)..(1437): Ceres Seq. ID no. 12387026
  misc_feature (1)..(1437): Ortholog of  Ceres SEQ ID NO 15171279 as cited in SEQ ID NO 51378
  misc_feature (1)..(1437): Ortholog of  Ceres SEQ ID NO 13596816 as cited in SEQ ID NO 62287
aatcgaagcaaatacaagcagagagttttttttggagaggcgtgtaagcataggcagaagatacacagtagcctcttgttgaacacggggatggcaaggcagagtgcagcctccatgttggctactacgacgccgttgcttctcagcgtcttggccaacatcgccgtggtggagtccatcggggtgtcctacggcatgagcggcgacaacctgccgccggcgagcaccgtcatcggcatgtacaaggacaacggcatcccgctgatgcggatctacgcgccggaccaggcggctctccaggccgtgggcggcacgggcatccgcgtcgtggccggcgcgcccaatgacgtgctgtccagcctcgccgccagccccgccgcggccgcgtcgtgggtccgcaacaacatccaggcctaccccaaggtcgccttccgctgcgtctgcgtgggcaacgaggtggaaggcggcgcggcgcagagcctggtcccggccatggagaacgtccgcgccgcgctggtcgccgccgggctggacggcatcaaggtcaccacgtccgtgtcgcaggccatcctcggcggctacaagccgccgtccgccgccgagttcacggacgaggcgcaggggttcatgggccccgtcctcaggttcctggcgcgcaccggcgcgcctctcatggccagcgtctacccctacttcacctacgccaccaacccggctgccatggacctcagctacgcgctcttcaccgctccgggcaccgttctccaggacggcgcctacgagtaccagaacctcttcgacgccaccgtcgactccttctacgtggcgatggccaaccacgggggctccggcgtcacccttgtggtgtcggagagcgggtggccgtccgctggcggcgtcgcggcgtcacccgagaatgcggccatctacaaccagaacctgatcaaccacgtcggccggggaacgccgcgccacccgggcgccatcgagaccatcctcttctccatgttcaacgagaacctcaagcagagcggcgtggagcagaactgggggctcttctaccctaacatgcagcgcgtctaccccatcaagttcaactgaagctagctcaatcgaggtgcacgtccacgtaccctacagtctacacacatcaatcaataggtatatatgtatcactgcatgcaacctgtatacttatgcatcccagctgcaggcgatcatgtattgctttgcgaccaccaccgggagtgtctaaggaggctactctcagatgagtatgccatgaggattcttatacgtcgagtcgtcgagagaccaacgcatgggcaacgcgtgtgaagtgtgatcaatatttttctttgatttttttttgtgttttcactgaaattgaacttcgaataaaaaaaggcagctcttcggagggctgagggatttgtc

SEQ ID NO: 7208 - protein, 366 aa, Zea mays subsp. mays
  peptide (1)..(366): Ceres Seq. ID no. 12387027
NRSKYKQRVFFGEACKHRQKIHSSLLLNTGMARQSAASMLATTTPLLLSVLANIAVVESIGVSYGMSGDNLPPASTVIGMYKDNGIPLMRIYAPDQAALQAVGGTGIRVVAGAPNDVLSSLAASPAAAASWVRNNIQAYPKVAFRCVCVGNEVEGGAAQSLVPAMENVRAALVAAGLDGIKVTTSVSQAILGGYKPPSAAEFTDEAQGFMGPVLRFLARTGAPLMASVYPYFTYATNPAAMDLSYALFTAPGTVLQDGAYEYQNLFDATVDSFYVAMANHGGSGVTLVVSESGWPSAGGVAASPENAAIYNQNLINHVGRGTPRHPGAIETILFSMFNENLKQSGVEQNWGLFYPNMQRVYPIKFN

SEQ ID NO: 7209 - protein, 336 aa, Zea mays subsp. mays
  peptide (1)..(336): Ceres Seq. ID no. 12387028
MARQSAASMLATTTPLLLSVLANIAVVESIGVSYGMSGDNLPPASTVIGMYKDNGIPLMRIYAPDQAALQAVGGTGIRVVAGAPNDVLSSLAASPAAAASWVRNNIQAYPKVAFRCVCVGNEVEGGAAQSLVPAMENVRAALVAAGLDGIKVTTSVSQAILGGYKPPSAAEFTDEAQGFMGPVLRFLARTGAPLMASVYPYFTYATNPAAMDLSYALFTAPGTVLQDGAYEYQNLFDATVDSFYVAMANHGGSGVTLVVSESGWPSAGGVAASPENAAIYNQNLINHVGRGTPRHPGAIETILFSMFNENLKQSGVEQNWGLFYPNMQRVYPIKFN

SEQ ID NO: 7210 - protein, 328 aa, Zea mays subsp. mays
  peptide (1)..(328): Ceres Seq. ID no. 12387029
MLATTTPLLLSVLANIAVVESIGVSYGMSGDNLPPASTVIGMYKDNGIPLMRIYAPDQAALQAVGGTGIRVVAGAPNDVLSSLAASPAAAASWVRNNIQAYPKVAFRCVCVGNEVEGGAAQSLVPAMENVRAALVAAGLDGIKVTTSVSQAILGGYKPPSAAEFTDEAQGFMGPVLRFLARTGAPLMASVYPYFTYATNPAAMDLSYALFTAPGTVLQDGAYEYQNLFDATVDSFYVAMANHGGSGVTLVVSESGWPSAGGVAASPENAAIYNQNLINHVGRGTPRHPGAIETILFSMFNENLKQSGVEQNWGLFYPNMQRVYPIKFN

SEQ ID NO: 7211 - DNA, 907 bp, Zea mays subsp. mays
  misc_feature (1)..(907): Ceres Seq. ID no. 12362307
  misc_feature (1)..(907): Ortholog of  Ceres SEQ ID NO 13638658 as cited in SEQ ID NO 51921
  misc_feature (1)..(907): Ortholog of  Ceres SEQ ID NO 14306522 as cited in SEQ ID NO 53365
  misc_feature (1)..(907): Ortholog of  Ceres SEQ ID NO 15175175 as cited in SEQ ID NO 0
atcagattgggagactcacttcactcactcgggagtcgggtcctcctcgactcagctcctccacaaacaaagccaccaccatcccaacccaaacacatcggccgaccacgggcgccgccatgtccaccgctgacgcggcgagcccggccctggcgccggactgggacgcgccggcgggcgaaggcctggccctggcccagttcgccgcgggctgcttctggagcgtggagctggtgtaccagcgcctcccaggcgtggcgcgcacggaggtggggtactcgcagggccaccgccacgcccccacctaccgcgacgtctgcggcaacggcacgggccacgccgaggtggtccgcgtgcactacgaccccaaggcctgcccctacgacgtcctcctcgacgtcttctgggccaagcacaaccccaccacgctcaacagacagggcaacgacgtcgggacgcagtaccggtcgggcatctactactacacggcagagcaggagacgctggcgcgcgagtcgctggctgcgaagcagaaggagtggcaggacgcgatcgtcaccgaggtcctgccggcgcgacggttctaccccgccgaggagtaccaccagcagtacctcgagaagggcgggcagtccgccaagaagggctgcagcgatcccatccgctgctacggttgagtaccgaccgacccctgtccggagcaccgaagacgccgtgaatgaactgtgctgcatcgatgcgttgtactacctccacctccgctctcgaatagttgttgcccgctagttcattttataactaaacgaccataaataaaaaagaacggagggaagatattgtaactaaagtgtaagatgacttttttgtgttgtgtatcgtactactgcttgttcagagatctacgttg

SEQ ID NO: 7212 - protein, 261 aa, Zea mays subsp. mays
  peptide (1)..(261): Ceres Seq. ID no. 12362308
IRLGDSLHSLGSRVLLDSAPPQTKPPPSQPKHIGRPRAPPCPPLTRRARPWRRTGTRRRAKAWPWPSSPRAASGAWSWCTSASQAWRARRWGTRRATATPPPTATSAATARATPRWSACTTTPRPAPTTSSSTSSGPSTTPPRSTDRATTSGRSTGRASTTTRQSRRRWRASRWLRSRRSGRTRSSPRSCRRDGSTPPRSTTSSTSRRAGSPPRRAAAIPSAATVEYRPTPVRSTEDAVNELCCIDALYYLHLRSRIVVAR

SEQ ID NO: 7213 - protein, 224 aa, Zea mays subsp. mays
  peptide (1)..(224): Ceres Seq. ID no. 12362309
QIGRLTSLTRESGPPRLSSSTNKATTIPTQTHRPTTGAAMSTADAASPALAPDWDAPAGEGLALAQFAAGCFWSVELVYQRLPGVARTEVGYSQGHRHAPTYRDVCGNGTGHAEVVRVHYDPKACPYDVLLDVFWAKHNPTTLNRQGNDVGTQYRSGIYYYTAEQETLARESLAAKQKEWQDAIVTEVLPARRFYPAEEYHQQYLEKGGQSAKKGCSDPIRCYG

SEQ ID NO: 7214 - protein, 185 aa, Zea mays subsp. mays
  peptide (1)..(185): Ceres Seq. ID no. 12362310
MSTADAASPALAPDWDAPAGEGLALAQFAAGCFWSVELVYQRLPGVARTEVGYSQGHRHAPTYRDVCGNGTGHAEVVRVHYDPKACPYDVLLDVFWAKHNPTTLNRQGNDVGTQYRSGIYYYTAEQETLARESLAAKQKEWQDAIVTEVLPARRFYPAEEYHQQYLEKGGQSAKKGCSDPIRCYG

SEQ ID NO: 7215 - DNA, 1488 bp, Zea mays subsp. mays
  misc_feature (1)..(1488): Ceres Seq. ID no. 13494410
  misc_feature (1)..(1488): Ortholog of  Ceres SEQ ID NO 13595668 as cited in SEQ ID NO 56792
aactccccaccccagccgatcccaacgcacactgcacccagtccggcggccgccggcaatggcggtgcacggcggcgactacctgcggcggttcgttgcggagacggagtggtwcaacgaggtcgtcctcaacgccgtggcgccaggcgactggtggcgcggcctgccgcacccggtgcagtcgtggatgcgcaactgcgtcggcggttacctcctctacttcatctctggtttcctctggtgtttcgtcatctactactggaagcgccacgcctacatccccaaagatgccatccccacaaacgaagctatgaagaagcaaatagctgtagcatccaaggctatgcctttttactgtgctcttccaactttatctgagtatatgatcgasagcggatggacccggtgttactttaatatcagcgaahtgggtttttctgcgtacctttgttatatggctatgtatctcatttttgtggagtttggaatttactggatgcacagagagttgcatgacataaagccactatacaaacatctgcatgcgacccaccatatttacaacaaggagaacaccttgtctccgtttgctggactcgcgtttcacccactggatggtattctgcaagcgataccgcatgtgcttgcgctcttcctcctcccaacgcacttcaggacgcacatcgctctcgtgttcttggagggcgtgtggacgacaaacatccacgactgcattcacggcaaggtatggccagtcatgggcgctgggtatcacaccatccaccatacgacttaccgccacaactatggccactacaccgtctggatggactggatgtttggtacgctccgtgagccagatgatatcctcaagaaggcctgagttcgtcgtagctgtggttttcctacggtgctggatgtgcttggtctgttstgtccccagtgcctctaatccgctgagcctgttcagcgctctgtttctgtaggctttggtgtgctatttagtttgctaggttttatatgttgtgcttattctgtaatttagtgatgtttgtctgatgacgcaacggagttcaggacgaataaaaagaaagatttsctacacacattctggattccaaaaaaaaaaaaaaaaaaaaaaaaaaaaaaaaaaaaaaaaaaaaaaaaaaaaaaaataaaaaaaaaaaaaaaaaaktttttttttttttttttgtctgttctaggtttagaagcctatgctatgctgctggttcacctaagcatttgktggaaggtaacaccaagcagccgtgaacagccacggtcacctgaggagccttctcgcagtgtctggatgtggttgtttgagcctctgaggggaaatgccctgcgcgcttctgtgcttctcgtgtttctacctggcaaccacgtgcacataattttaccagaatccgattgtttccattcgtgtagcagtatttctctataaaatgccagaaagtttcaggc

SEQ ID NO: 7216 - protein, 293 aa, Zea mays subsp. mays
  peptide (1)..(293): Ceres Seq. ID no. 15222928
  misc_feature (38)..(38): Xaa is any aa, unknown or other
  misc_feature (130)..(130): Xaa is any aa, unknown or other
  misc_feature (143)..(143): Xaa is any aa, unknown or other
TPHPSRSQRTLHPVRRPPAMAVHGGDYLRRFVAETEWXNEVVLNAVAPGDWWRGLPHPVQSWMRNCVGGYLLYFISGFLWCFVIYYWKRHAYIPKDAIPTNEAMKKQIAVASKAMPFYCALPTLSEYMIXSGWTRCYFNISEXGFSAYLCYMAMYLIFVEFGIYWMHRELHDIKPLYKHLHATHHIYNKENTLSPFAGLAFHPLDGILQAIPHVLALFLLPTHFRTHIALVFLEGVWTTNIHDCIHGKVWPVMGAGYHTIHHTTYRHNYGHYTVWMDWMFGTLREPDDILKKA

SEQ ID NO: 7217 - protein, 274 aa, Zea mays subsp. mays
  peptide (1)..(274): Ceres Seq. ID no. 15222929
  misc_feature (19)..(19): Xaa is any aa, unknown or other
  misc_feature (111)..(111): Xaa is any aa, unknown or other
  misc_feature (124)..(124): Xaa is any aa, unknown or other
MAVHGGDYLRRFVAETEWXNEVVLNAVAPGDWWRGLPHPVQSWMRNCVGGYLLYFISGFLWCFVIYYWKRHAYIPKDAIPTNEAMKKQIAVASKAMPFYCALPTLSEYMIXSGWTRCYFNISEXGFSAYLCYMAMYLIFVEFGIYWMHRELHDIKPLYKHLHATHHIYNKENTLSPFAGLAFHPLDGILQAIPHVLALFLLPTHFRTHIALVFLEGVWTTNIHDCIHGKVWPVMGAGYHTIHHTTYRHNYGHYTVWMDWMFGTLREPDDILKKA

SEQ ID NO: 7218 - protein, 231 aa, Zea mays subsp. mays
  peptide (1)..(231): Ceres Seq. ID no. 15222930
  misc_feature (68)..(68): Xaa is any aa, unknown or other
  misc_feature (81)..(81): Xaa is any aa, unknown or other
MRNCVGGYLLYFISGFLWCFVIYYWKRHAYIPKDAIPTNEAMKKQIAVASKAMPFYCALPTLSEYMIXSGWTRCYFNISEXGFSAYLCYMAMYLIFVEFGIYWMHRELHDIKPLYKHLHATHHIYNKENTLSPFAGLAFHPLDGILQAIPHVLALFLLPTHFRTHIALVFLEGVWTTNIHDCIHGKVWPVMGAGYHTIHHTTYRHNYGHYTVWMDWMFGTLREPDDILKKA

SEQ ID NO: 7219 - DNA, 1419 bp, Zea mays subsp. mays
  misc_feature (1)..(1419): Ceres Seq. ID no. 12361440
  misc_feature (1)..(1419): Ortholog of  Ceres SEQ ID NO 14311032 as cited in SEQ ID NO 54590
  misc_feature (1)..(1419): Ortholog of  Ceres SEQ ID NO 15170493 as cited in SEQ ID NO 58432
gtcactttctctccggaggcgacgtgtcgagtggagcgacgtctccaccatcttcttggcttttcctccttccccgcccttccgaatttctccgcgatttcagcgcgcttcctcccgccggctcctccccccgcctccgctctcaccgcggccggccagccatggagcaaggccaggggccgccgccgccgaagccgcctgcgacggagcgcgacatcggattcgccgagcgggccgtggcggcggcaggcgcggccgtcgtgtccgccgtcctcgtcaaccccctcgacgtcgccaagacaaggttgcaagcacaagctgctggagttgtttataacccgatatggtcagattttaggtgctatccatcatgcagcactggtggaatcaatggtttaggcccatgctcggcctgcagtcctgaatgctttcagtacagaggaactatggatgtgttttctaaagtcactagacaggaaggaatttttagactatggagaggtactggtgcaagcctggcattggctgtaccaacggttggaatatatctgcctagttacgatttattgcgcaattggattgaagaatactcggaccgcaattgtcccaagcttcgaccatatgctcctcttatttctggctctattgcacgatcattggcatgcataacttgttgccctattgagttagcaagaacacgtatgcaggccttcaaagaatcgaatgttggagcgaagccccctggaatgtggaagaccttgataggtgtgctttcatcaagacagagcatcaagagccctgaaaacgtgcgaggataccacctcctatggactggtctgggagcgcaactagcacgcgatgcgccctactcagctatatgctggacagttcttgaaccaattagacgacatgtgacacgactattcggtgatcaaagcaacgcgacagttatattgggggcgaacttttctgcaggctttattgctggggttatctctgcgggcgctacctgccctcttgatgttgccaagacacgcagacaaatagagaaggatcctgaaagggtattgagcatgaacacaaggcgcatattgcttgaggtttggaggaaggaaggtgtggaaggtctgttcagaggcgcaggccctcgaatggggcgcgcaggcccgtcggtgggcatcgtcgtctcctcctacgaagttgtgaagcacctcatgcacaagaacacgagcaatgcagcagacctatgattcgatgagctcgattagcacgccctaatggcacaagtaggattaggaatgtcgctattcaaagaaacacatttttttacggtagtccatgacagataaatgttatccctccattccattacaaactgttacttctaagatgggtttttatgcatctagtggctagctt

SEQ ID NO: 7220 - protein, 415 aa, Zea mays subsp. mays
  peptide (1)..(415): Ceres Seq. ID no. 12361441
HFLSGGDVSSGATSPPSSWLFLLPRPSEFLRDFSALPPAGSSPRLRSHRGRPAMEQGQGPPPPKPPATERDIGFAERAVAAAGAAVVSAVLVNPLDVAKTRLQAQAAGVVYNPIWSDFRCYPSCSTGGINGLGPCSACSPECFQYRGTMDVFSKVTRQEGIFRLWRGTGASLALAVPTVGIYLPSYDLLRNWIEEYSDRNCPKLRPYAPLISGSIARSLACITCCPIELARTRMQAFKESNVGAKPPGMWKTLIGVLSSRQSIKSPENVRGYHLLWTGLGAQLARDAPYSAICWTVLEPIRRHVTRLFGDQSNATVILGANFSAGFIAGVISAGATCPLDVAKTRRQIEKDPERVLSMNTRRILLEVWRKEGVEGLFRGAGPRMGRAGPSVGIVVSSYEVVKHLMHKNTSNAADL

SEQ ID NO: 7221 - protein, 362 aa, Zea mays subsp. mays
  peptide (1)..(362): Ceres Seq. ID no. 12361442
MEQGQGPPPPKPPATERDIGFAERAVAAAGAAVVSAVLVNPLDVAKTRLQAQAAGVVYNPIWSDFRCYPSCSTGGINGLGPCSACSPECFQYRGTMDVFSKVTRQEGIFRLWRGTGASLALAVPTVGIYLPSYDLLRNWIEEYSDRNCPKLRPYAPLISGSIARSLACITCCPIELARTRMQAFKESNVGAKPPGMWKTLIGVLSSRQSIKSPENVRGYHLLWTGLGAQLARDAPYSAICWTVLEPIRRHVTRLFGDQSNATVILGANFSAGFIAGVISAGATCPLDVAKTRRQIEKDPERVLSMNTRRILLEVWRKEGVEGLFRGAGPRMGRAGPSVGIVVSSYEVVKHLMHKNTSNAADL

SEQ ID NO: 7222 - protein, 267 aa, Zea mays subsp. mays
  peptide (1)..(267): Ceres Seq. ID no. 12361443
MDVFSKVTRQEGIFRLWRGTGASLALAVPTVGIYLPSYDLLRNWIEEYSDRNCPKLRPYAPLISGSIARSLACITCCPIELARTRMQAFKESNVGAKPPGMWKTLIGVLSSRQSIKSPENVRGYHLLWTGLGAQLARDAPYSAICWTVLEPIRRHVTRLFGDQSNATVILGANFSAGFIAGVISAGATCPLDVAKTRRQIEKDPERVLSMNTRRILLEVWRKEGVEGLFRGAGPRMGRAGPSVGIVVSSYEVVKHLMHKNTSNAADL

SEQ ID NO: 7223 - DNA, 712 bp, Zea mays subsp. mays
  misc_feature (1)..(712): Ceres Seq. ID no. 12403665
  misc_feature (1)..(712): Ortholog of  Ceres SEQ ID NO 13598740 as cited in SEQ ID NO 61147
  misc_feature (1)..(712): Ortholog of  Ceres SEQ ID NO 13587063 as cited in SEQ ID NO 0
acattttcaggtggagatggaacacatttacccaccattatcaaatctccagaagcacgtggctggacattttttggttgggacattatgaagcataaaatgaagcaaaaaagttacaggaacaaggtgctacagaggtccgcagctgttctgggatatgcagcacatgcagtcttgctcatagcttgctatctagatgtccccctccgatatcccttgcgctttggagggtcccgatcttatgtgagtgatcgcttgccttcagctgatacagcatcatcggctgctttagcaagtaccaggaacaccgaatcagaactaacagaataccctcttttcctggaatgccaagacgatgactccactagtgcctcctatgccatttatttattgcacaaggatacggagcagcttctgaactatgttggagctgagagctgtggaaggcacgtgtttggtaacctacgagaacttcttaggatcgtgcagtctgataagtttgtgtacagatgatggttccaatccatgtggttttggagtgcttatgctgtagatgtattatagagatgtaagtaggtgtttttcttttctcttcccattctttcgtgtgattcattccctctttccctgcgctaggttttttatatgtgcaggaaataggcaattatgtttttctagagaaatgaaatgtactcacacgtatggcttcttg

SEQ ID NO: 7224 - protein, 170 aa, Zea mays subsp. mays
  peptide (1)..(170): Ceres Seq. ID no. 12403666
TFSGGDGTHLPTIIKSPEARGWTFFGWDIMKHKMKQKSYRNKVLQRSAAVLGYAAHAVLLIACYLDVPLRYPLRFGGSRSYVSDRLPSADTASSAALASTRNTESELTEYPLFLECQDDDSTSASYAIYLLHKDTEQLLNYVGAESCGRHVFGNLRELLRIVQSDKFVYR

SEQ ID NO: 7225 - protein, 141 aa, Zea mays subsp. mays
  peptide (1)..(141): Ceres Seq. ID no. 12403667
MKHKMKQKSYRNKVLQRSAAVLGYAAHAVLLIACYLDVPLRYPLRFGGSRSYVSDRLPSADTASSAALASTRNTESELTEYPLFLECQDDDSTSASYAIYLLHKDTEQLLNYVGAESCGRHVFGNLRELLRIVQSDKFVYR

SEQ ID NO: 7226 - protein, 137 aa, Zea mays subsp. mays
  peptide (1)..(137): Ceres Seq. ID no. 12403668
MKQKSYRNKVLQRSAAVLGYAAHAVLLIACYLDVPLRYPLRFGGSRSYVSDRLPSADTASSAALASTRNTESELTEYPLFLECQDDDSTSASYAIYLLHKDTEQLLNYVGAESCGRHVFGNLRELLRIVQSDKFVYR

SEQ ID NO: 7227 - DNA, 1062 bp, Zea mays subsp. mays
  misc_feature (1)..(1062): Ceres Seq. ID no. 12400985
  misc_feature (1)..(1062): Ortholog of  Ceres SEQ ID NO 13662219 as cited in SEQ ID NO 63129
agttcgaaaggttcaacttcaaacacactccaaactccaagcctcaataatctcgacctctgtaatgaccaagaagctcatctccatctccaccatggccgggaagcaaggttgcaaggagcagtccaatgatcggaggatccaggcttcgatccaaggagacgccaagagcgtggtggtggggttcggcggcaggctggtcacccgtgagcaggagcaggaggacgccatcatcgtcgcggcgctgcggcacgtggtgtccgggtacagcacgccgccgccggaggtcgtcgtcacggtggcgggcggggaggcgtgcgggacctgcggcatcgacgggtgcctcggctgcgacttcttcggggcgccggagctggcgcaggaggcagtggcctgcggcacatggcaggtggcgacgacggcgtcggtcgngggcgtgggcancggcggcggcgctgaggcccnnnnnnncgtaggnncaggaacatgtacnncggcgtgcggcagcggccgtggggcaagtgggcggcggagatccgcgatccnngnngcgcgcggcgcgcgtgtggctgggcacgttcgacaccgcggaggaggctgccagggcctacgactgcgccgcggtcgagttccgcggcccccgcgcgaagctcaacttcccgggccacgaggcgctgttccagggccacggcgacaccgcggcggcgaacaccgagacacagacgccgtcgccgtcgccgtcgccgggagagtggcagctgggcggcggagcaggagacgagctgtgggaaggtctacaggacctgatgaagcaggacgaggtggaccgctggctcgcgccggttttcggcgccgcgtctagtttttgagctattgtactgtgcacgcaagcgtggttactgacaggatcacagctagactgaccagcatatctagttggttcttttgtagcgtatttttttagggaaacatgattctttttttttgttgtcgtgtattgattgggatatagagagtttttttcctctcttgatggaagtagttggaaagctgtgttgatag

SEQ ID NO: 7228 - protein, 286 aa, Zea mays subsp. mays
  peptide (1)..(286): Ceres Seq. ID no. 12400986
  misc_feature (144)..(144): Xaa is any aa, unknown or other
  misc_feature (148)..(148): Xaa is any aa, unknown or other
  misc_feature (155)..(155): Xaa is any aa, unknown or other
  misc_feature (156)..(156): Xaa is any aa, unknown or other
  misc_feature (157)..(157): Xaa is any aa, unknown or other
  misc_feature (159)..(159): Xaa is any aa, unknown or other
  misc_feature (160)..(160): Xaa is any aa, unknown or other
  misc_feature (164)..(164): Xaa is any aa, unknown or other
  misc_feature (165)..(165): Xaa is any aa, unknown or other
  misc_feature (182)..(182): Xaa is any aa, unknown or other
  misc_feature (183)..(183): Xaa is any aa, unknown or other
VRKVQLQTHSKLQASIISTSVMTKKLISISTMAGKQGCKEQSNDRRIQASIQGDAKSVVVGFGGRLVTREQEQEDAIIVAALRHVVSGYSTPPPEVVVTVAGGEACGTCGIDGCLGCDFFGAPELAQEAVACGTWQVATTASVXGVGXGGGAEAXXXVXXGTCXXACGSGRGASGRRRSAIXXARGARVAGHVRHRGGGCQGLRLRRGRVPRPPREAQLPGPRGAVPGPRRHRGGEHRDTDAVAVAVAGRVAAGRRSRRRAVGRSTGPDEAGRGGPLARAGFRRRV

SEQ ID NO: 7229 - protein, 265 aa, Zea mays subsp. mays
  peptide (1)..(265): Ceres Seq. ID no. 12400987
  misc_feature (123)..(123): Xaa is any aa, unknown or other
  misc_feature (127)..(127): Xaa is any aa, unknown or other
  misc_feature (134)..(134): Xaa is any aa, unknown or other
  misc_feature (135)..(135): Xaa is any aa, unknown or other
  misc_feature (136)..(136): Xaa is any aa, unknown or other
  misc_feature (138)..(138): Xaa is any aa, unknown or other
  misc_feature (139)..(139): Xaa is any aa, unknown or other
  misc_feature (143)..(143): Xaa is any aa, unknown or other
  misc_feature (144)..(144): Xaa is any aa, unknown or other
  misc_feature (161)..(161): Xaa is any aa, unknown or other
  misc_feature (162)..(162): Xaa is any aa, unknown or other
MTKKLISISTMAGKQGCKEQSNDRRIQASIQGDAKSVVVGFGGRLVTREQEQEDAIIVAALRHVVSGYSTPPPEVVVTVAGGEACGTCGIDGCLGCDFFGAPELAQEAVACGTWQVATTASVXGVGXGGGAEAXXXVXXGTCXXACGSGRGASGRRRSAIXXARGARVAGHVRHRGGGCQGLRLRRGRVPRPPREAQLPGPRGAVPGPRRHRGGEHRDTDAVAVAVAGRVAAGRRSRRRAVGRSTGPDEAGRGGPLARAGFRRRV

SEQ ID NO: 7230 - protein, 255 aa, Zea mays subsp. mays
  peptide (1)..(255): Ceres Seq. ID no. 12400988
  misc_feature (113)..(113): Xaa is any aa, unknown or other
  misc_feature (117)..(117): Xaa is any aa, unknown or other
  misc_feature (124)..(124): Xaa is any aa, unknown or other
  misc_feature (125)..(125): Xaa is any aa, unknown or other
  misc_feature (126)..(126): Xaa is any aa, unknown or other
  misc_feature (128)..(128): Xaa is any aa, unknown or other
  misc_feature (129)..(129): Xaa is any aa, unknown or other
  misc_feature (133)..(133): Xaa is any aa, unknown or other
  misc_feature (134)..(134): Xaa is any aa, unknown or other
  misc_feature (151)..(151): Xaa is any aa, unknown or other
  misc_feature (152)..(152): Xaa is any aa, unknown or other
MAGKQGCKEQSNDRRIQASIQGDAKSVVVGFGGRLVTREQEQEDAIIVAALRHVVSGYSTPPPEVVVTVAGGEACGTCGIDGCLGCDFFGAPELAQEAVACGTWQVATTASVXGVGXGGGAEAXXXVXXGTCXXACGSGRGASGRRRSAIXXARGARVAGHVRHRGGGCQGLRLRRGRVPRPPREAQLPGPRGAVPGPRRHRGGEHRDTDAVAVAVAGRVAAGRRSRRRAVGRSTGPDEAGRGGPLARAGFRRRV

SEQ ID NO: 7231 - DNA, 1101 bp, Zea mays subsp. mays
  misc_feature (1)..(1101): Ceres Seq. ID no. 12350018
  misc_feature (1)..(1101): Ortholog of  Ceres SEQ ID NO 14314442 as cited in SEQ ID NO 52358
  misc_feature (1)..(1101): Ortholog of  Ceres SEQ ID NO 12610442 as cited in SEQ ID NO 56281
  misc_feature (1)..(1101): Ortholog of  Ceres SEQ ID NO 12610713 as cited in SEQ ID NO 56591
  misc_feature (1)..(1101): Ortholog of  Ceres SEQ ID NO 12587345 as cited in SEQ ID NO 62844
  misc_feature (1)..(1101): Ortholog of  Ceres SEQ ID NO 13597357 as cited in SEQ ID NO 68961
  misc_feature (1)..(1101): Ortholog of  Ceres SEQ ID NO 13587656 as cited in SEQ ID NO 0
  misc_feature (1)..(1101): Ortholog of  Ceres SEQ ID NO 14309353 as cited in SEQ ID NO 0
  misc_feature (1)..(1101): Ortholog of  Ceres SEQ ID NO 15177686 as cited in SEQ ID NO 0
ctcccagcatccgtatccctccatcagtccctcgggccatccctagcttcatcccaattcttgttcgtgcagctgctcgtggcagcctgagaccaggcgcgaggatgctggcggtgttcagcggcgaggtggtggaggtgccggcggagctggtggcggcggggagccggacgccgtcgcccaagacgaaggcgtccgagctcgtcgcgcgcttcctggggaccagctgccccgccgccgtgtccgtgcgcctcgccgacctcggccacctcgcctactcccacgccaaccaggccctcctccgcccaaggtcgttcgcggcgaaggacgaggtgttctgcctgttcgagggggtgctggacaacctggggcggctgagccagcagtacgggctgtccaagggcgccaacgaggtgctcctggtcatcgaggcctacaaggcgctgcgggaccgggcgccgtacccggccagcctcatgctcgcgcagctcgccggcgcctacgccttcgtgctcttcgacgcgtccaccaactcgctcctcgtcgcgtcgggcggcgacgtgcccctcttctggggcgtcaccgccgacggctgcgtcgccttctccgacgacatcgacgtgctcaaaggctcctgcggcaagtccctcgcgcctttcccgcaaggttgcttctactctaatgcccttggaggattgaagtgctacgagaatcccaagaacaaagtgactgccgttcctgcaaacgaggaggaaatctgcggcgcaaccttccaggtggaaggggctacggtgctcacagcgctgcattaggagatgaggtgtcttcctccgtctccaggcctggactgggggcaactgtacatggtgcctggtggtgtaatgtaacataacggcaatggcatatgcagctgatcctggtctgcctgtatcatctcctcccacccgtaaagagaagttctttctgccgccatcgccatggtcagtcagagcttctctgctatagctgctggatgtgttgtgtgttgcgtctgtatcgtctctagtttgttcgacttacgtggaaacctgagatcagaccgggtatcgagcggctgcttgc

SEQ ID NO: 7232 - protein, 269 aa, Zea mays subsp. mays
  peptide (1)..(269): Ceres Seq. ID no. 12350019
PSIRIPPSVPRAIPSFIPILVRAAARGSLRPGARMLAVFSGEVVEVPAELVAAGSRTPSPKTKASELVARFLGTSCPAAVSVRLADLGHLAYSHANQALLRPRSFAAKDEVFCLFEGVLDNLGRLSQQYGLSKGANEVLLVIEAYKALRDRAPYPASLMLAQLAGAYAFVLFDASTNSLLVASGGDVPLFWGVTADGCVAFSDDIDVLKGSCGKSLAPFPQGCFYSNALGGLKCYENPKNKVTAVPANEEEICGATFQVEGATVLTALH

SEQ ID NO: 7233 - protein, 235 aa, Zea mays subsp. mays
  peptide (1)..(235): Ceres Seq. ID no. 12350020
MLAVFSGEVVEVPAELVAAGSRTPSPKTKASELVARFLGTSCPAAVSVRLADLGHLAYSHANQALLRPRSFAAKDEVFCLFEGVLDNLGRLSQQYGLSKGANEVLLVIEAYKALRDRAPYPASLMLAQLAGAYAFVLFDASTNSLLVASGGDVPLFWGVTADGCVAFSDDIDVLKGSCGKSLAPFPQGCFYSNALGGLKCYENPKNKVTAVPANEEEICGATFQVEGATVLTALH

SEQ ID NO: 7234 - DNA, 743 bp, Zea mays subsp. mays
  misc_feature (1)..(743): Ceres Seq. ID no. 12343252
  misc_feature (1)..(743): Ortholog of  Ceres SEQ ID NO 13661547 as cited in SEQ ID NO 60586
aaaaaagccaaaagcccgaaaccagaggcgggtagggttctagctgcaggcgacggccatggccgcctccgccgccgccccggcgctgcttcgacgcctcttctgcagctctattccagcctcctcctccgtactgcgcgctaccttttgctcctccgccggcttcggctcgtcttctccgtcctccatattcggcgacgccaccgaggtcgccaacgtgccaccgctcaccacgcccaacctcttcgtcagtggcctttcaaggttaacgacagatgagaagctccagggtgcatttgctcctttcgggaggctccttgaagcaaaagtggtgacggatagagtttctgggaggtcaaagggtttcggtttcgtgagatatgccaccatagaagaggccgagagagcgcggcaggagatgaacgccaagttcctggatggatgggtcatcttcgttgaccctgccaagccaaggcagccaaagcccgctcctcagcaggacactggttcatcgcatgctggcttcacgacgaacaagactgtaggatggtgcggctaggctcattgatctgtcgcgatatttcacggcacaaaacttggattgcaggggtggatctaggggtgttagtcacccggataaaatttataaattctttagaaaaacacagttaaagttcaagaaaatttgtatcatgtagcaaacctgaccttgctacccgataatatttttggttagattcgcc

SEQ ID NO: 7235 - protein, 166 aa, Zea mays subsp. mays
  peptide (1)..(166): Ceres Seq. ID no. 12343253
MAASAAAPALLRRLFCSSIPASSSVLRATFCSSAGFGSSSPSSIFGDATEVANVPPLTTPNLFVSGLSRLTTDEKLQGAFAPFGRLLEAKVVTDRVSGRSKGFGFVRYATIEEAERARQEMNAKFLDGWVIFVDPAKPRQPKPAPQQDTGSSHAGFTTNKTVGWCG

SEQ ID NO: 7236 - protein, 92 aa, Zea mays subsp. mays
  peptide (1)..(92): Ceres Seq. ID no. 12343254
KKAKSPKPEAGRVLAAGDGHGRLRRRPGAASTPLLQLYSSLLLRTARYLLLLRRLRLVFSVLHIRRRHRGRQRATAHHAQPLRQWPFKVNDR

SEQ ID NO: 7237 - DNA, 654 bp, Zea mays subsp. mays
  misc_feature (1)..(654): Ceres Seq. ID no. 12401179
  misc_feature (1)..(654): Ortholog of  Ceres SEQ ID NO 12420691 as cited in SEQ ID NO 20717
aagactggcgaaacgcgttgttttcctcttttccccaaggcaaccaaaccatctcgattctcgactcgtggggaagtttcgctctcgccggcgtcgacggcctagggttcgaggaacgtccgtccgtccgtccggggaaggagcggtagggaggcggagatgatcgaggtggtgctcaacgaccgcctggggaagaaggtgcgggtcaagtgcaacgaggacgacaccatcggcgacctcaagaagctggtggcggcgcagacgggggacgcgccccgagaagatccgcatccagaagtggtacaacatctacaaggaccacatcaccctcaaggactacgaggtccacgacggcatgggcctcgagctctactacaactgagccgccgcccctctctccctctcgtcaggttggtctgaattctgaagtcatgggtgcaattcgcttcgcggtgatctcttaagctcatcacatatataaaagcaacctcagtgggctatgtaagacatggcgtgccaaactatcagtgaccactgacagctttgcaatacgttgttgtatggtcaacctgcaaacttggtgtactgctactcgtactataaataacatagggttttaaccttggttgtggtaatggtcatcttttctcattc

SEQ ID NO: 7238 - protein, 86 aa, Zea mays subsp. mays
  peptide (1)..(86): Ceres Seq. ID no. 12401180
MIEVVLNDRLGKKVRVKCNEDDTIGDLKKLVAAQTGDAPREDPHPEVVQHLQGPHHPQGLRGPRRHGPRALLQLSRRPSLPLVRLV

SEQ ID NO: 7239 - protein, 53 aa, Zea mays subsp. mays
  peptide (1)..(53): Ceres Seq. ID no. 12401181
RLAKRVVFLFSPRQPNHLDSRLVGKFRSRRRRRPRVRGTSVRPSGEGAVGRRR

SEQ ID NO: 7240 - protein, 48 aa, Zea mays subsp. mays
  peptide (1)..(48): Ceres Seq. ID no. 12401182
DWRNALFSSFPQGNQTISILDSWGSFALAGVDGLGFEERPSVRPGKER

SEQ ID NO: 7241 - DNA, 712 bp, Zea mays subsp. mays
  misc_feature (1)..(712): Ceres Seq. ID no. 12343010
  misc_feature (1)..(712): Ortholog of  Ceres SEQ ID NO 15173534 as cited in SEQ ID NO 61793
  misc_feature (1)..(712): Ortholog of  Ceres SEQ ID NO 13663751 as cited in SEQ ID NO 67519
gctagcggtccgcacccactcacccgttgcctccaaactcatttctcccgagcgccgccgcgagcctctgttccagcttcgttcatggcttccctcaccggatccgctctctcctttgcgaggcccgtcaaggcaatcagcattaagtctgtctctttctctggtctaaggaaggataatgtagccttccgcttgcagccagtgccacaaagattcgctgtctgctgtcctgctaaaaaggagactgtggatcgggtttgtgatattgtcaagaagcagcttgcacttcctgagggcactgaggtctgtggctcctctaagtttcaagacctcggtgctgattcgttggacactgttgagattgttatgggccttgaggaggctttcaagatcactgtagaggagtcgagcgcgcagtcaatcgcaactgtggaagatgctgctaatctcatcgacgaacttgttgcaggagcagcaaaatcgtgttaaactcgtggtcgtattgcgttgggtgctgtaccagggcatcacttgttgttctatgcccccttccctactagattttcttttctaccctgggcctggagagatgtttctgtcatgactgtcattgtggatctcgcgatattgttatattgaagcttttgtgcttgttcaagaaaagaaaatgttgttgcgatatatatgttattatattgaatttttttttgtc

SEQ ID NO: 7242 - protein, 162 aa, Zea mays subsp. mays
  peptide (1)..(162): Ceres Seq. ID no. 12343011
ASGPHPLTRCLQTHFSRAPPRASVPASFMASLTGSALSFARPVKAISIKSVSFSGLRKDNVAFRLQPVPQRFAVCCPAKKETVDRVCDIVKKQLALPEGTEVCGSSKFQDLGADSLDTVEIVMGLEEAFKITVEESSAQSIATVEDAANLIDELVAGAAKSC

SEQ ID NO: 7243 - protein, 134 aa, Zea mays subsp. mays
  peptide (1)..(134): Ceres Seq. ID no. 12343012
MASLTGSALSFARPVKAISIKSVSFSGLRKDNVAFRLQPVPQRFAVCCPAKKETVDRVCDIVKKQLALPEGTEVCGSSKFQDLGADSLDTVEIVMGLEEAFKITVEESSAQSIATVEDAANLIDELVAGAAKSC

SEQ ID NO: 7244 - DNA, 1024 bp, Zea mays subsp. mays
  misc_feature (1)..(1024): Ceres Seq. ID no. 12462326
  misc_feature (1)..(1024): Ortholog of  Ceres SEQ ID NO 12610554 as cited in SEQ ID NO 59805
  misc_feature (1)..(1024): Ortholog of  Ceres SEQ ID NO 12614051 as cited in SEQ ID NO 67827
gcttctagcaagagcacgaacgagggccaagcgctccaaaaccagcgacgtggaagcgcctgcgccgcgagcatccttcctgagcgcggggccaagcagagcagtgcaagcagcatatggcgcgccgtgccagcctgctcctcgccgcggcgctgctcgtcgccgtcgctgccgcggcggtgccgccgacgtgcgagcgcatcgagtgcccggcgtacgaggtggtggacagcgccaacgggttcgagatccggcggtacacggacgccatgtggatcaccacggcgcccatcgaggacatctccttcgtcgccgccacgcgcaccggcttcctacagctgttcgactacatccagggcaagaacgcgtacaaccagacgatcgagatgacggcgccggtgctgacgcgggtgtcgcccagcgacgggcccttctgcgcctccgccttcgccgtgagcttctacgtgccggccaagaaccaggcggacccgccgccggccgagggcctgcgcgtggaccgctgggccggggccaggtacgcggccgtgcgccgcttcgggggcttcgtggcggacgccgacgtcggggagcaggcggcgcggctcgaggccagcctccagggcacccggtgggccgccgccgtcaacgacgcgcgcagggccgacccggcctcgccctacaccgtcgcgcagtacaactcgcccttcgagttcaccggcagggtcaacgagatctggatgctcttcgacgcggacgacgacgccagtatgtgatgcgattccaagcgtgctctcggggcactgaggcgtttagggaaggacgcgcatgcacctgtgcagtgcagctgtgctaccatgaagtatttcgtgctcttgtgcgctagcttcgtttactttcgacttttcgagtaaggaataaggtgcctcttgttgcaataatgataaagctaatcctgcttgtaattacatttcgtggcatggccattccggcaacatgtccagtaaaaaaaaactttttagtttcg

SEQ ID NO: 7245 - protein, 293 aa, Zea mays subsp. mays
  peptide (1)..(293): Ceres Seq. ID no. 12462327
LLARARTRAKRSKTSDVEAPAPRASFLSAGPSRAVQAAYGAPCQPAPRRGAARRRRCRGGAADVRAHRVPGVRGGGQRQRVRDPAVHGRHVDHHGAHRGHLLRRRHAHRLPTAVRLHPGQERVQPDDRDDGAGADAGVAQRRALLRLRLRRELLRAGQEPGGPAAGRGPARGPLGRGQVRGRAPLRGLRGGRRRRGAGGAARGQPPGHPVGRRRQRRAQGRPGLALHRRAVQLALRVHRQGQRDLDALRRGRRRQYVMRFQACSRGTEAFREGRACTCAVQLCYHEVFRALVR

SEQ ID NO: 7246 - protein, 218 aa, Zea mays subsp. mays
  peptide (1)..(218): Ceres Seq. ID no. 12462328
MARRASLLLAAALLVAVAAAAVPPTCERIECPAYEVVDSANGFEIRRYTDAMWITTAPIEDISFVAATRTGFLQLFDYIQGKNAYNQTIEMTAPVLTRVSPSDGPFCASAFAVSFYVPAKNQADPPPAEGLRVDRWAGARYAAVRRFGGFVADADVGEQAARLEASLQGTRWAAAVNDARRADPASPYTVAQYNSPFEFTGRVNEIWMLFDADDDASM

SEQ ID NO: 7247 - protein, 167 aa, Zea mays subsp. mays
  peptide (1)..(167): Ceres Seq. ID no. 12462329
MWITTAPIEDISFVAATRTGFLQLFDYIQGKNAYNQTIEMTAPVLTRVSPSDGPFCASAFAVSFYVPAKNQADPPPAEGLRVDRWAGARYAAVRRFGGFVADADVGEQAARLEASLQGTRWAAAVNDARRADPASPYTVAQYNSPFEFTGRVNEIWMLFDADDDASM

SEQ ID NO: 7248 - DNA, 761 bp, Zea mays subsp. mays
  misc_feature (1)..(761): Ceres Seq. ID no. 12401903
  misc_feature (1)..(761): Ortholog of  Ceres SEQ ID NO 15174662 as cited in SEQ ID NO 54292
ctctcgtatcaattctccaagcgcggtgccgcgccgagcgaagaagctcgtctcgtctccatggcggccgcagcggtggccgtctccacctctgtgtgcacgtcctcaaggcgtagcacgggctgtccgaacgtgaggccccaggcccgtccgctcctaggcaggccgtcgccgcgccggaggctgcagacggccttggccgcgacgggcaagacgccgggcgaggcggangancaggtncccgcgtgggccaagcccggcgcggacgagccgccaccctgggagcgcgagggcggggccgcgcgtggacaggaggcccngcaggtccccttctacnngtacctgctcgcgtccacgatcaccgccatcgccgcgatcggctccatcttcgagtacaccaaccagcggccggtgttcgggatcgtcggccccgacagcgccctgtacgcgccgntcctgggcttcttcgtacttcaccggcatccnnanntccgcgtttctgtggttcaaggccgtgcagacggcgaacagagaggccgaggagcaagaccgcagagacggattcctgtgagaggctgtgggtgactccggcgcactcgccggtgccgtcgccgtgcagaannacgcgcaccgcaccaccggtattcgcagcgacgggtgacgggtncatgttgtcatgttatgtatgtncggtgtactgtatactagaatttgagagagcggatggatttgcggcacaaatncagagaaaatatattaat

SEQ ID NO: 7249 - protein, 194 aa, Zea mays subsp. mays
  peptide (1)..(194): Ceres Seq. ID no. 12401904
  misc_feature (77)..(77): Xaa is any aa, unknown or other
  misc_feature (78)..(78): Xaa is any aa, unknown or other
  misc_feature (80)..(80): Xaa is any aa, unknown or other
  misc_feature (107)..(107): Xaa is any aa, unknown or other
  misc_feature (113)..(113): Xaa is any aa, unknown or other
  misc_feature (152)..(152): Xaa is any aa, unknown or other
  misc_feature (162)..(162): Xaa is any aa, unknown or other
  misc_feature (163)..(163): Xaa is any aa, unknown or other
  misc_feature (164)..(164): Xaa is any aa, unknown or other
LSYQFSKRGAAPSEEARLVSMAAAAVAVSTSVCTSSRRSTGCPNVRPQARPLLGRPSPRRRLQTALAATGKTPGEAXXQXPAWAKPGADEPPPWEREGGAARGQEAXQVPFYXYLLASTITAIAAIGSIFEYTNQRPVFGIVGPDSALYAPXLGFFVLHRHXXXRVSVVQGRADGEQRGRGARPQRRIPVRGCG

SEQ ID NO: 7250 - protein, 174 aa, Zea mays subsp. mays
  peptide (1)..(174): Ceres Seq. ID no. 12401905
  misc_feature (57)..(57): Xaa is any aa, unknown or other
  misc_feature (58)..(58): Xaa is any aa, unknown or other
  misc_feature (60)..(60): Xaa is any aa, unknown or other
  misc_feature (87)..(87): Xaa is any aa, unknown or other
  misc_feature (93)..(93): Xaa is any aa, unknown or other
  misc_feature (132)..(132): Xaa is any aa, unknown or other
  misc_feature (142)..(142): Xaa is any aa, unknown or other
  misc_feature (143)..(143): Xaa is any aa, unknown or other
  misc_feature (144)..(144): Xaa is any aa, unknown or other
MAAAAVAVSTSVCTSSRRSTGCPNVRPQARPLLGRPSPRRRLQTALAATGKTPGEAXXQXPAWAKPGADEPPPWEREGGAARGQEAXQVPFYXYLLASTITAIAAIGSIFEYTNQRPVFGIVGPDSALYAPXLGFFVLHRHXXXRVSVVQGRADGEQRGRGARPQRRIPVRGCG

SEQ ID NO: 7251 - DNA, 1086 bp, Zea mays subsp. mays
  misc_feature (1)..(1086): Ceres Seq. ID no. 12401172
  misc_feature (1)..(1086): Ortholog of  Ceres SEQ ID NO 12557432 as cited in SEQ ID NO 92
  misc_feature (1)..(1086): Ortholog of  Ceres SEQ ID NO 14305097 as cited in SEQ ID NO 0
atttattttcttcccccactccatcttggagaagaagaacaaggaggagaaggcaaaagaaggccgacgcgctcgccgctgctaccgaaatcggccagacattccccaaaccctacgctcgctcgctcgccggagccctcgttgaaccgagcaggcgggcgaaggaggctcgacgatgttccgcaaccagtacgacaccgacgtgaccacgtggagcccccaggggcggctcttccaggtggagtacgccatggaggccgtcaagcagggctccgcctgcgtggggctccggtcccgcacccacgccgtcctcgccgccgtcaacaagcctgcctccgagctctcctcctaccagcggaaggtgttccgcgtcgccgaccacgccggggtcgcgctcgccggcctcaccgccgacggccgcgtcctctcgcgcttcctccgcaacgagtgcatcaaccactccttcgtctacgaggcgccgctccccgtctccaggctcgcgctcaggctcgccgacaaggcgcaggtttgcacacagcggtcatggaagaggccctacggcgtgggcctcctcgttgccggactggacgagtcaggagcccacctgtactacaactgccccagcgggaactacttcgagtaccaggcgttcgccatcggctcccgctcccaagccgctaagacgttcctggagcgcaggttccagggctacgacgactacaccccggagcagctcgtcagggacgctctctccgccgtgaaggagacgctgcagggcgagaagctgtccggatccaactgcaccgtggccatcgtcggcaggaaggacgacggcaccgtcgagccgttcgaggtgatcggcacggcgagggtccaggaacttatcgactccatggagatggaggtcgccgagcaggcaccgcctccggaggctgctgctgctagctcctccatgcaggaggagggggagaggggctcggatgacgctgctgcacccatggacatctagagggctgggatagggggagactcatatgaaacccgtacactgcattccgagttccaaaagactaagaccacttcttt

SEQ ID NO: 7252 - protein, 277 aa, Zea mays subsp. mays
  peptide (1)..(277): Ceres Seq. ID no. 12401173
MFRNQYDTDVTTWSPQGRLFQVEYAMEAVKQGSACVGLRSRTHAVLAAVNKPASELSSYQRKVFRVADHAGVALAGLTADGRVLSRFLRNECINHSFVYEAPLPVSRLALRLADKAQVCTQRSWKRPYGVGLLVAGLDESGAHLYYNCPSGNYFEYQAFAIGSRSQAAKTFLERRFQGYDDYTPEQLVRDALSAVKETLQGEKLSGSNCTVAIVGRKDDGTVEPFEVIGTARVQELIDSMEMEVAEQAPPPEAAAASSSMQEEGERGSDDAAAPMDI

SEQ ID NO: 7253 - protein, 252 aa, Zea mays subsp. mays
  peptide (1)..(252): Ceres Seq. ID no. 12401174
MEAVKQGSACVGLRSRTHAVLAAVNKPASELSSYQRKVFRVADHAGVALAGLTADGRVLSRFLRNECINHSFVYEAPLPVSRLALRLADKAQVCTQRSWKRPYGVGLLVAGLDESGAHLYYNCPSGNYFEYQAFAIGSRSQAAKTFLERRFQGYDDYTPEQLVRDALSAVKETLQGEKLSGSNCTVAIVGRKDDGTVEPFEVIGTARVQELIDSMEMEVAEQAPPPEAAAASSSMQEEGERGSDDAAAPMDI

SEQ ID NO: 7254 - protein, 226 aa, Zea mays subsp. mays
  peptide (1)..(226): Ceres Seq. ID no. 12401175
IYFLPPLHLGEEEQGGEGKRRPTRSPLLPKSARHSPNPTLARSPEPSLNRAGGRRRLDDVPQPVRHRRDHVEPPGAALPGGVRHGGRQAGLRLRGAPVPHPRRPRRRQQACLRALLLPAEGVPRRRPRRGRARRPHRRRPRPLALPPQRVHQPLLRLRGAAPRLQARAQARRQGAGLHTAVMEEALRRGPPRCRTGRVRSPPVLQLPQRELLRVPGVRHRLPLPSR

SEQ ID NO: 7255 - DNA, 890 bp, Zea mays subsp. mays; identical to SEQ ID NO: 3402
  misc_feature (1)..(890): Ceres Seq. ID no. 12595102
  misc_feature (1)..(890): Ortholog of  Ceres SEQ ID NO 12610129 as cited in SEQ ID NO 55779

SEQ ID NO: 7256 - protein, 145 aa, Zea mays subsp. mays; identical to SEQ ID NO: 3403
  peptide (1)..(145): Ceres Seq. ID no. 12595103

SEQ ID NO: 7257 - DNA, 947 bp, Zea mays subsp. mays
  misc_feature (1)..(947): Ceres Seq. ID no. 12467581
  misc_feature (1)..(947): Ortholog of  Ceres SEQ ID NO 15174591 as cited in SEQ ID NO 53383
taaggaatgttttagatatgaatgctcactttggtggatttaatgctgctttactgaaggcaggaaagtctgtatgggtgatgaatgttgttcctacagatgccccaaactatctaccgctgatatttgaccggggttttatcggggttcaacatgactggtgtgatgcatttccaacttacccaagaacatatgatatggtgcacgctgatggttttctatcacttcagaagaaccacaagcatagatgttctactcttgacatattcttggaagttgaccgcatcctacgaccagagggctgggtcataatccgtgacgctgcccctcttattgaagcggcaagatctgttgttactcaactcagatgggacgcccgcgttttggatcttgacatagccagtgatgaaaaactactggtctgtcagaagccgtttctcagaaaataatgagcatagtagacactgacacaagatatgaacttattctttcaccctacacactgttacaattgctgtntgagcacaactgagtacaaagtttgggtaaaaaacacgggaagcatgattcagcaaacttgtcatgcatcaccatggaaccgcaaggtgccattaaattgatcggtcaagtgcatgctgcagaaacaggcttggtggctaagctttccaggccaaggttttattgccaggatatagagatgaagccataaaaattactttattagtgaaaccatatccaataaagagatgctgctgcggtgtacataatcgccgccaatgtgccatataggtataattcattttttcccttgttacaatttctctccttttttctgtaactgtgccaatttgttttattttgtatcttgtatgtaaattggttggtctatatactgatcatcccagactacagcctagtgaaatcaatataattattatttggagatg

SEQ ID NO: 7258 - protein, 148 aa, Zea mays subsp. mays
  peptide (1)..(148): Ceres Seq. ID no. 12467582
RNVLDMNAHFGGFNAALLKAGKSVWVMNVVPTDAPNYLPLIFDRGFIGVQHDWCDAFPTYPRTYDMVHADGFLSLQKNHKHRCSTLDIFLEVDRILRPEGWVIIRDAAPLIEAARSVVTQLRWDARVLDLDIASDEKLLVCQKPFLRK

SEQ ID NO: 7259 - protein, 143 aa, Zea mays subsp. mays
  peptide (1)..(143): Ceres Seq. ID no. 12467583
MNAHFGGFNAALLKAGKSVWVMNVVPTDAPNYLPLIFDRGFIGVQHDWCDAFPTYPRTYDMVHADGFLSLQKNHKHRCSTLDIFLEVDRILRPEGWVIIRDAAPLIEAARSVVTQLRWDARVLDLDIASDEKLLVCQKPFLRK

SEQ ID NO: 7260 - protein, 122 aa, Zea mays subsp. mays
  peptide (1)..(122): Ceres Seq. ID no. 12467584
MNVVPTDAPNYLPLIFDRGFIGVQHDWCDAFPTYPRTYDMVHADGFLSLQKNHKHRCSTLDIFLEVDRILRPEGWVIIRDAAPLIEAARSVVTQLRWDARVLDLDIASDEKLLVCQKPFLRK

SEQ ID NO: 7261 - DNA, 855 bp, Zea mays subsp. mays
  misc_feature (1)..(855): Ceres Seq. ID no. 12351202
  misc_feature (1)..(855): Ortholog of  Ceres SEQ ID NO 13598708 as cited in SEQ ID NO 68118
  misc_feature (1)..(855): Ortholog of  Ceres SEQ ID NO 15179585 as cited in SEQ ID NO 0
agctaattgcttttccagctgttcgtctcgccctgcatatgcgtctctctgctgccaggctcaagggctccacgctcgtcaccaatggcgtgataacggccgggtctgacgagtgggcgatctacggcggaaccggggtgtttgccatggcgaggggcgtcataaggagaaggtatctcgccgacagggccggcgggaacactgatgagctcaacatggatgtcttctgccggccgtttggctcacagtcagagctgcaagataagatgcaggtgcaggggcagggctctagcgtcaccaagattggactatggggtggaccgggagggtcggcacaggacatcacggcggagcggccgccgcagcgtctgcacagcgtcaccgttcgtgctggcgtcgccctcgactccatcgagttcacctatactgacagcgcttggcagaggcgcgccgctgggcgatggggtggactcgggggcaatgttcgaacgatcgaccttggcgacgccgaggatgtcagggaagtctcgggaacatacggcgcatttgaaggtgccactacgctgacctcgctcaggctcgtcaccagcagcagaacctggggcccctggggtgtcgagaacgggacgcgtttctccgtcacggcgcccatcggcagcagcatcgtgggattctatgcgcgggcgggaaccaggctcgtcgatgctatcggtgtttacttgcgtcagatttaattcgaataatagcaggggagctactgctagctacgtacctgctccatcctccattatcctttatttcaattcgctcatcatcgtcgtgtgtaaattaaataaataaagctcttgtgcccat

SEQ ID NO: 7262 - protein, 243 aa, Zea mays subsp. mays
  peptide (1)..(243): Ceres Seq. ID no. 12351203
LIAFPAVRLALHMRLSAARLKGSTLVTNGVITAGSDEWAIYGGTGVFAMARGVIRRRYLADRAGGNTDELNMDVFCRPFGSQSELQDKMQVQGQGSSVTKIGLWGGPGGSAQDITAERPPQRLHSVTVRAGVALDSIEFTYTDSAWQRRAAGRWGGLGGNVRTIDLGDAEDVREVSGTYGAFEGATTLTSLRLVTSSRTWGPWGVENGTRFSVTAPIGSSIVGFYARAGTRLVDAIGVYLRQI

SEQ ID NO: 7263 - protein, 231 aa, Zea mays subsp. mays
  peptide (1)..(231): Ceres Seq. ID no. 12351204
MRLSAARLKGSTLVTNGVITAGSDEWAIYGGTGVFAMARGVIRRRYLADRAGGNTDELNMDVFCRPFGSQSELQDKMQVQGQGSSVTKIGLWGGPGGSAQDITAERPPQRLHSVTVRAGVALDSIEFTYTDSAWQRRAAGRWGGLGGNVRTIDLGDAEDVREVSGTYGAFEGATTLTSLRLVTSSRTWGPWGVENGTRFSVTAPIGSSIVGFYARAGTRLVDAIGVYLRQI

SEQ ID NO: 7264 - protein, 195 aa, Zea mays subsp. mays
  peptide (1)..(195): Ceres Seq. ID no. 12351205
MARGVIRRRYLADRAGGNTDELNMDVFCRPFGSQSELQDKMQVQGQGSSVTKIGLWGGPGGSAQDITAERPPQRLHSVTVRAGVALDSIEFTYTDSAWQRRAAGRWGGLGGNVRTIDLGDAEDVREVSGTYGAFEGATTLTSLRLVTSSRTWGPWGVENGTRFSVTAPIGSSIVGFYARAGTRLVDAIGVYLRQI

SEQ ID NO: 7265 - DNA, 1251 bp, Zea mays subsp. mays
  misc_feature (1)..(1251): Ceres Seq. ID no. 12403316
  misc_feature (1)..(1251): Ortholog of  Ceres SEQ ID NO 14302757 as cited in SEQ ID NO 56631
actgacagctcgccgaggggccgcgccgcgctcgagacccgtcgatggcgaggcggagcctggcggtcgacgcaaccgcaggcgccgcatcccgggttcggttcgcgcccacctccaataacctgctcgtctcctcatgggattcggggctgcggttgtacgatgccgacgagggcacgctcagggtcaacgtggagtcagaggcggcattcctcgactgctgcttcgaggatgagtctgcagcgtttgcctgcggctctgatggatctgtgagaaggtacgacttccactcaggttcgcaggatacggtggggctccatgaagatgcactagcctgcattgagttctcttcactgaccggtcagattatgacaggcagccttgacaagaagctaaagctttgggattcaaaaacaagaaatgtaagcccgagcggcaccataaccttaaattcagatgtggcctcaatttctatatgcggcatttacatattagctgcagttgagagaaatgtttatctttatgacatgaggaatctaacaagaccagttgatgaaaaagactgtcctctggattatcaaattcgatgccttcatacttctctagagtggaatgcttatgttgctggctctgtggatggagttgttgcattgaagtatcttgatcgtggaacagatagagatttgggatatgcatttcgttgtcatccaaattccagaaacggaaaatggaatctggtccctgtaaattgcatctcagttcatccctgcaacagaactttcgttacgggagatgataaaggatgcactattgtttgggatgctcaattgaaaaagaagctgattgagcttccaatgtatttgggcagtgtggcgtcagtggcatacaaccataatggccaacttctggcggttgcctcaaactattttttagaagtggataaagaggagcaacaccaccaggtattcattgaaactgtggagaacttcaaaggcaagtcccgtgtgggatagagccttctaacaaaacatgttctgttcatctgttgtattgtattttgtctaccatacatgttaaaggtcaccaagatgtgacagcatgttgtattatgttgtatgactaagcattttttttaggaaacgacataatatggctaagcaatacttgtatatattggttacatctagtctgagacagctgtggtgtgttgtaactcttttgagcttttgcaaccagtattgctgttctggt

SEQ ID NO: 7266 - protein, 322 aa, Zea mays subsp. mays
  peptide (1)..(322): Ceres Seq. ID no. 12403317
MARRSLAVDATAGAASRVRFAPTSNNLLVSSWDSGLRLYDADEGTLRVNVESEAAFLDCCFEDESAAFACGSDGSVRRYDFHSGSQDTVGLHEDALACIEFSSLTGQIMTGSLDKKLKLWDSKTRNVSPSGTITLNSDVASISICGIYILAAVERNVYLYDMRNLTRPVDEKDCPLDYQIRCLHTSLEWNAYVAGSVDGVVALKYLDRGTDRDLGYAFRCHPNSRNGKWNLVPVNCISVHPCNRTFVTGDDKGCTIVWDAQLKKKLIELPMYLGSVASVAYNHNGQLLAVASNYFLEVDKEEQHHQVFIETVENFKGKSRVG

SEQ ID NO: 7267 - protein, 214 aa, Zea mays subsp. mays
  peptide (1)..(214): Ceres Seq. ID no. 12403318
MTGSLDKKLKLWDSKTRNVSPSGTITLNSDVASISICGIYILAAVERNVYLYDMRNLTRPVDEKDCPLDYQIRCLHTSLEWNAYVAGSVDGVVALKYLDRGTDRDLGYAFRCHPNSRNGKWNLVPVNCISVHPCNRTFVTGDDKGCTIVWDAQLKKKLIELPMYLGSVASVAYNHNGQLLAVASNYFLEVDKEEQHHQVFIETVENFKGKSRVG

SEQ ID NO: 7268 - protein, 161 aa, Zea mays subsp. mays
  peptide (1)..(161): Ceres Seq. ID no. 12403319
MRNLTRPVDEKDCPLDYQIRCLHTSLEWNAYVAGSVDGVVALKYLDRGTDRDLGYAFRCHPNSRNGKWNLVPVNCISVHPCNRTFVTGDDKGCTIVWDAQLKKKLIELPMYLGSVASVAYNHNGQLLAVASNYFLEVDKEEQHHQVFIETVENFKGKSRVG

SEQ ID NO: 7269 - DNA, 1178 bp, Zea mays subsp. mays
  misc_feature (1)..(1178): Ceres Seq. ID no. 12352502
  misc_feature (1)..(1178): Ortholog of  Ceres SEQ ID NO 12557497 as cited in SEQ ID NO 43
  misc_feature (1)..(1178): Ortholog of  Ceres SEQ ID NO 14303417 as cited in SEQ ID NO 54923
  misc_feature (1)..(1178): Ortholog of  Ceres SEQ ID NO 15169084 as cited in SEQ ID NO 59115
  misc_feature (1)..(1178): Ortholog of  Ceres SEQ ID NO 12635513 as cited in SEQ ID NO 0
  misc_feature (1)..(1178): Ortholog of  Ceres SEQ ID NO 12635723 as cited in SEQ ID NO 0
  misc_feature (1)..(1178): Ortholog of  Ceres SEQ ID NO 15179044 as cited in SEQ ID NO 0
agtttaatacaaaccaggcttgctcgtggcggcaaaaaaccaacgtgcttgatctccctccgccactccatccatctcctcgctcccagtccccgggaagcatggcgtccgtcaccgcccgcgccccggtagcggcccttcgcccgtcgtcggcatcgctcaagtcgtcgtcggccttccttggccactctagccgcctcggccgcaccgcgtctcccacgaggcgcagcctcaaggcggaggccaagggcgagtggctccccggccttccctccccctcctacctcgacggcagcctggcgggtgacaatggcttcgacccgttgggcctggcggaggaccccgagaacctgcggtggttcgtgcaggcggagctggtgaacggccggtgggccatgcttggcgtggccgggatgctcatcccggaggtgctgaccaaagccgggctgatcaacgcgccgcagtggtacgacgccagcaagtcggagtacttcgcgtcgtcgtccacgctgttcgtggtcgagttcatcctgttccactacgtggagatccggcggtggcaggacatcaagaaccccggcagcgtcaaccaggaccccatcttcaagagctacagcctgccgccgcacgagtgcggctacccgggcagcgtcttcaacccgctcaacttcgcgcccacgctcgaggccaaggagaaggagctcgccaacgggaggctggcgatgctggcgttcctgggcttcctgatccagcacaacgtcaccggcaaggggcccttcgacaacctgctgcagcacctgtctgacccatggcacaacaccatcatccagaccttctccggttgagtcgaggtcgaggagggatacgatccatcgctggtgagctgatatggactggaaggcaaacattgaaaccttaagttcctttctggatcagtttgtgtgtgttgttaatctatctggagggtacagattcgggccgtgttgcaatgcatgcatggtctgaagggagcgagggctgaggagtgactggtatgtacattagctgaaggggatattaagggtagagatcgtttgatcagtatcatctgtatatccccatgcatggggtttcgttttgtgcgcttacttctggcttgccagcgtatggttcaatgtggaaacacatgtattagtacg

SEQ ID NO: 7270 - protein, 280 aa, Zea mays subsp. mays
  peptide (1)..(280): Ceres Seq. ID no. 12352503
FNTNQACSWRQKTNVLDLPPPLHPSPRSQSPGSMASVTARAPVAALRPSSASLKSSSAFLGHSSRLGRTASPTRRSLKAEAKGEWLPGLPSPSYLDGSLAGDNGFDPLGLAEDPENLRWFVQAELVNGRWAMLGVAGMLIPEVLTKAGLINAPQWYDASKSEYFASSSTLFVVEFILFHYVEIRRWQDIKNPGSVNQDPIFKSYSLPPHECGYPGSVFNPLNFAPTLEAKEKELANGRLAMLAFLGFLIQHNVTGKGPFDNLLQHLSDPWHNTIIQTFSG

SEQ ID NO: 7271 - protein, 247 aa, Zea mays subsp. mays
  peptide (1)..(247): Ceres Seq. ID no. 12352504
MASVTARAPVAALRPSSASLKSSSAFLGHSSRLGRTASPTRRSLKAEAKGEWLPGLPSPSYLDGSLAGDNGFDPLGLAEDPENLRWFVQAELVNGRWAMLGVAGMLIPEVLTKAGLINAPQWYDASKSEYFASSSTLFVVEFILFHYVEIRRWQDIKNPGSVNQDPIFKSYSLPPHECGYPGSVFNPLNFAPTLEAKEKELANGRLAMLAFLGFLIQHNVTGKGPFDNLLQHLSDPWHNTIIQTFSG

SEQ ID NO: 7272 - protein, 149 aa, Zea mays subsp. mays
  peptide (1)..(149): Ceres Seq. ID no. 12352505
MLGVAGMLIPEVLTKAGLINAPQWYDASKSEYFASSSTLFVVEFILFHYVEIRRWQDIKNPGSVNQDPIFKSYSLPPHECGYPGSVFNPLNFAPTLEAKEKELANGRLAMLAFLGFLIQHNVTGKGPFDNLLQHLSDPWHNTIIQTFSG

SEQ ID NO: 7273 - DNA, 1696 bp, Zea mays subsp. mays
  misc_feature (1)..(1696): Ceres Seq. ID no. 12352506
  misc_feature (1)..(1696): Ortholog of  Ceres SEQ ID NO 15177320 as cited in SEQ ID NO 52645
  misc_feature (1)..(1696): Ortholog of  Ceres SEQ ID NO 15171359 as cited in SEQ ID NO 57279
  misc_feature (1)..(1696): Ortholog of  Ceres SEQ ID NO 14313840 as cited in SEQ ID NO 59568
  misc_feature (1)..(1696): Ortholog of  Ceres SEQ ID NO 15168502 as cited in SEQ ID NO 60095
  misc_feature (1)..(1696): Ortholog of  Ceres SEQ ID NO 13662245 as cited in SEQ ID NO 62708
  misc_feature (1)..(1696): Ortholog of  Ceres SEQ ID NO 14314084 as cited in SEQ ID NO 63256
  misc_feature (1)..(1696): Ortholog of  Ceres SEQ ID NO 14303091 as cited in SEQ ID NO 66369
atagagagagccactggccacaggtaggcaggcaggaggacgagtcggcaaggaagctgcctgctttcagaaagagtcatagagatagttattaagatggcgttgcttcggctgcttgccctctccctgctcttcgcagtggccactcctgtcagggacatcgcccacgatgcctgctcgtcagaagtgaaggatttccagcacctgaacaacagctcggggctccacctgacgctgcaccacccgcagagcccctgctccccggcgccgctgcccgccgacctccccttctccgcggtgctcgcccacgacggcgcgcgcatcgcgtcgctcgccgcgcgcctcgccaagacgccgtcctctcggcccaccttgcttgacgagagccgcgcggggtcgtcgtcgtcgtcccccgatgacgagtccctcgcgtccgtgccgctcggcccgggcacgtccgtcggcgtcggcaactacgtcacccgcatgggcctcggcacgccggccaagtcgtacgtcatggtcgtggacacggggtcctcgctcacctggctccagtgctccccctgcgtcgtgtcgtgccaccgccagtccggcccggtgttcaaccccaaggcgtccagctcctacgcctccgtgtcctgctccgcgcagcagtgcagcgacctcaccaccgccacgctcaaccccgcctcctgctccacctccaacgtctgcatctaccaggccagctacggcgacagctccttctcggtcgggtatctgagcaaggacaccgtgtcgttcggctccaccagcgtgcccaacttctactacggctgcggacaagacaacgagggcctcttcgggcagtcggcggggctcatcggcctggcgcgtaacaagctgtcgctgctgtaccagctggcgccgagcatgggctactccttctcctactgcctcccgacgtcgtcgtcgtcctcctcggggtacctgtccatcggctcctacaacccggggcagtactcgtacacgcccatggcgtcgagctcgctggacgactcgctctacttcatcaagatgaccgggatcaaggtcgcgggcaagccgctgtccgtgtcgtcgtcggcctactccagcctgccgacgatcatcgactccggcacggtgatcacgcgcctgcctacgggcgtgtactcggcgctcagcaaggcggtggcgggcgccatgaaggggacgccccgcgcgtcggcgttctccatcctggacacgtgcttccagggccaggcggcgcggctgcgcgtgcccgaggtcaccatggccttcgccggcggcgcggcgctcaagctggccgccaggaacctgctggtggacgtggacagcgccaccacgtgcctggccttcgcgcccgcccggagcgccgccatcatcgggaacacgcagcagcagacgttcagcgtcgtctacgacgtcaagaacagcaagatcgggttcgccgccgccggctgcagctgagaagcgacacctacatacacgcgcatgcacagaccgactcggcaactaaaactaaaacgagcagcgcatgcatgcatctaccgtccggtttcgtctgaaaccatcattaatttcgatcgtccactccacgcacagcaagttctttacggaccttgccgcatatgatatgtacatggtgacaagataaggtacaggagaattg

SEQ ID NO: 7274 - protein, 465 aa, Zea mays subsp. mays
  peptide (1)..(465): Ceres Seq. ID no. 12352507
MALLRLLALSLLFAVATPVRDIAHDACSSEVKDFQHLNNSSGLHLTLHHPQSPCSPAPLPADLPFSAVLAHDGARIASLAARLAKTPSSRPTLLDESRAGSSSSSPDDESLASVPLGPGTSVGVGNYVTRMGLGTPAKSYVMVVDTGSSLTWLQCSPCVVSCHRQSGPVFNPKASSSYASVSCSAQQCSDLTTATLNPASCSTSNVCIYQASYGDSSFSVGYLSKDTVSFGSTSVPNFYYGCGQDNEGLFGQSAGLIGLARNKLSLLYQLAPSMGYSFSYCLPTSSSSSSGYLSIGSYNPGQYSYTPMASSSLDDSLYFIKMTGIKVAGKPLSVSSSAYSSLPTIIDSGTVITRLPTGVYSALSKAVAGAMKGTPRASAFSILDTCFQGQAARLRVPEVTMAFAGGAALKLAARNLLVDVDSATTCLAFAPARSAAIIGNTQQQTFSVVYDVKNSKIGFAAAGCS

SEQ ID NO: 7275 - protein, 335 aa, Zea mays subsp. mays
  peptide (1)..(335): Ceres Seq. ID no. 12352508
MGLGTPAKSYVMVVDTGSSLTWLQCSPCVVSCHRQSGPVFNPKASSSYASVSCSAQQCSDLTTATLNPASCSTSNVCIYQASYGDSSFSVGYLSKDTVSFGSTSVPNFYYGCGQDNEGLFGQSAGLIGLARNKLSLLYQLAPSMGYSFSYCLPTSSSSSSGYLSIGSYNPGQYSYTPMASSSLDDSLYFIKMTGIKVAGKPLSVSSSAYSSLPTIIDSGTVITRLPTGVYSALSKAVAGAMKGTPRASAFSILDTCFQGQAARLRVPEVTMAFAGGAALKLAARNLLVDVDSATTCLAFAPARSAAIIGNTQQQTFSVVYDVKNSKIGFAAAGCS

SEQ ID NO: 7276 - protein, 324 aa, Zea mays subsp. mays
  peptide (1)..(324): Ceres Seq. ID no. 12352509
MVVDTGSSLTWLQCSPCVVSCHRQSGPVFNPKASSSYASVSCSAQQCSDLTTATLNPASCSTSNVCIYQASYGDSSFSVGYLSKDTVSFGSTSVPNFYYGCGQDNEGLFGQSAGLIGLARNKLSLLYQLAPSMGYSFSYCLPTSSSSSSGYLSIGSYNPGQYSYTPMASSSLDDSLYFIKMTGIKVAGKPLSVSSSAYSSLPTIIDSGTVITRLPTGVYSALSKAVAGAMKGTPRASAFSILDTCFQGQAARLRVPEVTMAFAGGAALKLAARNLLVDVDSATTCLAFAPARSAAIIGNTQQQTFSVVYDVKNSKIGFAAAGCS

SEQ ID NO: 7277 - DNA, 930 bp, Zea mays subsp. mays
  misc_feature (1)..(930): Ceres Seq. ID no. 12402182
  misc_feature (1)..(930): Ortholog of  Ceres SEQ ID NO 13595270 as cited in SEQ ID NO 56714
  misc_feature (1)..(930): Ortholog of  Ceres SEQ ID NO 14309148 as cited in SEQ ID NO 0
atcagcaagaacacgtctgcctctcaccaaccgcggcttgccaaccttctaattagcctttgacccacccccccgccgcccgccgccgcagaccatggaacacgcgtccgccttcctcgcgcgcgcgctcaccactccgctcccggcacccgccgccctcccgcgccgccgcccggctcgcgtggccgtcgccgccgcggcgccggagcgcaggccgccgggcgcggtggcgtccaccaccaantacgtcgtgccgctcgacgcggcgccgtccgggatcacgcgcccgctcgtcgagatcctccgcgacctcaacaagcgcgtcccggacgccatcgtgcggccctcctcccggcgcgcctccgcctccgaccccgtcatcccctggtaccatgccaataggatgctcagcttttatggtccaggttggtgtggggaagttcgtgatgttatttacactgacagtggaaaggtaacggtcatataccgcgtgactgtgcgcggaacagatggagaggttcacagggaggctgctggaacagcatcgctgagcgatgaacggttcgacgaccccgtgtctgcggcagaagaggcagcgttctgcaaagcctgcgcgaggttcggtttcggcctttacctgtaccatgaagacgagacaccatagaagaccaacaatttctccacatcgtctatgccggccctgttctgttcagatttgcgcttgaggggctgtgctctactgttgttgatcagtaagtctatcagatacccatcccattgctgctaggtccttgagctgttgtaacgctggtactatatgttgtttgctcgttttggtagctttgtcttgcaaaaaaatgttgtcagctacaattggtatggattatggaactattagtatatatgcaatacttttttgttgcttacctc

SEQ ID NO: 7278 - protein, 189 aa, Zea mays subsp. mays
  peptide (1)..(189): Ceres Seq. ID no. 12402183
  misc_feature (50)..(50): Xaa is any aa, unknown or other
MEHASAFLARALTTPLPAPAALPRRRPARVAVAAAAPERRPPGAVASTTXYVVPLDAAPSGITRPLVEILRDLNKRVPDAIVRPSSRRASASDPVIPWYHANRMLSFYGPGWCGEVRDVIYTDSGKVTVIYRVTVRGTDGEVHREAAGTASLSDERFDDPVSAAEEAAFCKACARFGFGLYLYHEDETP

SEQ ID NO: 7279 - DNA, 857 bp, Zea mays subsp. mays
  misc_feature (1)..(857): Ceres Seq. ID no. 12351562
  misc_feature (1)..(857): Ortholog of  Ceres SEQ ID NO 12608953 as cited in SEQ ID NO 51227
  misc_feature (1)..(857): Ortholog of  Ceres SEQ ID NO 12635416 as cited in SEQ ID NO 0
  misc_feature (1)..(857): Ortholog of  Ceres SEQ ID NO 12635564 as cited in SEQ ID NO 0
  misc_feature (1)..(857): Ortholog of  Ceres SEQ ID NO 12636917 as cited in SEQ ID NO 0
aacttccgcccaaatccaccaccgccataccagcgtgtccgcgattccgtcgagtagactgggcgagagagtagtctcggacgagaagaggcgaatatgagttccggcggcggcaggggcaagcccaaggggtccaaggctgtgtcgcggtcgaccaaggccgggctgcagttccccgtcggccgcatcgcgcgctacctcaaggccggcaagtacgccgagcgcgtcggcggtggtgcgcccgtctacctctccgccgtcctcgagtatctcgcggcagaggtaactgcctccctcttcttttccctgccctccatttctctccccccctccctttagcgaatccgtttggatgtttgttgaatctttgcggtacgctcataatcgtttgcctgcaggtgttggaactggcgggcaacgcggcgcgcgacaacaagaagaaccgcatcgtgccgcgtcacatccagctcgccgtgcgcaacgacgaggaactcagcaagctgctcggagctgtcaccatcgccgccggaggtgtgttgcccaacattcatcagacgctgctgcccaagaaggccggtgggaagggcaaggccgacatcggttccgcatcccaggagttctaagcggccgcggcggcggttgcaggtttctctgacttgttcgaactggagctccaacatgcatgaagtccccccgttgctcaagtttcgtcgattagtagtgttagggtgttttctatctttggttaggtttaggttgtctgatggatggtttatcagacgaaagtttggtgatcgagggcttcctgtatgtatcaatcaatcttgctggaatggaacaaatcgttggttgcagtt

SEQ ID NO: 7280 - protein, 100 aa, Zea mays subsp. mays
  peptide (1)..(100): Ceres Seq. ID no. 12351563
MFVESLRYAHNRLPAGVGTGGQRGARQQEEPHRAASHPARRAQRRGTQQAARSCHHRRRRCVAQHSSDAAAQEGRWEGQGRHRFRIPGVLSGRGGGCRFL

SEQ ID NO: 7281 - protein, 80 aa, Zea mays subsp. mays
  peptide (1)..(80): Ceres Seq. ID no. 12351564
MSSGGGRGKPKGSKAVSRSTKAGLQFPVGRIARYLKAGKYAERVGGGAPVYLSAVLEYLAAEVTASLFFSLPSISLPPSL

SEQ ID NO: 7282 - protein, 59 aa, Zea mays subsp. mays
  peptide (1)..(59): Ceres Seq. ID no. 12351565
MHEVPPLLKFRRLVVLGCFLSLVRFRLSDGWFIRRKFGDRGLPVCINQSCWNGTNRWLQ

SEQ ID NO: 7283 - DNA, 765 bp, Zea mays subsp. mays
  misc_feature (1)..(765): Ceres Seq. ID no. 12403404
  misc_feature (1)..(765): Ortholog of  Ceres SEQ ID NO 15169682 as cited in SEQ ID NO 54434
ttccaaaacccaacgcggcaaacggcttcctcatccccctcccctcgccatggccgtccccacctccacctcctccccgctccccctcctcttcctccatcgctgcaccgcaaactctagcccctcggttctctccttcccgtcctccctccgcggcgcgtccctccgctcccgggccgcggccgcaccgcccgcagagaccctctctgccgacggcatccccgacgcgccaccggaaggggcgggaacgggaattccgttgccatcgtcgattggggatgatggggagcagcttgcacccaagcagaagatcagaatcaagctgcggtcctactgggtgccgttgatagaggactcgtgcaagaagataaccgaagctgccaaaacaaccaacgcaaagaccatgggtcccgttcctctgcccactaagaggagagtctattgtgtgcttaactctcctcacgtgcacaaggactcacggttccatttcgagatccggacgcatcagcggctgattgatatcatgtatccaactgcccaaacaattgattcgttgatgcaactccagctccctgccggtgtggatgttgaggttaagctatgattctgttggagctgaacttttcgaagtttgatgtaatgaggtattcattttctgcagcttttctctgggactgaaagaaatgtagtgcctgtactaggaaagaagatgttcagaattgaatgtacttgatttgaagtatatcagatgatatggttcatgcc

SEQ ID NO: 7284 - protein, 200 aa, Zea mays subsp. mays
  peptide (1)..(200): Ceres Seq. ID no. 12403405
SKTQRGKRLPHPPPLAMAVPTSTSSPLPLLFLHRCTANSSPSVLSFPSSLRGASLRSRAAAAPPAETLSADGIPDAPPEGAGTGIPLPSSIGDDGEQLAPKQKIRIKLRSYWVPLIEDSCKKITEAAKTTNAKTMGPVPLPTKRRVYCVLNSPHVHKDSRFHFEIRTHQRLIDIMYPTAQTIDSLMQLQLPAGVDVEVKL

SEQ ID NO: 7285 - protein, 184 aa, Zea mays subsp. mays
  peptide (1)..(184): Ceres Seq. ID no. 12403406
MAVPTSTSSPLPLLFLHRCTANSSPSVLSFPSSLRGASLRSRAAAAPPAETLSADGIPDAPPEGAGTGIPLPSSIGDDGEQLAPKQKIRIKLRSYWVPLIEDSCKKITEAAKTTNAKTMGPVPLPTKRRVYCVLNSPHVHKDSRFHFEIRTHQRLIDIMYPTAQTIDSLMQLQLPAGVDVEVKL

SEQ ID NO: 7286 - protein, 114 aa, Zea mays subsp. mays
  peptide (1)..(114): Ceres Seq. ID no. 12403407
PKPNAANGFLIPLPSPWPSPPPPPPRSPSSSSIAAPQTLAPRFSPSRPPSAARPSAPGPRPHRPQRPSLPTASPTRHRKGREREFRCHRRLGMMGSSLHPSRRSESSCGPTGCR

SEQ ID NO: 7287 - DNA, 479 bp, Zea mays subsp. mays
  misc_feature (1)..(479): Ceres Seq. ID no. 6403897
  misc_feature (1)..(479): Ortholog of  Ceres SEQ ID NO 15180374 as cited in SEQ ID NO 0
atatatccagtcccgtggagtagcgacggtatcgtgggtagcttccttctcgcatcgactagcagtgtttcacgcggttttgtttggcctaggagctgctggatctgcacgtttagcccggttacgtacatatgaatgttgaaaagctcaagaagatggcaggtgctgtgcgcaccggnggggaagggtagcgtgcgcaggaagaagaaggcagtccacaagactacaaccacagatgacaaacggcttcaaagcaccttgaaaagaataggagtgaacagcattcctggtattgaagaggtcaacatctttaaggatgatgttgttattcagtttgtaaatcctaaagtgcaagcgtcaattggtgctaatacatgggtggtcagtggaactccacagacaaagaagctgcaagatctgcttccgtcgattatcaaccagcttggtcctgacaacctggacaatctgcggaggctcgc

SEQ ID NO: 7288 - protein, 114 aa, Zea mays subsp. mays
  peptide (1)..(114): Ceres Seq. ID no. 6403898
  misc_feature (15)..(15): Xaa is any aa, unknown or other
MLKSSRRWQVLCAPXGKGSVRRKKKAVHKTTTTDDKRLQSTLKRIGVNSIPGIEEVNIFKDDVVIQFVNPKVQASIGANTWVVSGTPQTKKLQDLLPSIINQLGPDNLDNLRRL

SEQ ID NO: 7289 - DNA, 1147 bp, Zea mays subsp. mays
  misc_feature (1)..(1147): Ceres Seq. ID no. 13628192
  misc_feature (1)..(1147): Ortholog of  Ceres SEQ ID NO 13599444 as cited in SEQ ID NO 517
  misc_feature (1)..(1147): Ortholog of  Ceres SEQ ID NO 15169431 as cited in SEQ ID NO 60449
  misc_feature (1)..(1147): Ortholog of  Ceres SEQ ID NO 12615444 as cited in SEQ ID NO 62593
  misc_feature (1)..(1147): Ortholog of  Ceres SEQ ID NO 14302204 as cited in SEQ ID NO 63150
aacccctgcaaaaacccgccactctcagatccgcacagcgacgcccgccagccagacccgatcccctccctcgctagggttttcgtccccgcgccgccgcgctcccggatcccaccgaaacaaccatggccggcggtcccgcggcggtgtcgttcctgaccaacatcgcgaaggtggctgcggggctcggagccgcggcctcgctcgcctccgcgtcgctctacaccgtcgacggcggcgagcgcgccgtcatcttcgaccgtttccgcggggtgctcccggagaccgtcggcgagggcacccatttcctcgtgccctggctgcagaagcccttcatcttcgacatccgcacgcgcccgcacaacttctcctccaactcggggaccaaggacctgcagatggtcaacctcacgctccgtctcctctcccgccccgacgtccagcacctccccaccatcttcacctccctcggactcgagtacgacgacaaagtgctcccctccatcggcaacgaggtgctcaaggccgtcgtcgcccagttcaatgccgaccagctcctcaccgaccgcccccacgtctccgccctcgtccgcgacgctctcatccgccgcgcccgcgagttcaacatcatcctcgacgacgtcgccatcacccacctctcctatggtatcgagttctcgctggccgttgagaagaagcaggtcgcgcagcaggaggccgagcgctccaagttcctcgtcgccaaggcggagcaggagaggcgggcggccatcgtgcgcgctgagggagagagcgagtccgcgcgcctcatctctgaggccacggcgatggctgggacagggctgatcgagctcaggaggatcgaggcggccaaggagattgccgcagagctggctcgctcaccgaatgtggcatacattccttctggggaaaacggaaagatgctgcttggtctcaatgctactggatttggccggtgattcactgtttttttagtctgcttgtgctatgtgctgatgcatgactaaaacggaggttcgaactttgaaggacagtgatatctgctatccttgcttatgttaagttttccttgtcttggaactaaatgtgtctgttgtgctccaaataagttttggtttttgactgc

SEQ ID NO: 7290 - protein, 284 aa, Zea mays subsp. mays
  peptide (1)..(284): Ceres Seq. ID no. 13628193
MAGGPAAVSFLTNIAKVAAGLGAAASLASASLYTVDGGERAVIFDRFRGVLPETVGEGTHFLVPWLQKPFIFDIRTRPHNFSSNSGTKDLQMVNLTLRLLSRPDVQHLPTIFTSLGLEYDDKVLPSIGNEVLKAVVAQFNADQLLTDRPHVSALVRDALIRRAREFNIILDDVAITHLSYGIEFSLAVEKKQVAQQEAERSKFLVAKAEQERRAAIVRAEGESESARLISEATAMAGTGLIELRRIEAAKEIAAELARSPNVAYIPSGENGKMLLGLNATGFGR

SEQ ID NO: 7291 - protein, 229 aa, Zea mays subsp. mays
  peptide (1)..(229): Ceres Seq. ID no. 13628194
TPAKTRHSQIRTATPASQTRSPPSLGFSSPRRRAPGSHRNNHGRRSRGGVVPDQHREGGCGARSRGLARLRVALHRRRRRARRHLRPFPRGAPGDRRRGHPFPRALAAEALHLRHPHAPAQLLLQLGDQGPADGQPHAPSPLPPRRPAPPHHLHLPRTRVRRQSAPLHRQRGAQGRRRPVQCRPAPHRPPPRLRPRPRRSHPPRPRVQHHPRRRRHHPPLLWYRVLAGR

SEQ ID NO: 7292 - protein, 193 aa, Zea mays subsp. mays
  peptide (1)..(193): Ceres Seq. ID no. 13628195
MVNLTLRLLSRPDVQHLPTIFTSLGLEYDDKVLPSIGNEVLKAVVAQFNADQLLTDRPHVSALVRDALIRRAREFNIILDDVAITHLSYGIEFSLAVEKKQVAQQEAERSKFLVAKAEQERRAAIVRAEGESESARLISEATAMAGTGLIELRRIEAAKEIAAELARSPNVAYIPSGENGKMLLGLNATGFGR

SEQ ID NO: 7293 - DNA, 734 bp, Zea mays subsp. mays
  misc_feature (1)..(734): Ceres Seq. ID no. 12401914
  misc_feature (1)..(734): Ortholog of  Ceres SEQ ID NO 13594766 as cited in SEQ ID NO 51913
  misc_feature (1)..(734): Ortholog of  Ceres SEQ ID NO 12609226 as cited in SEQ ID NO 59300
  misc_feature (1)..(734): Ortholog of  Ceres SEQ ID NO 13654942 as cited in SEQ ID NO 62533
  misc_feature (1)..(734): Ortholog of  Ceres SEQ ID NO 13599195 as cited in SEQ ID NO 0
acccacccacccaccgagctgcctgctacacccctgccaagatccatctttccggttccgccgcctgatcgaagtgaacaagcaagtaagagccatggcgagcgagcacgcggcggggggcgatgctaagcatcaccagaagcagagcctgatggacaaggcgaaggggttcgtcgcggagaagatcgcgcacatccccaagcccgaggccacgctggacggcgtgacgttcaagggcctgagccgggagtgcatcacgctgcacagcancgtgaacgtgtccaacccctacgaccaccgcctccccatctgcgaggtgacctacacgctccggtgcgccggcaaggaggtggcgtccggcaccatgccggaccccggctggatcgccgccagcggctccaccgcgctggagatccccgccaaggtgccctacgacttcctcgtctccctcgtcagggacgtcggccgggactgggacatcgactacgagctccaggtcgggctcaccgtngacctccccatngtcggcaacttcaccatcccgctntccacctctggcgagttcaagctccccaccctcaaggacttgttctgatctagtagtagctcgcttgccttgtgttctgtgcgggcgcgcaccagcgatctgtacgacgagcttttgcaaataaacgacgcagctcctctgttctatatatctcagtgaatgcctaagctaaggggatggatggttt

SEQ ID NO: 7294 - protein, 197 aa, Zea mays subsp. mays
  peptide (1)..(197): Ceres Seq. ID no. 12401915
  misc_feature (90)..(90): Xaa is any aa, unknown or other
  misc_feature (170)..(170): Xaa is any aa, unknown or other
  misc_feature (174)..(174): Xaa is any aa, unknown or other
  misc_feature (182)..(182): Xaa is any aa, unknown or other
PTHPPSCLLHPCQDPSFRFRRLIEVNKQVRAMASEHAAGGDAKHHQKQSLMDKAKGFVAEKIAHIPKPEATLDGVTFKGLSRECITLHSXVNVSNPYDHRLPICEVTYTLRCAGKEVASGTMPDPGWIAASGSTALEIPAKVPYDFLVSLVRDVGRDWDIDYELQVGLTXDLPXVGNFTIPXSTSGEFKLPTLKDLF

SEQ ID NO: 7295 - protein, 166 aa, Zea mays subsp. mays
  peptide (1)..(166): Ceres Seq. ID no. 12401916
  misc_feature (59)..(59): Xaa is any aa, unknown or other
  misc_feature (139)..(139): Xaa is any aa, unknown or other
  misc_feature (143)..(143): Xaa is any aa, unknown or other
  misc_feature (151)..(151): Xaa is any aa, unknown or other
MASEHAAGGDAKHHQKQSLMDKAKGFVAEKIAHIPKPEATLDGVTFKGLSRECITLHSXVNVSNPYDHRLPICEVTYTLRCAGKEVASGTMPDPGWIAASGSTALEIPAKVPYDFLVSLVRDVGRDWDIDYELQVGLTXDLPXVGNFTIPXSTSGEFKLPTLKDLF

SEQ ID NO: 7296 - protein, 147 aa, Zea mays subsp. mays
  peptide (1)..(147): Ceres Seq. ID no. 12401917
  misc_feature (40)..(40): Xaa is any aa, unknown or other
  misc_feature (120)..(120): Xaa is any aa, unknown or other
  misc_feature (124)..(124): Xaa is any aa, unknown or other
  misc_feature (132)..(132): Xaa is any aa, unknown or other
MDKAKGFVAEKIAHIPKPEATLDGVTFKGLSRECITLHSXVNVSNPYDHRLPICEVTYTLRCAGKEVASGTMPDPGWIAASGSTALEIPAKVPYDFLVSLVRDVGRDWDIDYELQVGLTXDLPXVGNFTIPXSTSGEFKLPTLKDLF

SEQ ID NO: 7297 - DNA, 1017 bp, Zea mays subsp. mays; identical to SEQ ID NO: 2776
  misc_feature (1)..(1017): Ceres Seq. ID no. 12402465
  misc_feature (1)..(1017): Ortholog of  Ceres SEQ ID NO 13647648 as cited in SEQ ID NO 20346
  misc_feature (1)..(1017): Ortholog of  Ceres SEQ ID NO 15179852 as cited in SEQ ID NO 66623

SEQ ID NO: 7298 - protein, 255 aa, Zea mays subsp. mays; identical to SEQ ID NO: 2777
  peptide (1)..(255): Ceres Seq. ID no. 12402466

SEQ ID NO: 7299 - protein, 220 aa, Zea mays subsp. mays; identical to SEQ ID NO: 2778
  peptide (1)..(220): Ceres Seq. ID no. 12402467

SEQ ID NO: 7300 - protein, 196 aa, Zea mays subsp. mays; identical to SEQ ID NO: 2779
  peptide (1)..(196): Ceres Seq. ID no. 12402468

SEQ ID NO: 7301 - DNA, 1053 bp, Zea mays subsp. mays
  misc_feature (1)..(1053): Ceres Seq. ID no. 12365672
  misc_feature (1)..(1053): Ortholog of  Ceres SEQ ID NO 13574788 as cited in SEQ ID NO 68
  misc_feature (1)..(1053): Ortholog of  Ceres SEQ ID NO 12609388 as cited in SEQ ID NO 52081
  misc_feature (1)..(1053): Ortholog of  Ceres SEQ ID NO 14309072 as cited in SEQ ID NO 0
atccatccgcgcgctcttaatttagcttcctcctccgatcctcacctactagcaggcacagacagcagcatcgatcggatcggagcagcacagcgcgcgtcaccgcaagctcaagtgtcttcttccttgcttgcttgcctgcttacctctcagttccccactcacgtctcttgccgtacgtacgtgcgtccaacacaccaggtgaaaatgggctcggagacggagacggtcaacgtggaaggcatcccgttcccggcggagatcaccgtcggcaaccctctctccctcctaggcacaggcatcacggacatcgagatccacttcctgcagatcaagtacaacgccatcggagtctatctccacaacgccggcggcggcgacagcaccacgctgctgggccacctcggggcctggaagggcaagacggcggaggagctcctagcggacgccgccttctgggccgcgctggtggcggcccccgtcgagaagctgttccgcgtcgtggtcatcaaggagatcaagggctcgcagtacggcgtgcagcttgagagctccgtccgcgaccgcctcgccgccgccgacctctacgaggacgacgaagaggaggcgctcgagaaggtcgccgacttcttccagtccaagtacttcaagccgggctccgtcgtcaccttccacttcccggcaccggcctccgcctccccgggacccgcggcggagatcaccttcgcgacggagggcaagggcgacgccaggatcgcggtggagaacgggaacgtcgccgggatgatccagacctggtacctcggcggcgactccgcggtgtcccccagcaccgtccgcagcctggccgaccgtttcgccgcgctgctcgccgtcgcagcgtgatttatatgatgctcagtctgctttaatctaatttccggccggttggtcgagttgcgttggatttgagttcgtgaatgtccgttctgtacgcgtcttgtctcgtgtgtgttgtcgtttgcagcgaatttgcaagtaataataataaaaagtatgtcctgtaggttgtgc

SEQ ID NO: 7302 - protein, 294 aa, Zea mays subsp. mays
  peptide (1)..(294): Ceres Seq. ID no. 12365673
IHPRALNLASSSDPHLLAGTDSSIDRIGAAQRASPQAQVSSSLLACLLTSQFPTHVSCRTYVRPTHQVKMGSETETVNVEGIPFPAEITVGNPLSLLGTGITDIEIHFLQIKYNAIGVYLHNAGGGDSTTLLGHLGAWKGKTAEELLADAAFWAALVAAPVEKLFRVVVIKEIKGSQYGVQLESSVRDRLAAADLYEDDEEEALEKVADFFQSKYFKPGSVVTFHFPAPASASPGPAAEITFATEGKGDARIAVENGNVAGMIQTWYLGGDSAVSPSTVRSLADRFAALLAVAA

SEQ ID NO: 7303 - protein, 225 aa, Zea mays subsp. mays
  peptide (1)..(225): Ceres Seq. ID no. 12365674
MGSETETVNVEGIPFPAEITVGNPLSLLGTGITDIEIHFLQIKYNAIGVYLHNAGGGDSTTLLGHLGAWKGKTAEELLADAAFWAALVAAPVEKLFRVVVIKEIKGSQYGVQLESSVRDRLAAADLYEDDEEEALEKVADFFQSKYFKPGSVVTFHFPAPASASPGPAAEITFATEGKGDARIAVENGNVAGMIQTWYLGGDSAVSPSTVRSLADRFAALLAVAA

SEQ ID NO: 7304 - DNA, 1048 bp, Zea mays subsp. mays
  misc_feature (1)..(1048): Ceres Seq. ID no. 12336653
  misc_feature (1)..(1048): Ortholog of  Ceres SEQ ID NO 14309202 as cited in SEQ ID NO 0
gctgtcctactccacacaccgcgctcacctactccaatccagacccctctctccctcacccacagtccccgccggcgccgcgtccgcgtcctgtgcgcctcgctcactctgcttccgccgccgccgcagcagtcgtctcgcagcggagcggacccggaggcctaccatggcagcggcaatctcgctggaggccggcggggccctggcccatgacctagggtctgcagtcgtcacaggtggtgtcgccctcgcgctcctcaaattctttgaggagctcgccaagcgcggcgtcttcgagcagaaactcagcaggaagcttgttcatataagcgttgggctggtattcatgctcttttggcctctttttagctctggatggtatactcctttccttgctgcgctagcaccaggggttaacattataaggatgcttctactggggctgggacttatgaaaaacgaggctatggttaaatcaatgagccgctctggagattacagggaacttctcaagggcccactgtattatgctgctactataacttttgccacgtctcttttatggagaacctcaccagttgctatagcacttatatgcaacttatgtgctggggatggtatagccgatgttgttgggagacgcctaggtaaagaaaagcttccatacaatcccaacaaatcatatgctggaagcatagcaatggcggtggctggttttctggcctcagttgggtatatgcattacttccacactttcggttttattgaggaaacatggtacatggctttaagcttcctcgtggtctctgtagctgcagcactcgttgaatcgcaccccatcagcacagaacttgatgacaatttgactgttcttttgacatcattcctagttggtagcctcatcttttgatgtttaggcgcaaggacgtatgagatgtttctccgtcatgctgtaatcttctgatgtttaggctcaaggacatatgagatgtttctccgtcatgctgtattttatgtaaaacgtttctaaaatactactataattgtg

SEQ ID NO: 7305 - protein, 302 aa, Zea mays subsp. mays
  peptide (1)..(302): Ceres Seq. ID no. 12336654
LSYSTHRAHLLQSRPLSPSPTVPAGAASASCAPRSLCFRRRRSSRLAAERTRRPTMAAAISLEAGGALAHDLGSAVVTGGVALALLKFFEELAKRGVFEQKLSRKLVHISVGLVFMLFWPLFSSGWYTPFLAALAPGVNIIRMLLLGLGLMKNEAMVKSMSRSGDYRELLKGPLYYAATITFATSLLWRTSPVAIALICNLCAGDGIADVVGRRLGKEKLPYNPNKSYAGSIAMAVAGFLASVGYMHYFHTFGFIEETWYMALSFLVVSVAAALVESHPISTELDDNLTVLLTSFLVGSLIF

SEQ ID NO: 7306 - protein, 247 aa, Zea mays subsp. mays
  peptide (1)..(247): Ceres Seq. ID no. 12336655
MAAAISLEAGGALAHDLGSAVVTGGVALALLKFFEELAKRGVFEQKLSRKLVHISVGLVFMLFWPLFSSGWYTPFLAALAPGVNIIRMLLLGLGLMKNEAMVKSMSRSGDYRELLKGPLYYAATITFATSLLWRTSPVAIALICNLCAGDGIADVVGRRLGKEKLPYNPNKSYAGSIAMAVAGFLASVGYMHYFHTFGFIEETWYMALSFLVVSVAAALVESHPISTELDDNLTVLLTSFLVGSLIF

SEQ ID NO: 7307 - protein, 187 aa, Zea mays subsp. mays
  peptide (1)..(187): Ceres Seq. ID no. 12336656
MLFWPLFSSGWYTPFLAALAPGVNIIRMLLLGLGLMKNEAMVKSMSRSGDYRELLKGPLYYAATITFATSLLWRTSPVAIALICNLCAGDGIADVVGRRLGKEKLPYNPNKSYAGSIAMAVAGFLASVGYMHYFHTFGFIEETWYMALSFLVVSVAAALVESHPISTELDDNLTVLLTSFLVGSLIF

SEQ ID NO: 7308 - DNA, 1345 bp, Zea mays subsp. mays
  misc_feature (1)..(1345): Ceres Seq. ID no. 12407229
  misc_feature (1)..(1345): Ortholog of  Ceres SEQ ID NO 13595542 as cited in SEQ ID NO 59862
aaaacctctagagccaaaaagacataaacaccataaaaaagagctcatttaccatccgcaggagctcccttccagacgcttccgctcttctctctctgcttccggcagaaatcaaggcagtattaggatggtgaccccgcgcctcttcgcgcgactctaccggcattgcgtcggcgcagcggctgcgtcatcagccgcggggcggcaccggggggccctggcagcggcggccgtggagcagttcgccggttcctccctgcctgtcggggttccaaaatttttgaatcatcatttcagatactcaaccagcatttttcaaaagattggtttctcgtctgtttcaccacaacaaagtgatgatgatgttaatgagctgaaagaccacgaaagggccttagatggatcaagtgaagattgtccatctggaagtattgaaggccttgatctgtcgagagatgatttggtgaagctagttcgtgagaaggatggattgttgaagtccaaagatggtgaaatcaaagatatgaaggataaggttttgcgcagctatgcagaaatggaaaatatcattgctcggacaaaacgtgaatctgagaactccaaaaaatatgcagtacagaacttctctaagagcctgctagatgttgctgacaatttggctagggcatcatctgttgtcaaggaaagcttctcgaaaattgatacctcaaaagattctgctggagctgtcccactactgaaaaccctgctggagggtgtggacatgactgagaagcaacttgcagaggtcttcaagaagtttggagtcgaaaaatttgacccgctgaatgaggaatttgatcctaacaggcattgtcagtttttcaaattcctgatccttcaaaaccaccggggaccgttgcttctgttgtaaaggtgggctacatgttacacgatcgcgtcctccgccctgccgaagtcggcgtcactgccacggagggaggtgcgcatgcaactgaagaggcagagaagccggaggagaaaacagcgagggactaaagttagccgtggtgtagtcaaggaggattgaatgccgtttctgtttagagtttgagaaacatgaatgaatgcagaaaacttttggccgtgttcgacacggggagaaagtttagcaagcaggctggcgccttttttttttttcttgtttggaacttggaatgaaatccattttggggtttggagcaaccctgcatgtcgtacaacaccttctgcctgctagtatgtgaccgttgaccttgagggatgggcatgaggcccttggccgatactaaagagctgtgctgccgtgatcggctttctgtggctc

SEQ ID NO: 7309 - protein, 303 aa, Zea mays subsp. mays
  peptide (1)..(303): Ceres Seq. ID no. 12407230
KPLEPKRHKHHKKELIYHPQELPSRRFRSSLSASGRNQGSIRMVTPRLFARLYRHCVGAAAASSAAGRHRGALAAAAVEQFAGSSLPVGVPKFLNHHFRYSTSIFQKIGFSSVSPQQSDDDVNELKDHERALDGSSEDCPSGSIEGLDLSRDDLVKLVREKDGLLKSKDGEIKDMKDKVLRSYAEMENIIARTKRESENSKKYAVQNFSKSLLDVADNLARASSVVKESFSKIDTSKDSAGAVPLLKTLLEGVDMTEKQLAEVFKKFGVEKFDPLNEEFDPNRHCQFFKFLILQNHRGPLLLL

SEQ ID NO: 7310 - protein, 261 aa, Zea mays subsp. mays
  peptide (1)..(261): Ceres Seq. ID no. 12407231
MVTPRLFARLYRHCVGAAAASSAAGRHRGALAAAAVEQFAGSSLPVGVPKFLNHHFRYSTSIFQKIGFSSVSPQQSDDDVNELKDHERALDGSSEDCPSGSIEGLDLSRDDLVKLVREKDGLLKSKDGEIKDMKDKVLRSYAEMENIIARTKRESENSKKYAVQNFSKSLLDVADNLARASSVVKESFSKIDTSKDSAGAVPLLKTLLEGVDMTEKQLAEVFKKFGVEKFDPLNEEFDPNRHCQFFKFLILQNHRGPLLLL

SEQ ID NO: 7311 - DNA, 1233 bp, Zea mays subsp. mays; identical to SEQ ID NO: 2545
  misc_feature (1)..(1233): Ceres Seq. ID no. 13564187
  misc_feature (1)..(1233): Ortholog of  Ceres SEQ ID NO 15172729 as cited in SEQ ID NO 56037
  misc_feature (1)..(1233): Ortholog of  Ceres SEQ ID NO 13584899 as cited in SEQ ID NO 64830
  misc_feature (1)..(1233): Ortholog of  Ceres SEQ ID NO 13654441 as cited in SEQ ID NO 67814
  misc_feature (1)..(1233): Ortholog of  Ceres SEQ ID NO 13596128 as cited in SEQ ID NO 67831
  misc_feature (1)..(1233): Ortholog of  Ceres SEQ ID NO 12585194 as cited in SEQ ID NO 68878
  misc_feature (1)..(1233): Ortholog of  Ceres SEQ ID NO 12589186 as cited in SEQ ID NO 0

SEQ ID NO: 7312 - protein, 267 aa, Zea mays subsp. mays; identical to SEQ ID NO: 2546
  peptide (1)..(267): Ceres Seq. ID no. 13564188

SEQ ID NO: 7313 - protein, 251 aa, Zea mays subsp. mays; identical to SEQ ID NO: 2547
  peptide (1)..(251): Ceres Seq. ID no. 13564189

SEQ ID NO: 7314 - DNA, 870 bp, Zea mays subsp. mays
  misc_feature (1)..(870): Ceres Seq. ID no. 12566255
  misc_feature (1)..(870): Ortholog of  Ceres SEQ ID NO 13600072 as cited in SEQ ID NO 0
taatcgaaaaagactcatcagttcagttcaatccaatccaaattccaatcccacccagccccttccaagaactccagtcgtccaacaaaagcaggagtcgcatcccagacgcccccgcaatcccgcatcagagacaggcagggagggaaccgagatctgtccgtccgtgtcgatggagtcaacggtggagcggataagctcgtcggtgcagtcctgggtgaaggaccacgagctcgcagccatcggaggcgtgtgggctgcggcggcgggcgcttcggtggcgtacagccggaggaaggcgccgcagcggggcacgggcctgcgcctcatccacgccaggatgcacgcgcaggcgctcacgctcgccgtcctcggcggcgccgccctcttccactgctacggcgacggcggccgcaggaagagggccgacgacatcgacctcgacttctactcgcagctgccgccggcaaccgacgccgacggcaacgagaaccagcggtggagctggtaggaggaggagccgaggagaaggaagaactgtagcagactagcagtgggtgcttgcagcaataataattgaggtggggcctatgacgtggcgcgcgggagggattagtctgtgctaatcctaatccatcctacgacgggcggcccgtttacttaacattatcggtccatgctgtcatggccggcaccacatccacatctactagtcatctaggagcagccgcccatagtttgctgctgctgctgcttctctcctgtatcacagtactaccaccaccaccatttgtttatctgatgaatgaacggtggcgatgatgacgatattgtttatatcacgttttcatttttttttttgcactcttc

SEQ ID NO: 7315 - protein, 169 aa, Zea mays subsp. mays
  peptide (1)..(169): Ceres Seq. ID no. 12566256
NRKRLISSVQSNPNSNPTQPLPRTPVVQQKQESHPRRPRNPASETGREGTEICPSVSMESTVERISSSVQSWVKDHELAAIGGVWAAAAGASVAYSRRKAPQRGTGLRLIHARMHAQALTLAVLGGAALFHCYGDGGRRKRADDIDLDFYSQLPPATDADGNENQRWSW

SEQ ID NO: 7316 - protein, 112 aa, Zea mays subsp. mays
  peptide (1)..(112): Ceres Seq. ID no. 12566257
MESTVERISSSVQSWVKDHELAAIGGVWAAAAGASVAYSRRKAPQRGTGLRLIHARMHAQALTLAVLGGAALFHCYGDGGRRKRADDIDLDFYSQLPPATDADGNENQRWSW

SEQ ID NO: 7317 - DNA, 1530 bp, Zea mays subsp. mays
  misc_feature (1)..(1530): Ceres Seq. ID no. 12408856
  misc_feature (1)..(1530): Ortholog of  Ceres SEQ ID NO 15176016 as cited in SEQ ID NO 56593
  misc_feature (1)..(1530): Ortholog of  Ceres SEQ ID NO 13660260 as cited in SEQ ID NO 67494
acttctttctcgtcttcctctcctgtctcctcgcagcagggtgctggaagaagtttctggttaggagaatccggttgaggttgccatttcccaacttcttccagcggttcggctcggaggcgaactgagatgtcctgttcgtgatcggtttgttcttgcagctgcagacagcttgtcgattccttgcttgaggagcagccatggacagaagaaaccgaccagctccgttggttgacagctctgcatgcttttgccgagtggacagatcatccgccgcggcggcggcgaggcgaatcccagtgtcgaaggcgtgcgtgcaaccgagcctcagggcgtccatccacccgctgaagccacggccgggcgcagagcggagccgcggaggggcgtgcccgctgctcccaggccttccggacgacctcgccattgcctgtctcatccgggtgcccagagccgaccactggaagctgaggctggtgtgccggaagtggtgccgcctgctcgccggcaactacttctacggcctccgccggcggctcgggctcgcggagcagtggctgtacgccgtgaagcgcgacggcagggacgggcgcgtgtcgtgggacgtgctcgacccgtcgcgcggcgagtggcgcgcgctgccgcccgtgccgggcgagtacgcggaggccgacgggttcggctgcgccgtgctcggcggctgccacctgtacctgctcggcggcagggacccgcgcaggggcagcgccatgcggcgggtggtgttctacagcgcccggagcaaccggtggcaccgcgcgccggacatgctgcgccgccggcagttcttcgacgtgtgcgtcatgggcaaccgcctgtacgtcgcgggcggtgagggtggcggcggcgggctcaggtccgctgaggtgttcgacccggccaagaaccgctggtccttcgtggccgagatggccgcgccgatggcgccgttcgtcagcgcggtgcatggcgggcggtggttcgtgaagggtattggcgcgcagcagcaggtgctaagccaggcatactccccggtgtctgactcgtggtccatcgtcctcgacggcatggtcaccggctggcggagccccagcgcgtgcctcaacggccggctctatgctgcagagtgcatggacggatgccggttgagggcctacgacgaggccgtggacgcgtggagcacctgcgccgacagcaagcagcaccgagggagctcccaggcggctgccattgtcgccctccacggaaggctcttcgtcgtccgcaacgacatgagcgtctcggccgtccaggtggcggccgaggcgggaaagcagaggtggcagaccctcgccggcaaagcgcataccaagagctttgtcacgggcctgttgtccaacctctctggtcgcagccgcgccaagaacaacatcctccattgccaagttcttgaggtctagctgtcttgctccctgatgagctatgcttataagttactagaatcacgcaatgaaaaagtacgtgagaaatctc

SEQ ID NO: 7318 - protein, 418 aa, Zea mays subsp. mays
  peptide (1)..(418): Ceres Seq. ID no. 12408857
MDRRNRPAPLVDSSACFCRVDRSSAAAAARRIPVSKACVQPSLRASIHPLKPRPGAERSRGGACPLLPGLPDDLAIACLIRVPRADHWKLRLVCRKWCRLLAGNYFYGLRRRLGLAEQWLYAVKRDGRDGRVSWDVLDPSRGEWRALPPVPGEYAEADGFGCAVLGGCHLYLLGGRDPRRGSAMRRVVFYSARSNRWHRAPDMLRRRQFFDVCVMGNRLYVAGGEGGGGGLRSAEVFDPAKNRWSFVAEMAAPMAPFVSAVHGGRWFVKGIGAQQQVLSQAYSPVSDSWSIVLDGMVTGWRSPSACLNGRLYAAECMDGCRLRAYDEAVDAWSTCADSKQHRGSSQAAAIVALHGRLFVVRNDMSVSAVQVAAEAGKQRWQTLAGKAHTKSFVTGLLSNLSGRSRAKNNILHCQVLEV

SEQ ID NO: 7319 - protein, 235 aa, Zea mays subsp. mays
  peptide (1)..(235): Ceres Seq. ID no. 12408858
MRRVVFYSARSNRWHRAPDMLRRRQFFDVCVMGNRLYVAGGEGGGGGLRSAEVFDPAKNRWSFVAEMAAPMAPFVSAVHGGRWFVKGIGAQQQVLSQAYSPVSDSWSIVLDGMVTGWRSPSACLNGRLYAAECMDGCRLRAYDEAVDAWSTCADSKQHRGSSQAAAIVALHGRLFVVRNDMSVSAVQVAAEAGKQRWQTLAGKAHTKSFVTGLLSNLSGRSRAKNNILHCQVLEV

SEQ ID NO: 7320 - protein, 216 aa, Zea mays subsp. mays
  peptide (1)..(216): Ceres Seq. ID no. 12408859
MLRRRQFFDVCVMGNRLYVAGGEGGGGGLRSAEVFDPAKNRWSFVAEMAAPMAPFVSAVHGGRWFVKGIGAQQQVLSQAYSPVSDSWSIVLDGMVTGWRSPSACLNGRLYAAECMDGCRLRAYDEAVDAWSTCADSKQHRGSSQAAAIVALHGRLFVVRNDMSVSAVQVAAEAGKQRWQTLAGKAHTKSFVTGLLSNLSGRSRAKNNILHCQVLEV

SEQ ID NO: 7321 - DNA, 1606 bp, Zea mays subsp. mays
  misc_feature (1)..(1606): Ceres Seq. ID no. 13498353
  misc_feature (1)..(1606): Ortholog of  Ceres SEQ ID NO 14316550 as cited in SEQ ID NO 57662
  misc_feature (1)..(1606): Ortholog of  Ceres SEQ ID NO 14302333 as cited in SEQ ID NO 63121
  misc_feature (1)..(1606): Ortholog of  Ceres SEQ ID NO 13596976 as cited in SEQ ID NO 63125
  misc_feature (1)..(1606): Ortholog of  Ceres SEQ ID NO 15179988 as cited in SEQ ID NO 0
gaaaatttccggtgctgagcgtgcatcggcagagctgactgtgactggtgaactgaaggaaaggggaggagaaggggagggaagctttgggcgggagaggaagcctagcagcaacagtaggcagtagcagggttgaccggaggggcagtggagtctggagagtaacccaacaaccccctcctcccctccccttctgtcttattgccacctctccacgtctccaccaaacaaggcaacaagggagaagtagatctgcatctgcgagaggaggcagcgggggtggtgatgatggagagccagccgctgcaggccccgacggccacggctccggcccccggatctgcggagccagccggagctccgccggccgtcacccccggcaaggagttcacgcgcacctgcaagggcctcgtcgtcgtgctcatcggaggatacgtgctgctccagctcctcccttcgtcactcaactacctcgccatcatcccctccaagacaatcccctatgtatggaccgtctttaccgctggttacatcgagcaagtcctcccaggggccattggcagttctcttggtcttctcttttgtggaaaggacattgaaccagcatggggccgcaaggaattcttgaagttcattattttgatcaactccatctgtggcattcttgcattttgctttgctattggactctactacgtcactggaaaggagagcttccttgtcacaccactttctggtttccacggttgccttgctggctttcttgtggccctgaagcaactcttaccaaaccttgagcttcctatgtgctttttctggaaaataaaggcaaagtggatgccattctttgttgtatgtttctcaagtatcatggccttcatcgtgcctgattccattaacttcctgccaactttggtgtccgggatgtacgttagctggctttacctgagatacttccaaaggaacccactgactggacttaagggtgatcccagtgatgacttttccttccccagtttattcccagctgccatgagaccagttacggaccctgtggccaacctgtttgataggctgttgtgtgcaaggtccaggcctttggaagtcgccctcccgatatcagatcctaccaaggcttcaagaagaagggagcgtggcgagagggttcttgaggaaaggttggcggctgacaatgctggtgacacagaggcctcgcctcgtggccatggcaccgcggaagactgagaactttcttgtgaccatcagctcctcttataggagccatggctttgctccctccagcgtttatagctctgcacttttgtcttctggagatggagctattcagttcacagcgaacgaataatacgatgttcttagtttctctttttttccgcttctttgtctgcgaggatttattggttaaattgtgtactagtcaattgttatggtacagcgaaaaagagagaagagggtgatggcatttgcagcgaggtgttgagattccgttgtagccatgcatttgcagccgattgtttggtactggtcaaagttctgtagtagtcatatactctgcttaaaatatagaaagaagaatggcttcgtc

SEQ ID NO: 7322 - protein, 319 aa, Zea mays subsp. mays
  peptide (1)..(319): Ceres Seq. ID no. 13498354
MMESQPLQAPTATAPAPGSAEPAGAPPAVTPGKEFTRTCKGLVVVLIGGYVLLQLLPSSLNYLAIIPSKTIPYVWTVFTAGYIEQVLPGAIGSSLGLLFCGKDIEPAWGRKEFLKFIILINSICGILAFCFAIGLYYVTGKESFLVTPLSGFHGCLAGFLVALKQLLPNLELPMCFFWKIKAKWMPFFVVCFSSIMAFIVPDSINFLPTLVSGMYVSWLYLRYFQRNPLTGLKGDPSDDFSFPSLFPAAMRPVTDPVANLFDRLLCARSRPLEVALPISDPTKASRRRERGERVLEERLAADNAGDTEASPRGHGTAED

SEQ ID NO: 7323 - protein, 318 aa, Zea mays subsp. mays
  peptide (1)..(318): Ceres Seq. ID no. 13498355
MESQPLQAPTATAPAPGSAEPAGAPPAVTPGKEFTRTCKGLVVVLIGGYVLLQLLPSSLNYLAIIPSKTIPYVWTVFTAGYIEQVLPGAIGSSLGLLFCGKDIEPAWGRKEFLKFIILINSICGILAFCFAIGLYYVTGKESFLVTPLSGFHGCLAGFLVALKQLLPNLELPMCFFWKIKAKWMPFFVVCFSSIMAFIVPDSINFLPTLVSGMYVSWLYLRYFQRNPLTGLKGDPSDDFSFPSLFPAAMRPVTDPVANLFDRLLCARSRPLEVALPISDPTKASRRRERGERVLEERLAADNAGDTEASPRGHGTAED

SEQ ID NO: 7324 - DNA, 1201 bp, Zea mays subsp. mays
  misc_feature (1)..(1201): Ceres Seq. ID no. 13492541
  misc_feature (1)..(1201): Ortholog of  Ceres SEQ ID NO 12562983 as cited in SEQ ID NO 53309
  misc_feature (1)..(1201): Ortholog of  Ceres SEQ ID NO 14309224 as cited in SEQ ID NO 0
gcgcgcccgtggcccgtaaaagacaccaacccacttctcgaatcgaatccaggtccagggacgccgctacccgccgtccttcacccccgccatgccaacgctcggcatctcgccgctgctggacgcctacttccggcgccgcttcgccgcagcgggcctcgtggaggcctccgtcccgctggacggcggcgccaccacggtccactgctggcgcttcccgccggggtccgccgacggcgaggacgacgcccgtcccgtcctggtgctcctgcacggcttcgggcccccggcaacgtggcagtggaggcgccaggtgggccctctctcgcgccggttccgcctcgtcgtcccggacctgctcttcttcggcggctcgtccacgtcggcggcggcgcccggcgccgggcgggtgtccgaggcgcggcaggcggaggcggtggcgaagctcgtggcggccctggtggcgccgccggcgcgcgtgtcggtggccggcaccagctacggcgggttcgtggcgtaccacctggcgcggctgctgggccccggcgcggtggaccgggtggtgatcgccagctccgacctcctcaaggccgacgccgacgaccgcgccctgctccgccgcggcgccgccgagcgcgtcgaggacgtcatgctgccccgctcccccgagcggatgcggcgcctgatgcagctcgcctaccaccgcccgcgccgcttcacgccgggcttcgtgctccgggatctcgcccagtatctgtacagcgacaaagtagaagagaagaaggagctaatcaaggggataacgctgggcaacaaagacaagttccagcttacacctctcccccaggaagtccttgtgttgtggggagagcacgaccagatattcccagtcgagaaggcatttcaagtggcaaggaaacttggagcgaatgctaggctggaggtcctcaaggacaccggccacatgcctcaagaagaggatccaaagcggttcaacgaggcaatcctcaacttcttgcttccagctccaaagtcgtccttgtaacgcgatatatatcccatagttattcacttattattcaggcccaaggagagttcacgatttcgatatgcacattctgcccgatcagtgcagtctttgtcgctttggtatcacctcaccttcaagattgatcatggaaactattgctatttatctgcc

SEQ ID NO: 7325 - protein, 317 aa, Zea mays subsp. mays
  peptide (1)..(317): Ceres Seq. ID no. 13492542
MPTLGISPLLDAYFRRRFAAAGLVEASVPLDGGATTVHCWRFPPGSADGEDDARPVLVLLHGFGPPATWQWRRQVGPLSRRFRLVVPDLLFFGGSSTSAAAPGAGRVSEARQAEAVAKLVAALVAPPARVSVAGTSYGGFVAYHLARLLGPGAVDRVVIASSDLLKADADDRALLRRGAAERVEDVMLPRSPERMRRLMQLAYHRPRRFTPGFVLRDLAQYLYSDKVEEKKELIKGITLGNKDKFQLTPLPQEVLVLWGEHDQIFPVEKAFQVARKLGANARLEVLKDTGHMPQEEDPKRFNEAILNFLLPAPKSSL

SEQ ID NO: 7326 - protein, 311 aa, Zea mays subsp. mays
  peptide (1)..(311): Ceres Seq. ID no. 13492543
ARPWPVKDTNPLLESNPGPGTPLPAVLHPRHANARHLAAAGRLLPAPLRRSGPRGGLRPAGRRRHHGPLLALPAGVRRRRGRRPSRPGAPARLRAPGNVAVEAPGGPSLAPVPPRRPGPALLRRLVHVGGGARRRAGVRGAAGGGGGEARGGPGGAAGARVGGRHQLRRVRGVPPGAAAGPRRGGPGGDRQLRPPQGRRRRPRPAPPRRRRARRGRHAAPLPRADAAPDAARLPPPAPLHAGLRAPGSRPVSVQRQSRREEGANQGDNAGQQRQVPAYTSPPGSPCVVGRARPDIPSREGISSGKETWSEC

SEQ ID NO: 7327 - protein, 187 aa, Zea mays subsp. mays
  peptide (1)..(187): Ceres Seq. ID no. 13492544
APVARKRHQPTSRIESRSRDAATRRPSPPPCQRSASRRCWTPTSGAASPQRASWRPPSRWTAAPPRSTAGASRRGPPTARTTPVPSWCSCTASGPRQRGSGGARWALSRAGSASSSRTCSSSAARPRRRRRPAPGGCPRRGRRRRWRSSWRPWWRRRRACRWPAPATAGSWRTTWRGCWAPARWTGW

SEQ ID NO: 7328 - DNA, 1109 bp, Zea mays subsp. mays
  misc_feature (1)..(1109): Ceres Seq. ID no. 13498696
  misc_feature (1)..(1109): Ortholog of  Ceres SEQ ID NO 14304132 as cited in SEQ ID NO 56475
  misc_feature (1)..(1109): Ortholog of  Ceres SEQ ID NO 13664228 as cited in SEQ ID NO 61166
  misc_feature (1)..(1109): Ortholog of  Ceres SEQ ID NO 15179439 as cited in SEQ ID NO 0
ccctgaaactcaactagccgttggagtcaaggcagcggcggcggacgcggctgaaagctgtcgaccgtgccgcgccgcccccaacggtcactggagaggaagaagaaactcgcatttccatccccagccaattgtcgctcgcctttaaatcctgcgccccaccgccgcctccactcccaccgctctctatcctcccactcaaatactcctcaatagccatcgaggagaagggagatagaaacgggagggaacacccactcgatcgtcagccatgacccggggagagaaccaggagtcgcaaaccggtaacgtccccgccgcatccgcggcgacgccggggccgaagccggcgtcggcgggggccgggaaaggcgcggagggccagtctgtggtgcggcggctgcagtcggagctgatggcgctgatgatgggcggcgacccgggcgtgtcggcgtttcccgagggggacaacatgctccactgggtgggcaccatcgacggctccgccgggacggcctacgagggcacctcctaccgcctcgcgttggccttcaccaccgagtacccgtacaagccgcccaaggtgcggttcgacaccccctgcttccaccctaacgtcgacgtgcacggcaacatctgcctggacatcctccaggacaagtggtcctccgcctacgacgtgcgcaccatcctcctctccatccagagcctgcttggagagccgaacaacgactcgccgctcaacactcaggcggcagcgctctgggcgaaccaggaagagtttaggaagatggtggagaaaatctacaagcccgccgcatagaggaggatgacagcgccggtgaagatgtgggttcttcaagcactcatttcgcttggattgatcgacaagagataatatttggattgtttgggttcccagtctggtgctgtagcaggaaggaatatttgggtcgcctagagcgtggcgattctgtaattttgttctttgagttctgaaatgttcagatattcatttttccatgaatcgttttcgtcccttcgcctcttcctaactgcaatattggtatgaaattatgaatatggactggacaagactgattgaattc

SEQ ID NO: 7329 - protein, 183 aa, Zea mays subsp. mays
  peptide (1)..(183): Ceres Seq. ID no. 13498697
MTRGENQESQTGNVPAASAATPGPKPASAGAGKGAEGQSVVRRLQSELMALMMGGDPGVSAFPEGDNMLHWVGTIDGSAGTAYEGTSYRLALAFTTEYPYKPPKVRFDTPCFHPNVDVHGNICLDILQDKWSSAYDVRTILLSIQSLLGEPNNDSPLNTQAAALWANQEEFRKMVEKIYKPAA

SEQ ID NO: 7330 - protein, 135 aa, Zea mays subsp. mays
  peptide (1)..(135): Ceres Seq. ID no. 13498698
MALMMGGDPGVSAFPEGDNMLHWVGTIDGSAGTAYEGTSYRLALAFTTEYPYKPPKVRFDTPCFHPNVDVHGNICLDILQDKWSSAYDVRTILLSIQSLLGEPNNDSPLNTQAAALWANQEEFRKMVEKIYKPAA

SEQ ID NO: 7331 - protein, 132 aa, Zea mays subsp. mays
  peptide (1)..(132): Ceres Seq. ID no. 13498699
MMGGDPGVSAFPEGDNMLHWVGTIDGSAGTAYEGTSYRLALAFTTEYPYKPPKVRFDTPCFHPNVDVHGNICLDILQDKWSSAYDVRTILLSIQSLLGEPNNDSPLNTQAAALWANQEEFRKMVEKIYKPAA

SEQ ID NO: 7332 - DNA, 1576 bp, Zea mays subsp. mays
  misc_feature (1)..(1576): Ceres Seq. ID no. 12565869
  misc_feature (1)..(1576): Ortholog of  Ceres SEQ ID NO 14310841 as cited in SEQ ID NO 53666
tattgtgaggggctactgttgggggccttcggcttccgaaggtcctcaaaaatgtaatttgactatgttttccaggagaaatatgtgaacaggtaccttcgaagtcagattgcgagtatacaagagcatggttaagacgaagcttgactgggacggcgatcacgacgaaggataagacgatcacgaagctatgtgcagaagagcttcggcataacggcgggaaggggaaaccgacttaaagatgaaaagccaaattagacctcgaagaattactatagagttattgataaatgtaaagggcattaatgtaattttgcatgggctgcgacccgtgcctataaataggtgaacagtattcccgtactgttcacgctgacttggcattcacttttgcgtcacgcctgtattctcattccttcaagccgaaggtacatttgtaatttaccattgtttacataagtaatataaatggaaatagattaataataatgtttatagaaattatgttactttctatactttgtatgaatgttctccatcttctatcatgatcatgaaggtgaatctgacataacaaaggagcgaattgagaaaattctcaaggctggagctaatgttgtgttgaccaccaagggaattgacgatatgtccttgaagtactttgttgaggctggtgcgattgcagtaaggcgtgtgcgcaaggaagatttgcgacatgttgccaaagccactggtgcaactatggtgtctacttttgcggacatggaaggtgaagaaacattcgattcatcattccttggccatgctgatgaagttgtggaggaaagaattgctgacgatgatgttattctggtgaaaggcacaaagaacaccagcgcggtctctataatacttaggggcgcaaatgactacatgcttgatgagattgaacggtccttgcatgatgccctgtgcattgtgaagagaaccctggaatcaaatatggttgttgctgggggtggtgcagttgaagctgcgctgtcagctttatctggagaaccttgcaacaaccctgggttctcgggaacaattggcaattgctgaatttgctgagtctttgttaatcataccaaaggtactatctgttaatgctgcaaaagatgcaactgagcttgtagcaaagcttagggcatatcatcatactgctcaaacaaaggccgacaagcaacattattcaagtatgggccttgacctctctaagggtatcattcgcaacaaccttgagtatggcgtgatagagccatcgatgagcaaagtaaagatcattcagtttgccacggaggctgccattactatcctgaggattgacgacatgatcaagcttaccaaggaagaagagggtaacgaagagtaagcagcccaccagtagtgggctagtggactcccatgggatggttgccatagcatgtagcacttgttttttcacttatcgtttacttttgcttgctgtgagcattcgtttgtaggaaaagtgagaacggatgtgtatcaatccgtgttgggtgacgatgactcacggatgaatcaaatatttgcc

SEQ ID NO: 7333 - protein, 184 aa, Zea mays subsp. mays
  peptide (1)..(184): Ceres Seq. ID no. 12565870
MFSIFYHDHEGESDITKERIEKILKAGANVVLTTKGIDDMSLKYFVEAGAIAVRRVRKEDLRHVAKATGATMVSTFADMEGEETFDSSFLGHADEVVEERIADDDVILVKGTKNTSAVSIILRGANDYMLDEIERSLHDALCIVKRTLESNMVVAGGGAVEAALSALSGEPCNNPGFSGTIGNC

SEQ ID NO: 7334 - protein, 145 aa, Zea mays subsp. mays
  peptide (1)..(145): Ceres Seq. ID no. 12565871
MSLKYFVEAGAIAVRRVRKEDLRHVAKATGATMVSTFADMEGEETFDSSFLGHADEVVEERIADDDVILVKGTKNTSAVSIILRGANDYMLDEIERSLHDALCIVKRTLESNMVVAGGGAVEAALSALSGEPCNNPGFSGTIGNC

SEQ ID NO: 7335 - protein, 113 aa, Zea mays subsp. mays
  peptide (1)..(113): Ceres Seq. ID no. 12565872
MVSTFADMEGEETFDSSFLGHADEVVEERIADDDVILVKGTKNTSAVSIILRGANDYMLDEIERSLHDALCIVKRTLESNMVVAGGGAVEAALSALSGEPCNNPGFSGTIGNC

SEQ ID NO: 7336 - DNA, 1555 bp, Zea mays subsp. mays
  misc_feature (1)..(1555): Ceres Seq. ID no. 12434998
  misc_feature (1)..(1555): Ortholog of  Ceres SEQ ID NO 12364737 as cited in SEQ ID NO 51089
  misc_feature (1)..(1555): Ortholog of  Ceres SEQ ID NO 14311515 as cited in SEQ ID NO 51680
  misc_feature (1)..(1555): Ortholog of  Ceres SEQ ID NO 14306553 as cited in SEQ ID NO 53121
  misc_feature (1)..(1555): Ortholog of  Ceres SEQ ID NO 13582301 as cited in SEQ ID NO 56509
  misc_feature (1)..(1555): Ortholog of  Ceres SEQ ID NO 13595567 as cited in SEQ ID NO 56760
  misc_feature (1)..(1555): Ortholog of  Ceres SEQ ID NO 14315035 as cited in SEQ ID NO 56880
  misc_feature (1)..(1555): Ortholog of  Ceres SEQ ID NO 13594147 as cited in SEQ ID NO 58975
  misc_feature (1)..(1555): Ortholog of  Ceres SEQ ID NO 13655302 as cited in SEQ ID NO 63307
  misc_feature (1)..(1555): Ortholog of  Ceres SEQ ID NO 13597380 as cited in SEQ ID NO 64054
  misc_feature (1)..(1555): Ortholog of  Ceres SEQ ID NO 12625474 as cited in SEQ ID NO 64169
  misc_feature (1)..(1555): Ortholog of  Ceres SEQ ID NO 13597502 as cited in SEQ ID NO 64681
  misc_feature (1)..(1555): Ortholog of  Ceres SEQ ID NO 15180805 as cited in SEQ ID NO 0
acaccaagagcaggctcacgccgcaacctagcctgcacgcactctcagtctctcactgaccgcgaccagcgctcagccttctgctccggaagctagctctccggccagccaccccaccccgtccacccgacaatggcggccgccgtggccctcctcctgctctccgccctcggcggagcggcggcgcaggtgttccctccgtggaacggcacgttcccgatggggcccgggttcggaggcgggagcagcggcggcggcgcgggcgcgggcgcggggaccggcgtgccggcgatgttcgtgttcggggactcgctgacggacaacggcaacaacaacgacctgaactcgctcgccaaggctaactacccgccctacggcatcgacttcgccggcggccctaccggccgcttctccaacggctacaccatggtcgacgagatcgctcagctgctgggcctgccgctgctgccgtcgcacacggacgcggcgtcgagcggcggcggcgacgcggcgctgcacggcgtgaactacgcgtcggcggcggcggggatcctggacaacacggggcagaacttcgtggggcgcatcccgttcaaccagcagatcaagaacttcgagcagacgctggagcagctgcggcgccggacgacgacgacgaggccgggcgcgggcgcgggcgggctggcgcggagcatcttctacgtgggcatgggcagcaacgactacctcaacaactacctcatgcccaactacaacacccgcaacgagtacaacggcgaccagtactccacgctgctggtgcgccagtacgccaggcagctcgacgcgctctacggcctgggcgcccgcaggttcgtcatcgccggggtgggctccatggcctgcatccccaacatgcgcgcgcggagccccgtcaacatgtgctcgcccgacgtcgacgacctcatcatccctttcaacaccaaggtcaaggccatggtgaccagcctcaacgccaaccgcccggacgccaagttcatctacgtcgacaactacgccatgatctcccagatcctaagcaacccgtggtcctacgggttcagcgtggccgaccgcggctgctgcggcatcgggaggaaccggggcatgatcacctgcctgcccttcctgcgcccgtgcctcaaccgcaactcctacatcttctgggacgccttccacccgacggagagggtcaacgtgctcctcggcagggccgccttcagtggcggcaacgacgtcgtctaccccatgaacatccagcagctcgccgcatggcagccgtgactcggtgcaaagctgtcgatcgatcgatgcgtcgttttgtagcactacttactgctatagcgtgtgtggtcatgagtaggagggagctgagcggagttatggtacggtgcgtatcagcgaccagtatcctgctgtttggggtcaatgtcaacatcgtgtctcttgtttttggttcatcagttagttatctatcaatgtttgttcgcttattacctgtactgcatcacggagatcagtggagtcatatatttcc

SEQ ID NO: 7337 - protein, 389 aa, Zea mays subsp. mays
  peptide (1)..(389): Ceres Seq. ID no. 12434999
MAAAVALLLLSALGGAAAQVFPPWNGTFPMGPGFGGGSSGGGAGAGAGTGVPAMFVFGDSLTDNGNNNDLNSLAKANYPPYGIDFAGGPTGRFSNGYTMVDEIAQLLGLPLLPSHTDAASSGGGDAALHGVNYASAAAGILDNTGQNFVGRIPFNQQIKNFEQTLEQLRRRTTTTRPGAGAGGLARSIFYVGMGSNDYLNNYLMPNYNTRNEYNGDQYSTLLVRQYARQLDALYGLGARRFVIAGVGSMACIPNMRARSPVNMCSPDVDDLIIPFNTKVKAMVTSLNANRPDAKFIYVDNYAMISQILSNPWSYGFSVADRGCCGIGRNRGMITCLPFLRPCLNRNSYIFWDAFHPTERVNVLLGRAAFSGGNDVVYPMNIQQLAAWQP

SEQ ID NO: 7338 - protein, 360 aa, Zea mays subsp. mays
  peptide (1)..(360): Ceres Seq. ID no. 12435000
MGPGFGGGSSGGGAGAGAGTGVPAMFVFGDSLTDNGNNNDLNSLAKANYPPYGIDFAGGPTGRFSNGYTMVDEIAQLLGLPLLPSHTDAASSGGGDAALHGVNYASAAAGILDNTGQNFVGRIPFNQQIKNFEQTLEQLRRRTTTTRPGAGAGGLARSIFYVGMGSNDYLNNYLMPNYNTRNEYNGDQYSTLLVRQYARQLDALYGLGARRFVIAGVGSMACIPNMRARSPVNMCSPDVDDLIIPFNTKVKAMVTSLNANRPDAKFIYVDNYAMISQILSNPWSYGFSVADRGCCGIGRNRGMITCLPFLRPCLNRNSYIFWDAFHPTERVNVLLGRAAFSGGNDVVYPMNIQQLAAWQP

SEQ ID NO: 7339 - protein, 336 aa, Zea mays subsp. mays
  peptide (1)..(336): Ceres Seq. ID no. 12435001
MFVFGDSLTDNGNNNDLNSLAKANYPPYGIDFAGGPTGRFSNGYTMVDEIAQLLGLPLLPSHTDAASSGGGDAALHGVNYASAAAGILDNTGQNFVGRIPFNQQIKNFEQTLEQLRRRTTTTRPGAGAGGLARSIFYVGMGSNDYLNNYLMPNYNTRNEYNGDQYSTLLVRQYARQLDALYGLGARRFVIAGVGSMACIPNMRARSPVNMCSPDVDDLIIPFNTKVKAMVTSLNANRPDAKFIYVDNYAMISQILSNPWSYGFSVADRGCCGIGRNRGMITCLPFLRPCLNRNSYIFWDAFHPTERVNVLLGRAAFSGGNDVVYPMNIQQLAAWQP

SEQ ID NO: 7340 - DNA, 695 bp, Zea mays subsp. mays
  misc_feature (1)..(695): Ceres Seq. ID no. 12382109
  misc_feature (1)..(695): Ortholog of  Ceres SEQ ID NO 14301738 as cited in SEQ ID NO 61201
gcacgagaccattacctagaacatcctaatcgaaaaaacactcaatcaactagctcaacaacacctgacctgatacaaaaggagccctagagttccagagacgaagaaaggagaagaagccaatcagccaccagccatgatgagtgccaagagacttgttcagatgtcaagtagtaggtggcgaagaatggcggccctcgcgaggaagaggctcgcatcgacacctgtgaaagaaactgacgggtcgtcatgcagcacttcgtcggtggctggcaaaggccactgtgccatgtactcggctgatggtcggcggtttgaggtcccgttggtgttcctcggaacggctctcttcggtgagctcctgagcatgtcgcaggaggagttcggcttcgctggtgatgacggcaggatcaccttgccatgtgagtctttggtgatggagtacatgatgtgtttgcttacaagagatgcctctgaagaggtcaaaaggttgtttttgagctccatggcaaggccttgccactatggatctggactggtgcaaaccatgcatcatacccagcgaactgttgttcctagcttctgaagattagcatatatgcgcagtagcaagcagattgttttcaccttttcgtgtttgatgtaaatgtttacataatgtagattgggatggaatggaactaaccatatggttc

SEQ ID NO: 7341 - protein, 149 aa, Zea mays subsp. mays
  peptide (1)..(149): Ceres Seq. ID no. 12382110
MMSAKRLVQMSSSRWRRMAALARKRLASTPVKETDGSSCSTSSVAGKGHCAMYSADGRRFEVPLVFLGTALFGELLSMSQEEFGFAGDDGRITLPCESLVMEYMMCLLTRDASEEVKRLFLSSMARPCHYGSGLVQTMHHTQRTVVPSF

SEQ ID NO: 7342 - protein, 148 aa, Zea mays subsp. mays
  peptide (1)..(148): Ceres Seq. ID no. 12382111
MSAKRLVQMSSSRWRRMAALARKRLASTPVKETDGSSCSTSSVAGKGHCAMYSADGRRFEVPLVFLGTALFGELLSMSQEEFGFAGDDGRITLPCESLVMEYMMCLLTRDASEEVKRLFLSSMARPCHYGSGLVQTMHHTQRTVVPSF

SEQ ID NO: 7343 - protein, 140 aa, Zea mays subsp. mays
  peptide (1)..(140): Ceres Seq. ID no. 12382112
MSSSRWRRMAALARKRLASTPVKETDGSSCSTSSVAGKGHCAMYSADGRRFEVPLVFLGTALFGELLSMSQEEFGFAGDDGRITLPCESLVMEYMMCLLTRDASEEVKRLFLSSMARPCHYGSGLVQTMHHTQRTVVPSF

SEQ ID NO: 7344 - DNA, 1241 bp, Zea mays subsp. mays
  misc_feature (1)..(1241): Ceres Seq. ID no. 12344775
  misc_feature (1)..(1241): Ortholog of  Ceres SEQ ID NO 12611141 as cited in SEQ ID NO 55992
acggttagttgtttcacacggacgcgcatttgtcgcgatcgacgatcgagaaaatcctagggttttcctctctcgccgccgccgacttaaagaggacagaggagtaggcgaagtagcgccgggagaggaacatggggacgccggagacgtcgcgggagccgtgcccggaccggatcctggacgacgtcggcggcgcgttcgggatgggcgccgttggcggctccgcctatcacttcatcaagggcatctacaactccccaaacgggatgcgcctgtccggaggcgcgcagaccgtgcgcatgaacgcgccgcgcgtggggggcagcttcgccgtttggggcggcctcttctccaccttcgactgcgccatggtgtacgcgcgccagaaggaggacccttggaactccatcgttgcgggcgcagccacgggcgggttcctctctatgcgccagggcatgggggccgcgggccggtccgcgctcatgggcggcatcctgctggccctcatcgagggcgccggactcatgctcaatcgcgtcctcgccaacccgccgctgcccgccgacgatcccaaccttacagcggccatgggcggcaaccctttcccgggcctgccgcaggcgccgccggtcgtggcacctccggaagcggcgacctccagcggcgtgggtggcttgttcgggggactgtttggcaggaaggaggaggataagaaacccagcgcagtcgggggcaagtcggagatcttggagagcttcgacacgcccagcagtccgataccatcgttcgagtacaagtgaggaaaaggttggctgacgccactgttgcttgcttggtgttgcaatgtggtggtggtggtctggaattggtgaattgcatgtcagcgatacaataacacagacaggacaggagatggattgtttgatgaatttattcctgcgccgctctgcctcgacggctcatatctatacgcccgcttgtgtatgtataagccctttttcaaaacgtggcagattggctactttttgatgagatgtagtagtatctgtaggagcaacagctgtagtattatatgcattcgtgtttgtgcaatgcaatgcacatcaaaacccttgtgcggttgtgcctggccatctgaagggacgacttatttgttcatgtcgctggtcttcgttttgctggcccagtggcctacgaggctgtgctgtgttaaggattggacatctgaagggttcttttgc

SEQ ID NO: 7345 - protein, 236 aa, Zea mays subsp. mays
  peptide (1)..(236): Ceres Seq. ID no. 12344776
RLVVSHGRAFVAIDDRENPRVFLSRRRRLKEDRGVGEVAPGEEHGDAGDVAGAVPGPDPGRRRRRVRDGRRWRLRLSLHQGHLQLPKRDAPVRRRADRAHERAARGGQLRRLGRPLLHLRLRHGVRAPEGGPLELHRCGRSHGRVPLYAPGHGGRGPVRAHGRHPAGPHRGRRTHAQSRPRQPAAARRRSQPYSGHGRQPFPGPAAGAAGRGTSGSGDLQRRGWLVRGTVWQEGGG

SEQ ID NO: 7346 - protein, 222 aa, Zea mays subsp. mays
  peptide (1)..(222): Ceres Seq. ID no. 12344777
MGTPETSREPCPDRILDDVGGAFGMGAVGGSAYHFIKGIYNSPNGMRLSGGAQTVRMNAPRVGGSFAVWGGLFSTFDCAMVYARQKEDPWNSIVAGAATGGFLSMRQGMGAAGRSALMGGILLALIEGAGLMLNRVLANPPLPADDPNLTAAMGGNPFPGLPQAPPVVAPPEAATSSGVGGLFGGLFGRKEEDKKPSAVGGKSEILESFDTPSSPIPSFEYK

SEQ ID NO: 7347 - protein, 198 aa, Zea mays subsp. mays
  peptide (1)..(198): Ceres Seq. ID no. 12344778
MGAVGGSAYHFIKGIYNSPNGMRLSGGAQTVRMNAPRVGGSFAVWGGLFSTFDCAMVYARQKEDPWNSIVAGAATGGFLSMRQGMGAAGRSALMGGILLALIEGAGLMLNRVLANPPLPADDPNLTAAMGGNPFPGLPQAPPVVAPPEAATSSGVGGLFGGLFGRKEEDKKPSAVGGKSEILESFDTPSSPIPSFEYK

SEQ ID NO: 7348 - DNA, 1006 bp, Zea mays subsp. mays
  misc_feature (1)..(1006): Ceres Seq. ID no. 12344779
  misc_feature (1)..(1006): Ortholog of  Ceres SEQ ID NO 13595857 as cited in SEQ ID NO 56402
agatatggttttcggatacttgaaagcccatcttactctccttccggtcgccgcagtaaacccctaggaagaaaccccaccgcttctggccgccgccggctcaccggtgacggcatccaaatccatggcctcccgccaggcgctccacatcttcacgccctcccggcgggcgatgcacatcctcacgtcgtcccgcggcatcgcctcgaccccgcacctctcgtccttcggctggtttgataagatcaagtccaccatcactggcaagaagcccgaggaggcctccgaggcatcctccttcaccctcatccagttcgcagacacgatggagaaagcgaggaagctggggacgttcaagaacttcgttgccgggcgggccagcgaggccaccgtcgtgaacgtcttcgagaagcactccgctgtgctgcgctacctcggtgccatcgaccccaccggcgagaacctccgaaacactgacaaaattaacgcgaccaagcactgcaactgcacaattgctgacgtggagcacattctggccaagtacacatgggctaaagaggctcagaagaagattgcaaagctcaaggaagaagggaagccattaccgaagtcatttaacgaggtccaaaatctaatgggttctacaccagtggatgtcggcagaagtaatctggcaaagagtggtcagataagtaggaatgctttctgcccatgtggttctaagaaacgatataaaaggtgctgtggagcttcatgagatgaacaacaatcctctagttcactagcacatgcaggccaggtgcagcgtttgtaagctcttttctttgccaaactctaccaagctctttcgtggacaacacctgaatttgaagcttgcaatttgtaaagcactatgagcgagccctatgtttcagaaggctttctcttaaactctgatttcttgattggagttgttgtttaacattgattcagttcaaccatgcatgaatctaggtaatatatatcc

SEQ ID NO: 7349 - protein, 210 aa, Zea mays subsp. mays
  peptide (1)..(210): Ceres Seq. ID no. 12344780
MASRQALHIFTPSRRAMHILTSSRGIASTPHLSSFGWFDKIKSTITGKKPEEASEASSFTLIQFADTMEKARKLGTFKNFVAGRASEATVVNVFEKHSAVLRYLGAIDPTGENLRNTDKINATKHCNCTIADVEHILAKYTWAKEAQKKIAKLKEEGKPLPKSFNEVQNLMGSTPVDVGRSNLAKSGQISRNAFCPCGSKKRYKRCCGAS

SEQ ID NO: 7350 - protein, 194 aa, Zea mays subsp. mays
  peptide (1)..(194): Ceres Seq. ID no. 12344781
MHILTSSRGIASTPHLSSFGWFDKIKSTITGKKPEEASEASSFTLIQFADTMEKARKLGTFKNFVAGRASEATVVNVFEKHSAVLRYLGAIDPTGENLRNTDKINATKHCNCTIADVEHILAKYTWAKEAQKKIAKLKEEGKPLPKSFNEVQNLMGSTPVDVGRSNLAKSGQISRNAFCPCGSKKRYKRCCGAS

SEQ ID NO: 7351 - protein, 143 aa, Zea mays subsp. mays
  peptide (1)..(143): Ceres Seq. ID no. 12344782
MEKARKLGTFKNFVAGRASEATVVNVFEKHSAVLRYLGAIDPTGENLRNTDKINATKHCNCTIADVEHILAKYTWAKEAQKKIAKLKEEGKPLPKSFNEVQNLMGSTPVDVGRSNLAKSGQISRNAFCPCGSKKRYKRCCGAS

SEQ ID NO: 7352 - DNA, 1515 bp, Zea mays subsp. mays
  misc_feature (1)..(1515): Ceres Seq. ID no. 13498565
  misc_feature (1)..(1515): Ortholog of  Ceres SEQ ID NO 13598741 as cited in SEQ ID NO 62749
  misc_feature (1)..(1515): Ortholog of  Ceres SEQ ID NO 12587535 as cited in SEQ ID NO 64020
  misc_feature (1)..(1515): Ortholog of  Ceres SEQ ID NO 15176854 as cited in SEQ ID NO 64525
  misc_feature (1)..(1515): Ortholog of  Ceres SEQ ID NO 12586366 as cited in SEQ ID NO 68983
  misc_feature (1)..(1515): Ortholog of  Ceres SEQ ID NO 15178891 as cited in SEQ ID NO 0
ccattacctagaacatcctaatcgaaaaaagaagccaagggggaagcgaaaccgaaagcgagcagagtttggcaatggagctcccgtggggaatgctgctgccgctgctgctggtcctctccgtctcgtcctcgtcatcgtcgtcggctgctgccacgctcgccgtcagcgctccgcccccactgcttgttcctcctcctcgtcatgctcaagacgccgaaggcatgctcatcaacggcaacttcgagacggcgccgcggaggctgaacaagaccctcatcgtggggcgccactcgctgccggggtggacggtgcaggggcacgtggagtacgtctcgggcggtccccagcccgggggcatgttcttcgcggtgccgcacggcgtgcacgcgctgcgcctcggcagccgcgcgtcggcgtcgcagaacgtgacggtgcggccgggggcgctgtacgcgctcacgttcgcggcgacgcggacgtgcgcgcaggacgaggccctgcgcgtggcggtggcgccgtcgctctcggcgcccgccgacgtcgccgtgcgcacgctctacagcggcgcgtccgccgacacctgggcctggggcttccgcgcctcctcccccgtcgcgcaggtcacgttcgccaaccccggcgtgcaggaggaccccgcgtgcggcccgctgctggacgctgtcgccatcaaggagctgcccgcgccgtacccgaccaaagacaacctgatcaagaacgacggcttcgagatcggtccccaggtgctcaggaactcgacggtcggcgttctgctgccccccaagcagaaggacgcgacgtcgccgctgcccggctggatcatcgagtcgctcaaggcggtgcggttcatcgacgcggcccacttctctgtccccgcggggcagtacgcggtggagctggtggccgggcgggagagcgccatcgcgcaggtcatccgcaccgtgcccaaccgcgcctacaacctgtcgttcgccgtcggcgacgcccggaacggctgccacggctctatgctggtggaggcgttcgcgggcaacgtcacgcagaaggtgccgttcgattccacggggaaaggcgggtttaagacggcggcgttcaggttcgtggccagcggcgtccgcacccgcctcaccttctacagctcctactaccacaccaaggtcaccgacggcgtctcgctctgcggccccgtgctggaccaggtcaaggttgtgcctgtcaaggcgtagtgaaatgtagtgaaatgaatcgtgagagcgccgagtgacggtcgagtgacggtctgctctgctctgctctgctcgtcgtctgtagctgtgctcgtcgtgatttggcgtggtgggttgtgaaagtgtggacgaattatggacccttcggaatctgatcgtggtgtgctgtgcggtgcgatgtgctgtagcgaaatttggttactcatctcttgttctctccgcgtttggaatttgcgttttccaatccggtattgaatgtataataatt

SEQ ID NO: 7353 - protein, 390 aa, Zea mays subsp. mays
  peptide (1)..(390): Ceres Seq. ID no. 13498566
MELPWGMLLPLLLVLSVSSSSSSSAAATLAVSAPPPLLVPPPRHAQDAEGMLINGNFETAPRRLNKTLIVGRHSLPGWTVQGHVEYVSGGPQPGGMFFAVPHGVHALRLGSRASASQNVTVRPGALYALTFAATRTCAQDEALRVAVAPSLSAPADVAVRTLYSGASADTWAWGFRASSPVAQVTFANPGVQEDPACGPLLDAVAIKELPAPYPTKDNLIKNDGFEIGPQVLRNSTVGVLLPPKQKDATSPLPGWIIESLKAVRFIDAAHFSVPAGQYAVELVAGRESAIAQVIRTVPNRAYNLSFAVGDARNGCHGSMLVEAFAGNVTQKVPFDSTGKGGFKTAAFRFVASGVRTRLTFYSSYYHTKVTDGVSLCGPVLDQVKVVPVKA

SEQ ID NO: 7354 - protein, 384 aa, Zea mays subsp. mays
  peptide (1)..(384): Ceres Seq. ID no. 13498567
MLLPLLLVLSVSSSSSSSAAATLAVSAPPPLLVPPPRHAQDAEGMLINGNFETAPRRLNKTLIVGRHSLPGWTVQGHVEYVSGGPQPGGMFFAVPHGVHALRLGSRASASQNVTVRPGALYALTFAATRTCAQDEALRVAVAPSLSAPADVAVRTLYSGASADTWAWGFRASSPVAQVTFANPGVQEDPACGPLLDAVAIKELPAPYPTKDNLIKNDGFEIGPQVLRNSTVGVLLPPKQKDATSPLPGWIIESLKAVRFIDAAHFSVPAGQYAVELVAGRESAIAQVIRTVPNRAYNLSFAVGDARNGCHGSMLVEAFAGNVTQKVPFDSTGKGGFKTAAFRFVASGVRTRLTFYSSYYHTKVTDGVSLCGPVLDQVKVVPVKA

SEQ ID NO: 7355 - protein, 366 aa, Zea mays subsp. mays
  peptide (1)..(366): Ceres Seq. ID no. 13498568
HYLEHPNRKKKPRGKRNRKRAEFGNGAPVGNAAAAAAGPLRLVLVIVVGCCHARRQRSAPTACSSSSSCSRRRRHAHQRQLRDGAAEAEQDPHRGAPLAAGVDGAGARGVRLGRSPARGHVLRGAARRARAAPRQPRVGVAERDGAAGGAVRAHVRGDADVRAGRGPARGGGAVALGARRRRRAHALQRRVRRHLGLGLPRLLPRRAGHVRQPRRAGGPRVRPAAGRCRHQGAARAVPDQRQPDQERRLRDRSPGAQELDGRRSAAPQAEGRDVAAARLDHRVAQGGAVHRRGPLLCPRGAVRGGAGGRAGERHRAGHPHRAQPRLQPVVRRRRRPERLPRLYAGGGVRGQRHAEGAVRFHGERRV

SEQ ID NO: 7356 - DNA, 1693 bp, Zea mays subsp. mays
  misc_feature (1)..(1693): Ceres Seq. ID no. 13498349
  misc_feature (1)..(1693): Ortholog of  Ceres SEQ ID NO 13655506 as cited in SEQ ID NO 64493
actcactcatagaggccgtcaggccagtcgccctcgcccagtagtaggctagtagcgacgggcgacggtggagatcgtgcgaggctgtgtactacctgtacgcctccatcgtcgcctcgcaccatcaatcctgtgcggtgccagatcctccccgggtcttgtcttgtcgcaggtggaagccatgtccgccgcggacgcagccggcggcaaggaggcggcgccggcgtgcgactcctgcacgggcatgccggcggtggtgtactgccgggccgactccgcgaggctgtgcctgcagtgcgaccgccacgtgcacggcgccaacaccgtgtccacccgccacgcccgggcgccgctctgcgccgggtgccacgcagccgctgccgctgccgccacgccggccgcttcctctgcgccagctgccgcttgggggaggagaaggatgagcgggacggcggtggcgccgccgacagtagtagcgacgacggtggcgcggtggaagggtacgccgggtgcccctcggtcgccgatctcgcgaccatcctgggcgccggctccgcgtgggaggagccccagacgctccgcttggagagccggagctccggcggcgagctggctgacgaggtcatccgccagctggtggagctcgccaggtcggaggcggcggctcgcgctgagatggagcagcttactccatggccgtcgccggagcttgctgccattactggacagtacgccgacttcggggctctcgacgctgacaccgcctggcatgatgatgcagcagccatcgcggcagcagtagtgccttccactgaggaggagcagcaagcgtggatcgcggccggctgcgacgtcggcgcgtgccggacggaggagaaggcgcgcgagaacgacgctgctctggccgagccgtgtctgtcctcgttcgtggagatgtcagagatctgccccgccagcgtcgtcggtcaccctcagccacggcggggacgagggcgtcgacagcagcggcaagacagccccgcggccgcagctggccgcgccgacgccggcgaagggcggctacgacgtggcctaccccgaccgcggcacggtgatctcgcgctacaaggagaagcggaagaacaggaggttcgacaagcagatccggtacgagtcgcgcaaggcccgcgccgacggccggatgcggatcaaggggcggttcgccaagtccggcgaggtctgagacgcgtgcgggcgctcacgccatgccaacggcaacgagctggtagggggaccgtgcgtgtgtttcacgtgggtggttaggtttggtattttggttggtgttgcagctcgctgctcgcacgtgtcgatgcgtactagtctacgttgattagagacggttgtctactctttcctcattcgtttaataaaacacggctccaccaccaatgcaagtttcaccccgatcgattggaagcgtgtgtttacgtggagaactcgctaagttagatgtcgtttggtaatgtaatagataaccgatattgttaaattatatttgtttaggtttaattataattaataatatactagaaatagataccggcttattcgaacttgttactgccggtattcgagagtgaatcattaccattattatttaagttgtatttcgtgaatcaaacgacacattagtttctagtcaaatttgttattc

SEQ ID NO: 7357 - protein, 208 aa, Zea mays subsp. mays
  peptide (1)..(208): Ceres Seq. ID no. 13498350
MEQLTPWPSPELAAITGQYADFGALDADTAWHDDAAAIAAAVVPSTEEEQQAWIAAGCDVGACRTEEKARENDAALAEPCLSSFVEMSEICPASVVGHPQPRRGRGRRQQRQDSPAAAAGRADAGEGRLRRGLPRPRHGDLALQGEAEEQEVRQADPVRVAQGPRRRPDADQGAVRQVRRGLRRVRALTPCQRQRAGRGTVRVFHVGG

SEQ ID NO: 7358 - protein, 206 aa, Zea mays subsp. mays
  peptide (1)..(206): Ceres Seq. ID no. 13498351
MSAADAAGGKEAAPACDSCTGMPAVVYCRADSARLCLQCDRHVHGANTVSTRHARAPLCAGCHAAAAAAATPAASSAPAAAWGRRRMSGTAVAPPTVVATTVARWKGTPGAPRSPISRPSWAPAPRGRSPRRSAWRAGAPAASWLTRSSASWWSSPGRRRRLALRWSSLLHGRRRSLLPLLDSTPTSGLSTLTPPGMMMQQPSRQQ

SEQ ID NO: 7359 - protein, 185 aa, Zea mays subsp. mays
  peptide (1)..(185): Ceres Seq. ID no. 13498352
MPAVVYCRADSARLCLQCDRHVHGANTVSTRHARAPLCAGCHAAAAAAATPAASSAPAAAWGRRRMSGTAVAPPTVVATTVARWKGTPGAPRSPISRPSWAPAPRGRSPRRSAWRAGAPAASWLTRSSASWWSSPGRRRRLALRWSSLLHGRRRSLLPLLDSTPTSGLSTLTPPGMMMQQPSRQQ

SEQ ID NO: 7360 - DNA, 1706 bp, Zea mays subsp. mays; identical to SEQ ID NO: 2601
  misc_feature (1)..(1706): Ceres Seq. ID no. 12408837
  misc_feature (1)..(1706): Ortholog of  Ceres SEQ ID NO 14312212 as cited in SEQ ID NO 54399
  misc_feature (1)..(1706): Ortholog of  Ceres SEQ ID NO 14311755 as cited in SEQ ID NO 57271
  misc_feature (1)..(1706): Ortholog of  Ceres SEQ ID NO 15171156 as cited in SEQ ID NO 58259
  misc_feature (1)..(1706): Ortholog of  Ceres SEQ ID NO 14302212 as cited in SEQ ID NO 66507
  misc_feature (1)..(1706): Ortholog of  Ceres SEQ ID NO 13653980 as cited in SEQ ID NO 69253

SEQ ID NO: 7361 - protein, 409 aa, Zea mays subsp. mays; identical to SEQ ID NO: 2602
  peptide (1)..(409): Ceres Seq. ID no. 12408838

SEQ ID NO: 7362 - protein, 296 aa, Zea mays subsp. mays; identical to SEQ ID NO: 2603
  peptide (1)..(296): Ceres Seq. ID no. 12408839

SEQ ID NO: 7363 - DNA, 1395 bp, Zea mays subsp. mays
  misc_feature (1)..(1395): Ceres Seq. ID no. 12408833
  misc_feature (1)..(1395): Ortholog of  Ceres SEQ ID NO 14311596 as cited in SEQ ID NO 51728
  misc_feature (1)..(1395): Ortholog of  Ceres SEQ ID NO 15177787 as cited in SEQ ID NO 59431
  misc_feature (1)..(1395): Ortholog of  Ceres SEQ ID NO 14307004 as cited in SEQ ID NO 59551
  misc_feature (1)..(1395): Ortholog of  Ceres SEQ ID NO 15177031 as cited in SEQ ID NO 60171
  misc_feature (1)..(1395): Ortholog of  Ceres SEQ ID NO 12617197 as cited in SEQ ID NO 63406
  misc_feature (1)..(1395): Ortholog of  Ceres SEQ ID NO 13597804 as cited in SEQ ID NO 64182
  misc_feature (1)..(1395): Ortholog of  Ceres SEQ ID NO 15179788 as cited in SEQ ID NO 64818
  misc_feature (1)..(1395): Ortholog of  Ceres SEQ ID NO 14302768 as cited in SEQ ID NO 64889
  misc_feature (1)..(1395): Ortholog of  Ceres SEQ ID NO 13598565 as cited in SEQ ID NO 65250
  misc_feature (1)..(1395): Ortholog of  Ceres SEQ ID NO 13598597 as cited in SEQ ID NO 65496
  misc_feature (1)..(1395): Ortholog of  Ceres SEQ ID NO 13596284 as cited in SEQ ID NO 68273
  misc_feature (1)..(1395): Ortholog of  Ceres SEQ ID NO 15178902 as cited in SEQ ID NO 0
aaataggtagatgatgccgctaacagtaacacagagtaaaagactccaattttcccacggctactgaatcacggatgcttaaatctccccaatccgtatctctgtttccctcacagcgcggctgcctataaccactccaggtctccagcgaagcaggctcaggcgcaacgcaacaacacaaggcggcggttatggcctctgctgctgcgacggctacgatggggacggggaaggtggtgtgcgtcaccggcgcatcagggtacatcgcgtcctggattgtcaggctcctcctcgaccgcggctacaccgtccgcgccaccgtgcgagacaccgctgacccaaagaaaacattgcacctgactgcgttggatggtgctaaggataggctgcacttatttaaagctagcctgctagaagagggttctttcgatgctgcagttcatggatgcgacactgtatttcatactgcctctcccttttatcacaatgtcaaggatgctaaggcagagttacttgacccagcagttaagggaacactcaatgttctcggttcatgcaagaaagcttctattaaaaaggtggttgtaacatcatctatggctgctgtagcctacaacgggaggccaaggactcctgaggtcacagttgacgagacatggttttctgatccacaaatttgtgaaacaaatcagcaatggtatattttgtccaagacgctggcagaggaggctgcttggaagttctcaagggataatggacttgaaatcgttactataaacccagcgatggttattggtcccctgctgcagcctacactaaataccagtgctgaagcaatcctgaagttaatcaatgggtcatcgtctacatatcccaatttttgctttggatgggttaatgtcaaggatgttgccctggcccatatccttgcatacgaggttccctcatcaaatggaaggtactgcatggtggaaagagttgttcactactcagaactggtgaacattatccgcaacatgtatcctacccttcctcttccggacaagtgtgcagatgacaagccgtttgtcccaccctaccaagtatcaaaggagaagataaaaagcataggcatcgagttgattccactggagacgagcgtcaaggagaccatcgaaagcttgaaagagaaggggttcgctagtttttgactcgtgcaagctgtgaaacagaagtgttactgtactacgtgatgttgcattgtacacatgcatcggacttcgcagttcccaagctattttggtagctttggtctgtaagattacctaaaataaactgagccacgttgccacgctgtagcttttgtacatgttatgctttgatcggattgagacacgtgatatatggtcgttgctt

SEQ ID NO: 7364 - protein, 332 aa, Zea mays subsp. mays
  peptide (1)..(332): Ceres Seq. ID no. 12408834
MASAAATATMGTGKVVCVTGASGYIASWIVRLLLDRGYTVRATVRDTADPKKTLHLTALDGAKDRLHLFKASLLEEGSFDAAVHGCDTVFHTASPFYHNVKDAKAELLDPAVKGTLNVLGSCKKASIKKVVVTSSMAAVAYNGRPRTPEVTVDETWFSDPQICETNQQWYILSKTLAEEAAWKFSRDNGLEIVTINPAMVIGPLLQPTLNTSAEAILKLINGSSSTYPNFCFGWVNVKDVALAHILAYEVPSSNGRYCMVERVVHYSELVNIIRNMYPTLPLPDKCADDKPFVPPYQVSKEKIKSIGIELIPLETSVKETIESLKEKGFASF

SEQ ID NO: 7365 - protein, 323 aa, Zea mays subsp. mays
  peptide (1)..(323): Ceres Seq. ID no. 12408835
MGTGKVVCVTGASGYIASWIVRLLLDRGYTVRATVRDTADPKKTLHLTALDGAKDRLHLFKASLLEEGSFDAAVHGCDTVFHTASPFYHNVKDAKAELLDPAVKGTLNVLGSCKKASIKKVVVTSSMAAVAYNGRPRTPEVTVDETWFSDPQICETNQQWYILSKTLAEEAAWKFSRDNGLEIVTINPAMVIGPLLQPTLNTSAEAILKLINGSSSTYPNFCFGWVNVKDVALAHILAYEVPSSNGRYCMVERVVHYSELVNIIRNMYPTLPLPDKCADDKPFVPPYQVSKEKIKSIGIELIPLETSVKETIESLKEKGFASF

SEQ ID NO: 7366 - protein, 197 aa, Zea mays subsp. mays
  peptide (1)..(197): Ceres Seq. ID no. 12408836
MAAVAYNGRPRTPEVTVDETWFSDPQICETNQQWYILSKTLAEEAAWKFSRDNGLEIVTINPAMVIGPLLQPTLNTSAEAILKLINGSSSTYPNFCFGWVNVKDVALAHILAYEVPSSNGRYCMVERVVHYSELVNIIRNMYPTLPLPDKCADDKPFVPPYQVSKEKIKSIGIELIPLETSVKETIESLKEKGFASF

SEQ ID NO: 7367 - DNA, 1014 bp, Zea mays subsp. mays
  misc_feature (1)..(1014): Ceres Seq. ID no. 12412614
  misc_feature (1)..(1014): Ortholog of  Ceres SEQ ID NO 14301727 as cited in SEQ ID NO 61209
actcccaagttcaccttcctctgcctgtagatcttctagagtcccgtatacggtttcgtctttcgtgtcccacttccatggcggcggcggcgcagctgcacggatcggctgcggccacggtggcatatcgcgggactcgagcctactcagttccatcctcatgccggtggccgcagtctggttccccgaagctttcgatttctacaagtggagtcagtatgaagccatttggctttgctgctaaactttcaacaaaatgtgcaaatgagaatgctcgagttgaagaattagatttgaggtcagaccagatgaaggaattacaggtggaggagcaggttattccccagaagaggagtgctaaaatccatgacttctgccttgggatcccttttggtggtcttttattctctatggggcttctaggatacatcttctccagaagcaccataagtcttgtcttgggcattgcaccagggctagccactctgctacttggcactctcagtctgaagttctggaggagcggcagatccagcttcctgcttatcttggctcaggcagcaatttctgctttcctggcatggaaatactctcatgcttacttcttgacaaatagactccttccttggggcttctacgcgtcactgagcactgcaatgggttgtttctacgcctatgtgctacttgcgggaggaaatcccccgcctaagaagttggcagccattccaccgcagtaggaagagccgaagagggattcggtttaggatcagcgtgcgttgacccttcgctccatagtaaaattttgattgtcttcctaagtatattctgcagcctttgtacactgctggctgggcctttgttttttcgatcctggtagcctgaaattttgagcaaataaagatccagaggacaatagccctgcctccagtaacatgctgttttcttgctcatgaatgaacgtgataaatataagcctgctcggcaaactggctgtcacagaaagttgtggcaagc

SEQ ID NO: 7368 - protein, 244 aa, Zea mays subsp. mays
  peptide (1)..(244): Ceres Seq. ID no. 12412615
SQVHLPLPVDLLESRIRFRLSCPTSMAAAAQLHGSAAATVAYRGTRAYSVPSSCRWPQSGSPKLSISTSGVSMKPFGFAAKLSTKCANENARVEELDLRSDQMKELQVEEQVIPQKRSAKIHDFCLGIPFGGLLFSMGLLGYIFSRSTISLVLGIAPGLATLLLGTLSLKFWRSGRSSFLLILAQAAISAFLAWKYSHAYFLTNRLLPWGFYASLSTAMGCFYAYVLLAGGNPPPKKLAAIPPQ

SEQ ID NO: 7369 - protein, 219 aa, Zea mays subsp. mays
  peptide (1)..(219): Ceres Seq. ID no. 12412616
MAAAAQLHGSAAATVAYRGTRAYSVPSSCRWPQSGSPKLSISTSGVSMKPFGFAAKLSTKCANENARVEELDLRSDQMKELQVEEQVIPQKRSAKIHDFCLGIPFGGLLFSMGLLGYIFSRSTISLVLGIAPGLATLLLGTLSLKFWRSGRSSFLLILAQAAISAFLAWKYSHAYFLTNRLLPWGFYASLSTAMGCFYAYVLLAGGNPPPKKLAAIPPQ

SEQ ID NO: 7370 - protein, 172 aa, Zea mays subsp. mays
  peptide (1)..(172): Ceres Seq. ID no. 12412617
MKPFGFAAKLSTKCANENARVEELDLRSDQMKELQVEEQVIPQKRSAKIHDFCLGIPFGGLLFSMGLLGYIFSRSTISLVLGIAPGLATLLLGTLSLKFWRSGRSSFLLILAQAAISAFLAWKYSHAYFLTNRLLPWGFYASLSTAMGCFYAYVLLAGGNPPPKKLAAIPPQ

SEQ ID NO: 7371 - DNA, 1174 bp, Zea mays subsp. mays
  misc_feature (1)..(1174): Ceres Seq. ID no. 12412610
  misc_feature (1)..(1174): Ortholog of  Ceres SEQ ID NO 13596762 as cited in SEQ ID NO 63019
gcccttccgcggctgtgctgtgctctgctctgctctgctccccgtctttcctcctctcccggtctttcctcctctccccttcccgcccagcgcgtccccacgaggaaccaaccccgcggcatggggatcgtggaggaggcgcacaacctgcgagtggtgggcgaggggaagcgcggggtcatcgtgctggcgcacggcttcggcaccgaccagtccgtgtggaagcacctggtgccgcacctcgtcgccgactaccgcgtcgtgctcttcgacaccatgggcgccggccccaccaacccggactacttcgacttctcccgctacgccacgctcgagggctacgcgctcgacctcctcgccatcctccaggagctcggcgtccgctcctgcatctacgtcggccactccgtctccgcggtcatcggcgcgctcgcctccatctccaggcctgacctcttcaccaagctcgtgctcctctccgcgtccccaaggtacctcaatgatgtggactactatggcgggtttgagcaagatgagcttgatgagctgtttgaggcgatgcgatcaaactacaaggcctggtgctcaggttttgcgcccctgtgtgttggcggagacatggaatcagtggcagttcaggagtttagcaggacgctcttcaatatacgtccggacattgcgcttagtgttgcccagacgatcttccagagcgacgtgcgcagcctcctcccgcacgtcactgtcccatgccacattgttcagagcaccaaggatctcgcggtgccggtcgtggtgtctgagtacctgcacaggcaccttggtggcgactccatcgtggaggtgatgccctctgaaggccatcttccccagcttagctctccggacattgtaatccctgtcttactccgacacatccagcacgatatcgcagtctaggttggtcaatcgttcctccaagacgatgagcatccgaagctgtctacttgtctgtttgtatcttgcttaattgttcaacgtaggatcgcatctatttgatgttctaataaggtttcaaaggtgttatgtagtgttggcggtggaaagtgtagcatatatgtatgtgttatccattggtcgtctaatgtaggctaccatgttggatgctctgacatctgaagtccttcagaagctcttc

SEQ ID NO: 7372 - protein, 311 aa, Zea mays subsp. mays
  peptide (1)..(311): Ceres Seq. ID no. 12412611
ALPRLCCALLCSAPRLSSSPGLSSSPLPAQRVPTRNQPRGMGIVEEAHNLRVVGEGKRGVIVLAHGFGTDQSVWKHLVPHLVADYRVVLFDTMGAGPTNPDYFDFSRYATLEGYALDLLAILQELGVRSCIYVGHSVSAVIGALASISRPDLFTKLVLLSASPRYLNDVDYYGGFEQDELDELFEAMRSNYKAWCSGFAPLCVGGDMESVAVQEFSRTLFNIRPDIALSVAQTIFQSDVRSLLPHVTVPCHIVQSTKDLAVPVVVSEYLHRHLGGDSIVEVMPSEGHLPQLSSPDIVIPVLLRHIQHDIAV

SEQ ID NO: 7373 - protein, 280 aa, Zea mays subsp. mays
  peptide (1)..(280): Ceres Seq. ID no. 12412612
PFRGCAVLCSALLPVFPPLPVFPPLPFPPSASPRGTNPAAWGSWRRRTTCEWWARGSAGSSCWRTASAPTSPCGSTWCRTSSPTTASCSSTPWAPAPPTRTTSTSPATPRSRATRSTSSPSSRSSASAPASTSATPSPRSSARSPPSPGLTSSPSSCSSPRPQGTSMMWTTMAGLSKMSLMSCLRRCDQTTRPGAQVLRPCVLAETWNQWQFRSLAGRSSIYVRTLRLVLPRRSSRATCAASSRTSLSHATLFRAPRISRCRSWCLSTCTGTLVATPSWR

SEQ ID NO: 7374 - protein, 271 aa, Zea mays subsp. mays
  peptide (1)..(271): Ceres Seq. ID no. 12412613
MGIVEEAHNLRVVGEGKRGVIVLAHGFGTDQSVWKHLVPHLVADYRVVLFDTMGAGPTNPDYFDFSRYATLEGYALDLLAILQELGVRSCIYVGHSVSAVIGALASISRPDLFTKLVLLSASPRYLNDVDYYGGFEQDELDELFEAMRSNYKAWCSGFAPLCVGGDMESVAVQEFSRTLFNIRPDIALSVAQTIFQSDVRSLLPHVTVPCHIVQSTKDLAVPVVVSEYLHRHLGGDSIVEVMPSEGHLPQLSSPDIVIPVLLRHIQHDIAV

SEQ ID NO: 7375 - DNA, 1511 bp, Zea mays subsp. mays
  misc_feature (1)..(1511): Ceres Seq. ID no. 12407681
  misc_feature (1)..(1511): Ortholog of  Ceres SEQ ID NO 15174737 as cited in SEQ ID NO 52912
  misc_feature (1)..(1511): Ortholog of  Ceres SEQ ID NO 13624551 as cited in SEQ ID NO 0
atcaaacggactcacagctcgcagcacctgcatgacattgagaaccagccagctaaccaaccaaccaaccggcggagccaaagccaagaaggaaggcaacgtgcccatccagtcaggatgtgcaactccaacgtcaagtccgcgggggtggcccagatcgacggccgcccggtgctgcagccggcgggcaaccgcgtggcggcgccggagccggacgcctcccgcccgctcaagaagtccctccagaagtcgctctccatgccggcctactacgacagcaatgccaccgcgggcgcccgtcctgcgccggccgagaacaccacccgtgcagcggctaattcgtctccgctgcctcccgcgaaggcggcgacgaaggcagcgggcgctttccccgcggagaagagcggcaggtccaaggcagccaggaggccaggcgccgtgccgccgccggtggtggcgttcgcggcgctggacgcgttggagccggcggggagcatcgccgcggcgcagcgggagcacgccgcgcaggcgcaggcgcagcgcaagctgcggatcgcgcactacggccgcaccgcgtccttctcccgggtggaggggcgagtagtcggcgccgcggccgccgcccccgagcgggccgtcaccgcctcccccgccgggcaggacgagaagcgctgcagcttcatcacgccctactcagaccccctgtatgtcgcgtaccacgacgaggagtggggagtgcccgtgcacgacgacgagttgctattcgagatgctcacactgtctggcgtgcaagtcggggccgactggacttccatcctcaagaaaagacacgtgtacagggaggcgttctccggcttcaacgtggatgcggtcgccaagtacaccgagaagcagatggcgtcgctgagcgccgactacgggctggatttgggcaccgtcagaggaaccgtcaacaacgcctgccggattatcgaggtgcggagggacttcggctcgctggacaggtacgtgtgggcgttcgtgaacaacaggccgctgtcgccgagctacaggtacagccggaagatcccggcgaagacgtccaagtcggagtgcatcagcaaggacatggtccggcgcaggttccgcttcgtcggccccaccgtcgtccactccttcatgcaggcggtcggcctcaccaacgaccacctcgtctcgtgcccgcgccaccgcgcctgctccgccgccgccgttaactgattctgctgaccaccgtccaccgatcaagagccagacgtaaggaagaaaagagaccttttatctaaggacacgtacaatacaaccgagaaaaaggagaaaggttagtagcctctagtagcactagatcgaagtagtagtatacgaaagggagagtgctggtttgcaagtgtgtgtgcatcatgtacgtatgatgatcgagtgtgcttgtgtagattagttacgcccccacccctaattattagtcaatgaatgagcttgcttgctgcgacttc

SEQ ID NO: 7376 - protein, 412 aa, Zea mays subsp. mays
  peptide (1)..(412): Ceres Seq. ID no. 12407682
IKRTHSSQHLHDIENQPANQPTNRRSQSQEGRQRAHPVRMCNSNVKSAGVAQIDGRPVLQPAGNRVAAPEPDASRPLKKSLQKSLSMPAYYDSNATAGARPAPAENTTRAAANSSPLPPAKAATKAAGAFPAEKSGRSKAARRPGAVPPPVVAFAALDALEPAGSIAAAQREHAAQAQAQRKLRIAHYGRTASFSRVEGRVVGAAAAAPERAVTASPAGQDEKRCSFITPYSDPLYVAYHDEEWGVPVHDDELLFEMLTLSGVQVGADWTSILKKRHVYREAFSGFNVDAVAKYTEKQMASLSADYGLDLGTVRGTVNNACRIIEVRRDFGSLDRYVWAFVNNRPLSPSYRYSRKIPAKTSKSECISKDMVRRRFRFVGPTVVHSFMQAVGLTNDHLVSCPRHRACSAAAVN

SEQ ID NO: 7377 - protein, 373 aa, Zea mays subsp. mays
  peptide (1)..(373): Ceres Seq. ID no. 12407683
MCNSNVKSAGVAQIDGRPVLQPAGNRVAAPEPDASRPLKKSLQKSLSMPAYYDSNATAGARPAPAENTTRAAANSSPLPPAKAATKAAGAFPAEKSGRSKAARRPGAVPPPVVAFAALDALEPAGSIAAAQREHAAQAQAQRKLRIAHYGRTASFSRVEGRVVGAAAAAPERAVTASPAGQDEKRCSFITPYSDPLYVAYHDEEWGVPVHDDELLFEMLTLSGVQVGADWTSILKKRHVYREAFSGFNVDAVAKYTEKQMASLSADYGLDLGTVRGTVNNACRIIEVRRDFGSLDRYVWAFVNNRPLSPSYRYSRKIPAKTSKSECISKDMVRRRFRFVGPTVVHSFMQAVGLTNDHLVSCPRHRACSAAAVN

SEQ ID NO: 7378 - protein, 326 aa, Zea mays subsp. mays
  peptide (1)..(326): Ceres Seq. ID no. 12407684
MPAYYDSNATAGARPAPAENTTRAAANSSPLPPAKAATKAAGAFPAEKSGRSKAARRPGAVPPPVVAFAALDALEPAGSIAAAQREHAAQAQAQRKLRIAHYGRTASFSRVEGRVVGAAAAAPERAVTASPAGQDEKRCSFITPYSDPLYVAYHDEEWGVPVHDDELLFEMLTLSGVQVGADWTSILKKRHVYREAFSGFNVDAVAKYTEKQMASLSADYGLDLGTVRGTVNNACRIIEVRRDFGSLDRYVWAFVNNRPLSPSYRYSRKIPAKTSKSECISKDMVRRRFRFVGPTVVHSFMQAVGLTNDHLVSCPRHRACSAAAVN

SEQ ID NO: 7379 - DNA, 1420 bp, Zea mays subsp. mays
  misc_feature (1)..(1420): Ceres Seq. ID no. 12362864
  misc_feature (1)..(1420): Ortholog of  Ceres SEQ ID NO 13598413 as cited in SEQ ID NO 68934
gcacgagaccattacctagaacatcctaatcgaaaacttcgatcccacgtcttctcaacctttcttcttctctcctcgagaaccccaatccaaacccccaaccgccaaaattcctacgagatatatcacagaaatatcgtcttggctcagatcgtgcccgagtgaggaggcagtgagttttgaggggacgcaggatcatggcgtcgtcgctggccgaggaggaggaggccttcgagcacacgcttctggtggtgcgcgaggtgtcagtgtacaagatcccgccgcgcaccaccagcggcggctacaagtgcggcgagtggctgcagtcggacaagatctggtccgggcgcctccgcgtggtgtcctgcggtgaccgctgcgagatccggctcgaggacccggccacgggggagctcttcgccgcctgcttcgtgctgccggggcagcgggagagcgccgtcgagaccgtgctcgactcctcccgctacttcgtgctccgcatcgaggacggcagggggaagcatgccttcgtcgggctcggcttcaacgagcgcaacgaagcattcgacttcaacgtcgccctctctgaccacgagaaatacgtcaagagggagcaggagaaggagaccacgggcgctggcggcgaggagactggcggcggtgagattgatatacatccggctgtcaatcgccgactcaaggaaggtgaaaccattaggataactgtaaaaaacaagccatcaactggaagtggtatgctttcagctgctggtttatctggagggaccactgcaaaacccaagacaagcatgcttctcgcgccacctccaggtgcagctgggaagcttcgatctcctcttccaccaccacctaacgaccctgcagctgcaaggatgaattctggacatactgcaggaatcagggctccaaaagagcccaccaagagaaataacgaccctttttcagatctttctgctataaagcaaaatctaccttcatctgctgaacccggacaaacaaagagcacaggagctggatgggcagcattctgacgatggatgcatgatctactgctactattggcatttgtttatctgaagaaggggaatgggtagttgaagcaccgaacaaggatctggaactgctggatgcctctacccctttcgaaactgaatggttaaaatgattgatcaacctaccagttccagttgtcacttgtcagtcgagaaataaacctttcccagagttgtattacccgtctcaccacatgaatggatgctcacattttctggatttagatacagcgtcccatcttgtttttatgttattcgtgctatgtttcacaaagcaataccagaatcatactgacctcgatgtgtattttgcggcgaaagattggaaatactgttacaagtgtgtc

SEQ ID NO: 7380 - protein, 284 aa, Zea mays subsp. mays
  peptide (1)..(284): Ceres Seq. ID no. 12362865
MASSLAEEEEAFEHTLLVVREVSVYKIPPRTTSGGYKCGEWLQSDKIWSGRLRVVSCGDRCEIRLEDPATGELFAACFVLPGQRESAVETVLDSSRYFVLRIEDGRGKHAFVGLGFNERNEAFDFNVALSDHEKYVKREQEKETTGAGGEETGGGEIDIHPAVNRRLKEGETIRITVKNKPSTGSGMLSAAGLSGGTTAKPKTSMLLAPPPGAAGKLRSPLPPPPNDPAAARMNSGHTAGIRAPKEPTKRNNDPFSDLSAIKQNLPSSAEPGQTKSTGAGWAAF

SEQ ID NO: 7381 - DNA, 1314 bp, Zea mays subsp. mays
  misc_feature (1)..(1314): Ceres Seq. ID no. 12344243
  misc_feature (1)..(1314): Ortholog of  Ceres SEQ ID NO 15172070 as cited in SEQ ID NO 59663
atgcgcctcgcggccgcttcgacagtccctcgcgttccatttgcttcggctcatctcagatcaagctagcgcacctgacacccaccacctccctcccagatccaccaccccagccatggccaccgcctttgactccccgacctcctcccccgccgccgcgcccttccacgacgaccctttcctccatttcgacggctcggcccccgccgccgccgacggcttcccggcctccccggacgcctacgcgccctcccccttcggcatgccccactccaacggcgacctccacgacgaccctttcgccgcacctgctgactccaacggtgggcccatccttccgccgcccaccgagatgggccgcgaggagggattcctgctccgcgagtggtgccgacaaaatgctattcaccttgaggaaaaagagaagaaggagaaggagctgaggagccaaatcatcgttgatgctgaagagtttaagaaagcttttgttgagaagagaaagctcaatgctgagacaagtaagggccaaaaccgtgacagggagaagcttttcctagcaaaccaggaaaagttccatgctggtgcagataagcaatactggaaggcgatatctgaacttatcccacatgagattgctaacatcgagaagagaggggcaaggaaagacaaggagaagaagcctgggatcgtggtgatccagggaccgaagcctgggaagccaacggacatggcacggatgcggcagatattgctgaagctgaagcacactcccccaccacacatgaagccacctccgccacctgccgcagctaccggaaaggatggagcaccagctgccgccgggaaggatggagctaagccagcaaccgttgccaacggcagtgtccctgagatggaaaaggctgctgcggaggcatcagtgccagcggcagcaccaccagcagcaactgagccgatcgcagctgcttaatctaatcatctgtggtaggaggatgtgaaaaatctcttattggagttgttgcagaggcggtggtggtgagtgaaactgaaaacgtgtgaatttccggcatggtggaggcatgcactgtgtatttgttacctcgattcatttacattactgctactatatattgttattgcattttgtagagaaggggcgggcgtatcctggttcatggtaataataaggttgtattaggaggatgtttggctgtattatgtttcttcttccaagtgtttgtaaatttcccttttgttattaaaactgattgtattgttaaatttttctttgttattaaaactgattgtattgct

SEQ ID NO: 7382 - protein, 322 aa, Zea mays subsp. mays
  peptide (1)..(322): Ceres Seq. ID no. 12344244
CASRPLRQSLAFHLLRLISDQASAPDTHHLPPRSTTPAMATAFDSPTSSPAAAPFHDDPFLHFDGSAPAAADGFPASPDAYAPSPFGMPHSNGDLHDDPFAAPADSNGGPILPPPTEMGREEGFLLREWCRQNAIHLEEKEKKEKELRSQIIVDAEEFKKAFVEKRKLNAETSKGQNRDREKLFLANQEKFHAGADKQYWKAISELIPHEIANIEKRGARKDKEKKPGIVVIQGPKPGKPTDMARMRQILLKLKHTPPPHMKPPPPPAAATGKDGAPAAAGKDGAKPATVANGSVPEMEKAAAEASVPAAAPPAATEPIAAA

SEQ ID NO: 7383 - protein, 284 aa, Zea mays subsp. mays
  peptide (1)..(284): Ceres Seq. ID no. 12344245
MATAFDSPTSSPAAAPFHDDPFLHFDGSAPAAADGFPASPDAYAPSPFGMPHSNGDLHDDPFAAPADSNGGPILPPPTEMGREEGFLLREWCRQNAIHLEEKEKKEKELRSQIIVDAEEFKKAFVEKRKLNAETSKGQNRDREKLFLANQEKFHAGADKQYWKAISELIPHEIANIEKRGARKDKEKKPGIVVIQGPKPGKPTDMARMRQILLKLKHTPPPHMKPPPPPAAATGKDGAPAAAGKDGAKPATVANGSVPEMEKAAAEASVPAAAPPAATEPIAAA

SEQ ID NO: 7384 - protein, 235 aa, Zea mays subsp. mays
  peptide (1)..(235): Ceres Seq. ID no. 12344246
MPHSNGDLHDDPFAAPADSNGGPILPPPTEMGREEGFLLREWCRQNAIHLEEKEKKEKELRSQIIVDAEEFKKAFVEKRKLNAETSKGQNRDREKLFLANQEKFHAGADKQYWKAISELIPHEIANIEKRGARKDKEKKPGIVVIQGPKPGKPTDMARMRQILLKLKHTPPPHMKPPPPPAAATGKDGAPAAAGKDGAKPATVANGSVPEMEKAAAEASVPAAAPPAATEPIAAA

SEQ ID NO: 7385 - DNA, 1466 bp, Zea mays subsp. mays
  misc_feature (1)..(1466): Ceres Seq. ID no. 12387022
  misc_feature (1)..(1466): Ortholog of  Ceres SEQ ID NO 14311812 as cited in SEQ ID NO 51566
gcgtcaccatccatttgacgaggcggtttatcccccagcaccccaaccaacctttccacgtaccaccgggtttctgtccgcgccccgcccttcaaaagcaggtccgcacgccggccggcgagacagacgacaccaccacgccgggacgggaggcacaggtgcggtctgcgtcgagagttggtccactggcaggccggaatgaagaagtgcgcgtcggagctggagctggaggcgttcatccgggagagcggcgaggacgcccgcgccgccgccggaggtagcagtccggggtgcggtggatcaagcgatcccggagggagcggcgtcttctcacccggcttcggtttcgccgactcggacaccatggatggaggcagttggtggtacgggaacgtccgcacgccgaacccagtcatgtcgcaggcggcgtccatatccgctagccccgggctaaccacctcagccaatcatgctcttgaaagcgagtcagactccgacagcgaatcactgtatgaggtagagggagttccatacgagcgaggtaacagatccattgagacgaagcgaataagaaggatggtgtccaatagggagtctgcgcggcggtctaggaggaggaaacaggcacagttgtctgaccttgagtcacaggttgaacgactcaaaggtgaaaacgcaacactgttccagcaactttcagatgccaaccaacagttcagtactgcagtcacagacaacagaatcctcaaatccgatgtagaagcgttaagaattaaggtaaagatggcagaggatatggtagcgagaagtgctgtatcgtgtggcctaggcgaccttggcctggcaccatacgtgaactcaaggaagatgtgccaagctttgaatgtgctcacagggttggatttactagggagtgatgcgttcaggggtccaaccgcaggtacacgagtacagaactcaccagtacagagcactgcaagcctagagagtctggataaccgaaagtccaacgaggtgaccagttgcgcggcggacatttggccttgagcttcaagccattgatctgattcaaagcttgctccaccctcaaaaaaaggaccagagtttgtcaactcaaatagctggtggcttgagcagagcttctggcacgagttctcttgaaccatatttccacataagctttataggatgcatcactcttttgatgtcacttagtttcaagtataaaatgaagctgtctttgtacaaagctgcaaatgagaagtaaatgaaacgtcctggacaaacttgtgaagtaggaatgatacataggctctatttccaggtcagatgagacagttatgtttacaacaaaaagcaatacatgttgtttagaaaccgctattaattcacaggaatgttcaatccagtacaagtcatctagtagatttgcacccctaccttctagtagattcaaccatgttttc

SEQ ID NO: 7386 - protein, 282 aa, Zea mays subsp. mays
  peptide (1)..(282): Ceres Seq. ID no. 12387023
MKKCASELELEAFIRESGEDARAAAGGSSPGCGGSSDPGGSGVFSPGFGFADSDTMDGGSWWYGNVRTPNPVMSQAASISASPGLTTSANHALESESDSDSESLYEVEGVPYERGNRSIETKRIRRMVSNRESARRSRRRKQAQLSDLESQVERLKGENATLFQQLSDANQQFSTAVTDNRILKSDVEALRIKVKMAEDMVARSAVSCGLGDLGLAPYVNSRKMCQALNVLTGLDLLGSDAFRGPTAGTRVQNSPVQSTASLESLDNRKSNEVTSCAADIWP

SEQ ID NO: 7387 - protein, 227 aa, Zea mays subsp. mays
  peptide (1)..(227): Ceres Seq. ID no. 12387024
MDGGSWWYGNVRTPNPVMSQAASISASPGLTTSANHALESESDSDSESLYEVEGVPYERGNRSIETKRIRRMVSNRESARRSRRRKQAQLSDLESQVERLKGENATLFQQLSDANQQFSTAVTDNRILKSDVEALRIKVKMAEDMVARSAVSCGLGDLGLAPYVNSRKMCQALNVLTGLDLLGSDAFRGPTAGTRVQNSPVQSTASLESLDNRKSNEVTSCAADIWP

SEQ ID NO: 7388 - protein, 210 aa, Zea mays subsp. mays
  peptide (1)..(210): Ceres Seq. ID no. 12387025
MSQAASISASPGLTTSANHALESESDSDSESLYEVEGVPYERGNRSIETKRIRRMVSNRESARRSRRRKQAQLSDLESQVERLKGENATLFQQLSDANQQFSTAVTDNRILKSDVEALRIKVKMAEDMVARSAVSCGLGDLGLAPYVNSRKMCQALNVLTGLDLLGSDAFRGPTAGTRVQNSPVQSTASLESLDNRKSNEVTSCAADIWP

SEQ ID NO: 7389 - DNA, 1492 bp, Zea mays subsp. mays
  misc_feature (1)..(1492): Ceres Seq. ID no. 12408826
  misc_feature (1)..(1492): Ortholog of  Ceres SEQ ID NO 13596090 as cited in SEQ ID NO 68377
  misc_feature (1)..(1492): Ortholog of  Ceres SEQ ID NO 14303557 as cited in SEQ ID NO 68595
cccggacctctctctctctctctctcctcccttccatccaggctgccaagccgcctccggctccaccttaccggccggagataagaagaccctgatgcggctgcggccgcggcggccggaggcctgaggttggttggatatgggtggagtgacttcgtccgtggcctctaagatggccttcttccctcccgacccgccgtcttacggcgtggtggacgaggaggacgaggacgcggcgtgcaacaaggtggcaacaacgaggagggtggcgatgacgggcgtgcggtggagcgtgggcgtggaggcgaggcgggtgcgcacgcggcgaggctccgacatcatcgccgtctacgtgcggcaccccggggctagcctcaccctcctcttctcccacggcaacgccgccgacctcggcaagatgtacggcatcttcgtcgagctcagcgaacgactccacgtcaacctcatggggtatgattactctggttatgggcagtcatcaggcaagccaagtgaagctaatacctttgctgacatagaggctgcatacaagtgcctcgtggacgtctatggaactagggaagaagacattgttctgtatggccagtctgttggcagcggaccaacccttgatctagctgttcgtttcgatcgcgtaagagctgtggttctgcacagtccaatactgtctggattgcgtgtcatgtattctgtgaagaaaacgtactggtttgacatatacaagaacatcgacaaaatcccgcatgttaaatgcccggttttggtaatccatggcaccaaagatgacgtggtggactgctcccatggcaagcggctctacgagctgtgccagcacaagtacgaacccctgtggatcgagggaggtgaccatggcaacctggagaaattcccagtgttcattcgacatctgaagaagttcttactgtccgtaaagaagctgccatatgaaaaagacgccgcggccgagcacgagccacgggcagctgagaacagaacgcagcatggcggcgaagccatctccgaggctcctcctcgcatgatctcgcggaggctagagtcatcgaagaagagcacgatccatgaagcaaagcctaggccgagcagcgagcacacggataagcgcaggcgaagcacgggccacagggagaaggcgaggtccagcacagacaggagagagagatcgaggagaagcgtcgactgcttcgacagcatcctcgaacacgagcagccggaaaggccaaggaaaagcttcgacaggatcggagagaagattagagcaatgggtttgtgcaatgtcgactgcttcaaagagcctcctgatagcactgagctttccagaggtagttgagtggaaaaggaattctggttgctgtcagagtcagtatttttcttttcccttgctgctttagatacaaagaaaactacagctgtgtgatggcaatgttaatcataagatgttcacgaacagagc

SEQ ID NO: 7390 - protein, 409 aa, Zea mays subsp. mays
  peptide (1)..(409): Ceres Seq. ID no. 12408827
MGGVTSSVASKMAFFPPDPPSYGVVDEEDEDAACNKVATTRRVAMTGVRWSVGVEARRVRTRRGSDIIAVYVRHPGASLTLLFSHGNAADLGKMYGIFVELSERLHVNLMGYDYSGYGQSSGKPSEANTFADIEAAYKCLVDVYGTREEDIVLYGQSVGSGPTLDLAVRFDRVRAVVLHSPILSGLRVMYSVKKTYWFDIYKNIDKIPHVKCPVLVIHGTKDDVVDCSHGKRLYELCQHKYEPLWIEGGDHGNLEKFPVFIRHLKKFLLSVKKLPYEKDAAAEHEPRAAENRTQHGGEAISEAPPRMISRRLESSKKSTIHEAKPRPSSEHTDKRRRSTGHREKARSSTDRRERSRRSVDCFDSILEHEQPERPRKSFDRIGEKIRAMGLCNVDCFKEPPDSTELSRGS

SEQ ID NO: 7391 - protein, 398 aa, Zea mays subsp. mays
  peptide (1)..(398): Ceres Seq. ID no. 12408828
MAFFPPDPPSYGVVDEEDEDAACNKVATTRRVAMTGVRWSVGVEARRVRTRRGSDIIAVYVRHPGASLTLLFSHGNAADLGKMYGIFVELSERLHVNLMGYDYSGYGQSSGKPSEANTFADIEAAYKCLVDVYGTREEDIVLYGQSVGSGPTLDLAVRFDRVRAVVLHSPILSGLRVMYSVKKTYWFDIYKNIDKIPHVKCPVLVIHGTKDDVVDCSHGKRLYELCQHKYEPLWIEGGDHGNLEKFPVFIRHLKKFLLSVKKLPYEKDAAAEHEPRAAENRTQHGGEAISEAPPRMISRRLESSKKSTIHEAKPRPSSEHTDKRRRSTGHREKARSSTDRRERSRRSVDCFDSILEHEQPERPRKSFDRIGEKIRAMGLCNVDCFKEPPDSTELSRGS

SEQ ID NO: 7392 - protein, 365 aa, Zea mays subsp. mays
  peptide (1)..(365): Ceres Seq. ID no. 12408829
MTGVRWSVGVEARRVRTRRGSDIIAVYVRHPGASLTLLFSHGNAADLGKMYGIFVELSERLHVNLMGYDYSGYGQSSGKPSEANTFADIEAAYKCLVDVYGTREEDIVLYGQSVGSGPTLDLAVRFDRVRAVVLHSPILSGLRVMYSVKKTYWFDIYKNIDKIPHVKCPVLVIHGTKDDVVDCSHGKRLYELCQHKYEPLWIEGGDHGNLEKFPVFIRHLKKFLLSVKKLPYEKDAAAEHEPRAAENRTQHGGEAISEAPPRMISRRLESSKKSTIHEAKPRPSSEHTDKRRRSTGHREKARSSTDRRERSRRSVDCFDSILEHEQPERPRKSFDRIGEKIRAMGLCNVDCFKEPPDSTELSRGS

SEQ ID NO: 7393 - DNA, 1751 bp, Zea mays subsp. mays
  misc_feature (1)..(1751): Ceres Seq. ID no. 12408818
  misc_feature (1)..(1751): Ortholog of  Ceres SEQ ID NO 14307296 as cited in SEQ ID NO 53966
  misc_feature (1)..(1751): Ortholog of  Ceres SEQ ID NO 15175368 as cited in SEQ ID NO 60071
  misc_feature (1)..(1751): Ortholog of  Ceres SEQ ID NO 13528157 as cited in SEQ ID NO 60102
  misc_feature (1)..(1751): Ortholog of  Ceres SEQ ID NO 15225423 as cited in SEQ ID NO 64689
  misc_feature (1)..(1751): Ortholog of  Ceres SEQ ID NO 15179340 as cited in SEQ ID NO 0
ataagagtaggtgcagtatatcagtaaccagtaaatacttggacccagcagtaaccaggaccaggagagatcatcaaagtaaccttgctgccttttgagaacagaagcgtcagcagcaccagcaagaagcatcttctctctggagcggcgcctccgagaagaggacgacggatcgggaccaggaggcatggatctatctggcacgcagggcgagctcgcgatcccaatgcacgccaacgtcgcgtcgccctacggaggcggcgtcggcggccatgtcctgcagctgcaccgtgacgaccacggcagcaacaacggccagtctccggcgccgctgctgccaccgccgcctgccgcggcggaggagacggagagctcggcgaagaagcgcggtccggcagccggggccggcggcggcggaggcagctccgcggtgaagtaccgggagtgcctcaagaatcacgcggcggccatcggcgggaacgccaccgacgggtgtggcgagttcatgccaagcggcgaggagggctcgttggaggcgctcaagtgctccgcctgcggctgccaccgcaatttccaccgcaaggaggtggacgacgaggacgacgacatgtacggcgccgccgaaggcttcagcggcctcggtctcggcctcggcctcgggcacggccaccgcgccgcccgccgcctcctggcccccgccatggcgcacccgcaccacaagagcggcggcggggggctcctgatctccggggccgacccctacgccgcgtacgcgtcggcgcgcgcgctccctccggcgctgccgccgccgccagggcacgcccaccaccaccaccagtacgtgatgccgctgaacatgatgcacacctcggagtccgacgacatggagggcggccgcggcggctgcggggacgcggcgcgcggcagcggcgggtcgtcgtcgtccaggaagcggttccgcaccaagttcaccccggagcagaaggcgcgcatgctggagttcgcggagcgcgtggggtggcgcctccagaagctggacgacggcatggtgcaggccttctgccaggagatcggcgtgaagcggcgcgtgctcaaggtgtggatgcacaacaacaagcacaacctcgccaccaagcgcctcgaggcctcgccggcgcaggagcaggcgatggcgggcatggcgtcgccgccgccgccgccgccacccccacagctgcacttgcctctgcagatgcccgctggagtcatgccgccgccgccgccgccgccgcaggccgggtcgtcctgtcaccgcggcggtcccggctccccgctgccgctcaagctcgagtgaccaccgacaacctgacaaaaaacaagaagagggtgaccaccattggtggccgttgatccgtcctggtggtaagtggtaaactagctagctagcagaccgacggaccgcatcgatggctatttcactgttccattagtccattccttcccaagtgatctatctaccgtcgtcgtccaagcagggagagaagtgggcgatgaacttttcttgaaacaacaaaacgaacaaagtccaggttattatcgtctcttttttttccttcccttttccggtgctcgttgctttgtcacaaggtaggggagcaagcaaccaagcatgcatgatagtagtagctgatttcgactggactggactgatttccttccaaaaatttttttcctgatggtgaagaaaactaaatatcctactagtttcctcc

SEQ ID NO: 7394 - protein, 381 aa, Zea mays subsp. mays
  peptide (1)..(381): Ceres Seq. ID no. 12408819
MDLSGTQGELAIPMHANVASPYGGGVGGHVLQLHRDDHGSNNGQSPAPLLPPPPAAAEETESSAKKRGPAAGAGGGGGSSAVKYRECLKNHAAAIGGNATDGCGEFMPSGEEGSLEALKCSACGCHRNFHRKEVDDEDDDMYGAAEGFSGLGLGLGLGHGHRAARRLLAPAMAHPHHKSGGGGLLISGADPYAAYASARALPPALPPPPGHAHHHHQYVMPLNMMHTSESDDMEGGRGGCGDAARGSGGSSSSRKRFRTKFTPEQKARMLEFAERVGWRLQKLDDGMVQAFCQEIGVKRRVLKVWMHNNKHNLATKRLEASPAQEQAMAGMASPPPPPPPPQLHLPLQMPAGVMPPPPPPPQAGSSCHRGGPGSPLPLKLE

SEQ ID NO: 7395 - protein, 368 aa, Zea mays subsp. mays
  peptide (1)..(368): Ceres Seq. ID no. 12408820
MHANVASPYGGGVGGHVLQLHRDDHGSNNGQSPAPLLPPPPAAAEETESSAKKRGPAAGAGGGGGSSAVKYRECLKNHAAAIGGNATDGCGEFMPSGEEGSLEALKCSACGCHRNFHRKEVDDEDDDMYGAAEGFSGLGLGLGLGHGHRAARRLLAPAMAHPHHKSGGGGLLISGADPYAAYASARALPPALPPPPGHAHHHHQYVMPLNMMHTSESDDMEGGRGGCGDAARGSGGSSSSRKRFRTKFTPEQKARMLEFAERVGWRLQKLDDGMVQAFCQEIGVKRRVLKVWMHNNKHNLATKRLEASPAQEQAMAGMASPPPPPPPPQLHLPLQMPAGVMPPPPPPPQAGSSCHRGGPGSPLPLKLE

SEQ ID NO: 7396 - protein, 275 aa, Zea mays subsp. mays
  peptide (1)..(275): Ceres Seq. ID no. 12408821
MPSGEEGSLEALKCSACGCHRNFHRKEVDDEDDDMYGAAEGFSGLGLGLGLGHGHRAARRLLAPAMAHPHHKSGGGGLLISGADPYAAYASARALPPALPPPPGHAHHHHQYVMPLNMMHTSESDDMEGGRGGCGDAARGSGGSSSSRKRFRTKFTPEQKARMLEFAERVGWRLQKLDDGMVQAFCQEIGVKRRVLKVWMHNNKHNLATKRLEASPAQEQAMAGMASPPPPPPPPQLHLPLQMPAGVMPPPPPPPQAGSSCHRGGPGSPLPLKLE

SEQ ID NO: 7397 - DNA, 1643 bp, Zea mays subsp. mays
  misc_feature (1)..(1643): Ceres Seq. ID no. 12408814
  misc_feature (1)..(1643): Ortholog of  Ceres SEQ ID NO 13589020 as cited in SEQ ID NO 68432
gcacgagaccattacctagaacatcctaatcgaaagtctgccaacgccgctactcggcgcaccttggcttgctatttcgccaacaacctcctccctctttaccgcggcgtgccgcgtgcggcgggcgcggatggcaacggccgcctccgcctccccctcccccggcgcgttcggcgccaaaacccctgccccagcccgtgggctgagcacgcacccggtcctgaccccgagccccgcattcgcgaggtcttcgccgcgcacccccgcctgcggcaggtcccgcgccagcctccacatcggcggcctggggctcgaccagcagcagcagctgccgccgccgccggcaacggaaccgggctccacgtgccccccacggtcgcgccgctcgccgtgcctaagatggccggctccatgaagacccataagaacgtcctgctcttctactgcgaggagatgcgggacctcgcgcagcaggtggtcgcccggaacgatgacatcgaactgcgatccatctcatggaggacatttccggacggatacccgaatctgttcatctcgaatgcccataacattcgtgggcagcatgttgcctttttggcttcgtttagctcgcccagcgtcatatttgagcaactatctgtcatatataatctgccaaagttgtttatttcttcgtttactcttatactcccgtttttcccaaccgggacttctgagcgcatggaagatgagggagatgttgcaaccgcctttacacttgccagatttttgtcaaatataccaatatcacgaggcgggccatcgagtttagtaattttcgatatccatgctttgcaggagagattctactttggagactcagtcttaccatgttttgagagtggcatccccttgctgaaaagtaagcttcaggagctacctgattcccataatataactatagcatttccagatgacggtgcatggaaacgcttctataagcagcttcaacattttcctatggttatatgtaacaaagttagagaaggggagcagagaattgtacggataaaggagggagatcctagaggccgtcatgttgttatagtggatgacttggtccagtctggcagtactttgattgagtgccagaaagtactggctgctcatggagctgcaaaggtcagtgcatatgtgacacatggcattttccccaatagctcatgggagaaatttcagcatgacaatggagagggtccggagcatggcctgagccacttttggcttactgattcatgcccccttactgtcaaggcggtgaagggcagacggccatttgaaattctaagtctggccggacctattgcttctgctctccagatttaggcaaatctggtctgctcgatccttcgggatattgtgactattcagttagttcttctttcctttgttgctgttgaggaatttggtgttttcctttgtacagctattgagtgtctcgcaatgtatttactagaaaaccataaaatggcagatcttcactgcagggtctgcttggcagaaagcattcgtagtcgtagtattagctgttaataatttgactgagcaagtcaagcgttgatctgtgttctagtataaataaaactctcgaataagtttcagtg

SEQ ID NO: 7398 - protein, 454 aa, Zea mays subsp. mays
  peptide (1)..(454): Ceres Seq. ID no. 12408815
ARDHYLEHPNRKSANAATRRTLACYFANNLLPLYRGVPRAAGADGNGRLRLPLPRRVRRQNPCPSPWAEHAPGPDPEPRIREVFAAHPRLRQVPRQPPHRRPGARPAAAAAAAAGNGTGLHVPPTVAPLAVPKMAGSMKTHKNVLLFYCEEMRDLAQQVVARNDDIELRSISWRTFPDGYPNLFISNAHNIRGQHVAFLASFSSPSVIFEQLSVIYNLPKLFISSFTLILPFFPTGTSERMEDEGDVATAFTLARFLSNIPISRGGPSSLVIFDIHALQERFYFGDSVLPCFESGIPLLKSKLQELPDSHNITIAFPDDGAWKRFYKQLQHFPMVICNKVREGEQRIVRIKEGDPRGRHVVIVDDLVQSGSTLIECQKVLAAHGAAKVSAYVTHGIFPNSSWEKFQHDNGEGPEHGLSHFWLTDSCPLTVKAVKGRRPFEILSLAGPIASALQI

SEQ ID NO: 7399 - protein, 321 aa, Zea mays subsp. mays
  peptide (1)..(321): Ceres Seq. ID no. 12408816
MAGSMKTHKNVLLFYCEEMRDLAQQVVARNDDIELRSISWRTFPDGYPNLFISNAHNIRGQHVAFLASFSSPSVIFEQLSVIYNLPKLFISSFTLILPFFPTGTSERMEDEGDVATAFTLARFLSNIPISRGGPSSLVIFDIHALQERFYFGDSVLPCFESGIPLLKSKLQELPDSHNITIAFPDDGAWKRFYKQLQHFPMVICNKVREGEQRIVRIKEGDPRGRHVVIVDDLVQSGSTLIECQKVLAAHGAAKVSAYVTHGIFPNSSWEKFQHDNGEGPEHGLSHFWLTDSCPLTVKAVKGRRPFEILSLAGPIASALQI

SEQ ID NO: 7400 - protein, 317 aa, Zea mays subsp. mays
  peptide (1)..(317): Ceres Seq. ID no. 12408817
MKTHKNVLLFYCEEMRDLAQQVVARNDDIELRSISWRTFPDGYPNLFISNAHNIRGQHVAFLASFSSPSVIFEQLSVIYNLPKLFISSFTLILPFFPTGTSERMEDEGDVATAFTLARFLSNIPISRGGPSSLVIFDIHALQERFYFGDSVLPCFESGIPLLKSKLQELPDSHNITIAFPDDGAWKRFYKQLQHFPMVICNKVREGEQRIVRIKEGDPRGRHVVIVDDLVQSGSTLIECQKVLAAHGAAKVSAYVTHGIFPNSSWEKFQHDNGEGPEHGLSHFWLTDSCPLTVKAVKGRRPFEILSLAGPIASALQI
